United States Patent Application Publication US 2018/0126003 A1 - sequence listing, part 60

SEQ ID NO: 106844 - DNA, 1885 bp, Artificial Sequence
  derived and/or modified sequence
gagacttgcaggcagcaaacacggtgcgagcgaacaggagtgggggggaaattaaaaaaagctaaacgtggagcagccgatcggggaccgagaaggggaatcgatgcaaggagcacaataaaacaaaagctacttcggaacaaacagcatttaaaaatccacgactcaagataactgaaacctaaaataaaacctgctcatgcaccatggtttttcaaactcggtacccttcatggattattttatgctacatctggctgctccgctttgcacacacaggggaggcgcaggctgcgaaggaagtactactgctggattctaaagcacaacaaacagagttggagtggatttcctctccacccaatgggtgggaagaaattagtggtttggatgagaactataccccgatacgaacataccaggtgtgccaagtcatggagcccaaccaaaacaactggctgcggactaactggatttccaaaggcaatgcacaaaggatttttgtagaattgaaattcaccctgagggattgtaacagtcttcctggagtactgggaacttgcaaggaaacatttaatttgtactattatgaaacagactatgacactggcaggaatataagagaaaacctctatgtaaaaatagacaccattgctgcagatgaaagttttacccaaggtgaccttggtgaaagaaagatgaagcttaacactgaggtgagagagattggacctttgtccaaaaagggattctatcttgcctttcaggatgtaggggcttgcatagctttggtttctgtcaaagtgtactacaagaagtgctggtccattattgagaacttagctatctttccagatacagtgactggttcagaattttcctctttagtcgaggttcgagggacatgtgtcagcagtgcagaggaagaagcggaaaacgcccccaggatgcactgcagtgcagaaggagaatggttagtgcccattggaaaatgtatctgcaaagcaggctaccagcaaaaaggagacacttgtgaacgtaagtaatgtgtcctattaaaactccactttgcctttttaaatttcagtatcagacattttaaactttaatagttatttgaatacgtgaatctgctctgtaccagaagcgcaattcagtagatcttaaacaaagtcaccgttgaacttagtgattgccctacagtagcatctgcactaagtgtatgtaatcaatataggtgataatgaaatttgttactaaaatttaatgtgtcctatgcttaacatggaagtcaatagttgcacgttgggctatggagtttagagaggagtctgggtagttggacatatagcctggcaagactgaggtgacatttaacaggatttaatgagatgccattcctcctgtttttaaacccatattgtctgggcccttgagtagcagtaaataggaggttaagagggctgtgaataagagctctagtgacaggcagggcataaacgaatatatttacaaacttttagaattatcttatataaatactataactttaatacaaaattttcaaatttcacttacaaaatctctgtggttacttctgagaaaggtgtgtgttttttttttttttttttggactaagtaccaaaatgaccacatttttgtgaaagtgggccaaagtaaagttttaattattatagtacaccaattgcatgttttgaaacaatcatgtatgaattagtaaacttttttctttgttttataaaaccgttttttttctttcctagcattatgtggctaaatatttaaaactatgtcatatggaccttcaagattgatagatattctgtttctaggtttcatgaaaataaattataaagttatgtta

SEQ ID NO: 106845 - DNA, 840 bp, Artificial Sequence
  derived and/or modified sequence
atggtattccagaccagatacccttcttggattatcctttgctatatctggctgctgagattcgcacatacgggagaggcacaggctgccaaggaagtcctgctactcgacagcaaggcccagcagaccgaattagagtggatttcttctccacctaacggctgggaggagatctccggccttgacgaaaactatactccaattcggacttatcaagtgtgtcaggtaatggagccgaatcagaataactggttgcggacaaactggatctcgaagggtaacgcccaaagaatttttgtggagctgaaattcacacttagagattgtaactccctccctggagttctcggtacgtgcaaagagacctttaacctttattattatgagactgattatgacacaggcagaaatattcgggaaaacctctatgtcaaaatagatactatcgcagcggatgaatcattcactcagggcgacctgggggagagaaaaatgaagttaaacacagaggtgcgagagatagggcctctaagcaagaagggattctacctggcctttcaagacgttggagcctgcattgctctggtttctgtgaaagtctattataagaagtgctggtcaattatcgaaaatctggccatttttccggacacagttaccggatccgagttttcgtctctcgtggaggtaaggggcacctgcgtatccagcgccgaggaggaggccgagaacgcccctagaatgcattgttccgcggagggcgagtggctagtcccaatcggcaaatgcatatgcaaggccggctaccaacagaagggggacacctgcgagcgcaaatag

SEQ ID NO: 106846 - DNA, 840 bp, Artificial Sequence
  derived and/or modified sequence
atggtgttccagacccgctaccccagctggatcatcctgtgctacatctggctgctgcgctttgcccacactggagaggcccaggccgccaaggaggtgctgctgctggacagcaaggcccagcagacagagctggagtggatcagcagccccccaaatggctgggaggagatcagcggcctggatgagaactacacccccatccgcacctaccaggtgtgccaggtgatggagcccaaccagaacaactggctgcggaccaactggatcagcaaaggaaatgcccagaggatctttgtggagctgaagttcaccctgcgggactgcaacagcctgcccggggtgctgggcacctgcaaggagaccttcaacctgtactactatgaaacagattatgacaccggcaggaacatccgggagaacctgtatgtgaagattgacaccatcgctgctgatgagagcttcacccagggcgacctgggggagaggaagatgaagctgaacacagaggtgcgggagatcggccccctgagcaagaagggcttctacctggccttccaggatgtgggcgcctgcatcgccctggtgtctgtgaaggtgtactacaagaagtgctggagcatcatcgagaacctggccatcttcccagacacagtgacaggcagcgagttcagcagcctggtggaggtgcggggcacctgtgtgtcctctgctgaggaggaggctgaaaatgcccccaggatgcactgcagcgctgagggggagtggctggtgcccatcggcaagtgcatctgcaaggccggctaccagcagaagggggacacctgtgagaggaagtag

SEQ ID NO: 106847 - DNA, 840 bp, Artificial Sequence
  derived and/or modified sequence
atggtgttccagacccggtaccccagctggatcatcctgtgctacatttggcttctcagattcgcccataccggagaggcacaagccgccaaggaagtactcctcctggacagtaaagcacagcagaccgaactagaatggatctcctcgccgcctaacggttgggaggaaataagcggtctggatgagaattacactcccattaggacctaccaagtatgtcaggtgatggaacctaaccagaataattggctgcgcaccaactggattagtaaaggcaacgcgcagcgaatttttgtagaacttaagttcactctgagggactgcaactcactgccgggcgtactgggtacttgtaaagaaacatttaatctttattactatgagaccgattatgataccgggaggaacatccgagaaaatctatatgttaaaatcgacacaattgctgccgatgaaagctttactcagggagaccttggcgaacgtaagatgaagttgaacaccgaagttagagagataggacctctctccaagaagggcttttatctcgcgttccaggacgtgggagcgtgtatcgcattagttagcgtgaaggtttactataagaaatgttggtctatcattgagaacttggccatttttcctgatacagtcaccggcagcgagttctcgagccttgtcgaagtgcgcgggacatgtgtctccagcgccgaagaggaggcagaaaacgccccgagaatgcattgctcggctgaaggagagtggctcgtaccgattggcaagtgtatctgcaaggctgggtaccagcagaagggagacacctgcgagcggaagtag

SEQ ID NO: 106848 - DNA, 840 bp, Artificial Sequence
  derived and/or modified sequence
atggtgtttcagacacgttatccgagttggatcatcctgtgctatatctggttgttgcggtttgcacacactggcgaggcacaagctgctaaggaagtgcttctgttggatagtaaggctcagcagactgaactggaatggatttcttcaccaccaaatggatgggaagaaatcagcggactggatgagaactatacgccaatcagaacttaccaggtctgccaggtgatggagcccaatcagaacaactggcttagaacaaattggatttccaaaggtaatgcacagcgaatctttgttgagttgaagttcacactcagagattgcaactccctgccgggagtccttggtacctgtaaggaaaccttcaacctttattactacgagaccgattacgatacgggacgtaatatccgagagaatctctatgttaagattgacacaatagccgcagacgagagttttacccagggggatttaggggagcgcaagatgaaactgaacacagaagtaagggagatagggccactgtctaagaagggattttatttggcattccaggacgttggtgcatgtattgcactggtctccgtgaaggtctactataaaaagtgctggagcatcattgagaacctcgctatctttcccgatactgttaccggaagcgagtttagctctttggttgaagtacggggaacatgtgtctctagtgcggaggaggaggctgaaaacgctcctcgcatgcattgcagtgctgaaggggaatggttagtaccaattggtaaatgcatttgtaaagccggataccagcaaaaaggcgatacctgcgaacgaaaatag

SEQ ID NO: 106849 - protein, 1104 aa, Artificial Sequence
  derived and/or modified sequence
MSEPHRVQFTSLPGSLNPAFLKKSRKEEAGAGEQHQDCEPAAAAVRITLTLFEPDHKRCPEFFYPELVKNIRGKVKGLQPGDKKKDLSDPFNDEEKERHKVEALARKFEEKYGGKKRRKDRIQDLIDMGYGYDESDSFIDNSEAYDELVPASLTTKYGGFYINSGTLQFRQASESEDDFIKEKKKKSPKKRKLKEGGEKIKKKKKDDTYDKEKKSKKSKFSKAGFTALNASKEKKKKKYSGALSVKEMLKKFQKEKEAQKKREEEHKPVAVPSAEAQGLRELEGASDPLLSLFGSTSDNDLLQAATAMDSLTDLDLEHLLSESPEGSPFRDMDDGSDSLGVGLDQEFRQPSSLPEGLPAPLEKRVKELAQAARAAEGESRQKFFTQDINGILLDIEAQTRELSSQVRSGVYAYLASFLPCSKDALLKRARKLHLYEQGGRLKEPLQKLKEAIGRAMPEQMAKYQDECQAHTQAKVAKMLEEEKDKEQRDRICSDEEEDEEKGGRRIMGPRKKFQWNDEIRELLCQVVKIKLESQDLERNNKAQAWEDCVKGFLDAEVKPLWPKGWMQARTLFKESRRGHGHLTSILAKKKVMAPSKIKVKESSTKPDKKVSVPSGQIGGPIALPSDHQTGGLSIGASSRELPSQASGGLANPPPVNLEDSLDEDLIRNPASSVEAVSKELAALNSRAAGNSEFTLPAPSKAPAEKVGGVLCTEEKRNFAKPSPSAPPPASSLQSPLNFLAEQALALGQSSQEKKPESSGYKELSCQAPLNKGLPEVHQSKAKHHSLPRTSHGPQVAVPVPGPQVKVFHAGTQQQKNFTPPSPFANKLQGPKASPTQCHRSLLQLVKTAAKGQGFHPSAPATSGGLSASSSSSHKTPASSSSALSHPAKPHSVSSAGSSYKNNPFASSISKHGVSSGSSSSGGTPVQSSVSGSLVPGIQPPSVGQATSRPVPSSAGKKMPVSQKLTLVAPPGGPNGDSSGGTQGVAKLLTSPSLKPSAVSSVTSSTSLSKGASGTVLLAGSSLMASPYKSSSPKLSGAMSSNSLGIITPVPIPVHVLSFSADSSAKAGVSKDAIVTGPAPGSFHHGLGHSASQLHGKGPAVPRKL

SEQ ID NO: 106850 - DNA, 3315 bp, Artificial Sequence
  derived and/or modified sequence
atgagcgagccccacagagtgcagttcaccagcctgcccggcagcctgaaccccgccttcctgaagaagagcagaaaggaggaggccggcgccggcgagcagcaccaggactgcgagcccgccgccgccgccgtgagaatcaccctgaccctgttcgagcccgaccacaagagatgccccgagttcttctaccccgagctggtgaagaacatcagaggcaaggtgaagggcctgcagcccggcgacaagaagaaggacctgagcgaccccttcaacgacgaggagaaggagagacacaaggtggaggccctggccagaaagttcgaggagaagtacggcggcaagaagagaagaaaggacagaatccaggacctgatcgacatgggctacggctacgacgagagcgacagcttcatcgacaacagcgaggcctacgacgagctggtgcccgccagcctgaccaccaagtacggcggcttctacatcaacagcggcaccctgcagttcagacaggccagcgagagcgaggacgacttcatcaaggagaagaagaagaagagccccaagaagagaaagctgaaggagggcggcgagaagatcaagaagaagaagaaggacgacacctacgacaaggagaagaagagcaagaagagcaagttcagcaaggccggcttcaccgccctgaacgccagcaaggagaagaagaagaagaagtacagcggcgccctgagcgtgaaggagatgctgaagaagttccagaaggagaaggaggcccagaagaagagagaggaggagcacaagcccgtggccgtgcccagcgccgaggcccagggcctgagagagctggagggcgccagcgaccccctgctgagcctgttcggcagcaccagcgacaacgacctgctgcaggccgccaccgccatggacagcctgaccgacctggacctggagcacctgctgagcgagagccccgagggcagccccttcagagacatggacgacggcagcgacagcctgggcgtgggcctggaccaggagttcagacagcccagcagcctgcccgagggcctgcccgcccccctggagaagagagtgaaggagctggcccaggccgccagagccgccgagggcgagagcagacagaagttcttcacccaggacatcaacggcatcctgctggacatcgaggcccagaccagagagctgagcagccaggtgagaagcggcgtgtacgcctacctggccagcttcctgccctgcagcaaggacgccctgctgaagagagccagaaagctgcacctgtacgagcagggcggcagactgaaggagcccctgcagaagctgaaggaggccatcggcagagccatgcccgagcagatggccaagtaccaggacgagtgccaggcccacacccaggccaaggtggccaagatgctggaggaggagaaggacaaggagcagagagacagaatctgcagcgacgaggaggaggacgaggagaagggcggcagaagaatcatgggccccagaaagaagttccagtggaacgacgagatcagagagctgctgtgccaggtggtgaagatcaagctggagagccaggacctggagagaaacaacaaggcccaggcctgggaggactgcgtgaagggcttcctggacgccgaggtgaagcccctgtggcccaagggctggatgcaggccagaaccctgttcaaggagagcagaagaggccacggccacctgaccagcatcctggccaagaagaaggtgatggcccccagcaagatcaaggtgaaggagagcagcaccaagcccgacaagaaggtgagcgtgcccagcggccagatcggcggccccatcgccctgcccagcgaccaccagaccggcggcctgagcatcggcgccagcagcagagagctgcccagccaggccagcggcggcctggccaaccccccccccgtgaacctggaggacagcctggacgaggacctgatcagaaaccccgccagcagcgtggaggccgtgagcaaggagctggccgccctgaacagcagagccgccggcaacagcgagttcaccctgcccgcccccagcaaggcccccgccgagaaggtgggcggcgtgctgtgcaccgaggagaagagaaacttcgccaagcccagccccagcgcccccccccccgccagcagcctgcagagccccctgaacttcctggccgagcaggccctggccctgggccagagcagccaggagaagaagcccgagagcagcggctacaaggagctgagctgccaggcccccctgaacaagggcctgcccgaggtgcaccagagcaaggccaagcaccacagcctgcccagaaccagccacggcccccaggtggccgtgcccgtgcccggcccccaggtgaaggtgttccacgccggcacccagcagcagaagaacttcaccccccccagccccttcgccaacaagctgcagggccccaaggccagccccacccagtgccacagaagcctgctgcagctggtgaagaccgccgccaagggccagggcttccaccccagcgcccccgccaccagcggcggcctgagcgccagcagcagcagcagccacaagacccccgccagcagcagcagcgccctgagccaccccgccaagccccacagcgtgagcagcgccggcagcagctacaagaacaaccccttcgccagcagcatcagcaagcacggcgtgagcagcggcagcagcagcagcggcggcacccccgtgcagagcagcgtgagcggcagcctggtgcccggcatccagccccccagcgtgggccaggccaccagcagacccgtgcccagcagcgccggcaagaagatgcccgtgagccagaagctgaccctggtggccccccccggcggccccaacggcgacagcagcggcggcacccagggcgtggccaagctgctgaccagccccagcctgaagcccagcgccgtgagcagcgtgaccagcagcaccagcctgagcaagggcgccagcggcaccgtgctgctggccggcagcagcctgatggccagcccctacaagagcagcagccccaagctgagcggcgccatgagcagcaacagcctgggcatcatcacccccgtgcccatccccgtgcacgtgctgagcttcagcgccgacagcagcgccaaggccggcgtgagcaaggacgccatcgtgaccggccccgcccccggcagcttccaccacggcctgggccacagcgccagccagctgcacggcaagggccccgccgtgcccagaaagctgtag

SEQ ID NO: 106851 - DNA, 3315 bp, Artificial Sequence
  derived and/or modified sequence
atgtctgaaccccaccgggtgcaatttacatcccttccgggtagcctcaacccagcctttctgaagaagagtcggaaagaggaggccggggctggcgagcagcaccaggattgtgaacccgctgccgcggccgttcggatcactctcaccctgtttgagcccgaccataagaggtgcccggagtttttctatcccgagctggttaagaatattcgtgggaaggttaagggactccagcccggtgacaaaaagaaggatctttctgatcctttcaacgatgaggagaaggagcgacataaggttgaagcactggccagaaaattcgaggaaaagtatggtggtaagaagcgccggaaggacaggatccaggacctcattgatatggggtacgggtatgacgaaagcgactccttcatcgataactcagaagcttacgatgagctcgtgcccgcgtcactcaccaccaagtacggagggttctatattaattcaggcacactgcagttcaggcaagcaagcgagagcgaggatgactttataaaggagaagaaaaaaaagtcccccaaaaagcgcaagctgaaggaaggaggtgaaaaaattaagaaaaagaaaaaggacgatacttacgacaaggagaagaaatccaaaaagtccaagttctctaaggcgggctttactgccctgaatgcgtctaaggagaagaagaagaagaagtattcaggtgctctctctgtaaaagagatgttaaagaagtttcagaaagaaaaagaagcacagaagaagcgcgaggaggagcataaacctgtcgccgtgccttccgctgaggcccagggcctgcgggagctggagggcgcaagtgatcccctgctgtccctgttcgggtcaacaagcgacaacgacctactccaggctgcgactgctatggactctctcactgacctagacctcgaacacctgctgagcgagtctcctgaggggtctccattcagagatatggacgacggcagcgattccctcggagtggggctagatcaggagttcagacagccctcgtcgttgcccgaagggctcccagccccgctggaaaagagggtcaaagaacttgcgcaggctgcccgggccgcagaaggcgagtctcggcagaagttttttacccaagatattaacggcattctgcttgatattgaggcacagaccagagaattgtcttcccaggtcaggtctggtgtctacgcctacctggcgagctttctgccttgctcgaaggacgctctgctcaaacgggcacggaagctgcacttatacgagcagggcgggcgactgaaagagcccctgcaaaaattgaaggaggccatcgggcgcgctatgcccgagcagatggccaaatatcaagacgagtgccaggcccatactcaggccaaggtggcaaagatgctggaggaggaaaaggacaaagaacaaagggatcggatctgttcagatgaagaggaagacgaagaaaaaggaggccgccggataatgggaccgcggaagaagtttcagtggaacgatgaaatcagggaactgctgtgccaggtggttaagatcaagctggagtctcaggacctagagcggaacaacaaggcacaggcttgggaagactgcgtgaaggggttcttagatgccgaggtgaaacctctctggccgaaagggtggatgcaagcacgtacactgttcaaagagagccgcaggggccatggccatttaacctctattctagccaaaaaaaaggtgatggcaccctcaaaaataaaggtgaaggagtcaagcacaaagcctgataaaaaggtgtcagtacccagcgggcagatcggcggccctatcgccttaccctctgaccaccagaccggcggattatcaatcggcgccagctctagggagttaccatctcaagcttccggaggcctggccaaccctccccccgttaacttagaggacagtttggatgaggacctcattcgcaaccccgcctccagtgtggaagccgtgagtaaagagctggctgctctgaattctagggccgctggaaactctgagttcacccttccagctcctagtaaagctccagccgagaaagtcggcggtgtgctatgcacggaggagaagcgcaacttcgctaagccttccccttctgctccaccccctgccagttctctccaaagtccgcttaactttttagcagagcaagctttggcgctggggcagagctcccaggagaaaaaacctgagtcgtcaggctacaaggaacttagctgtcaggctccgttgaataaagggctgccggaagttcatcagtctaaggctaagcatcatagccttcctcgcacatcccatggaccgcaggtggccgtccccgtgccaggcccccaagtcaaggtgtttcacgccggcactcagcagcagaagaattttacaccaccgtctccctttgccaataaactgcagggccctaaggcgtccccaacccagtgtcacaggtcactgcttcagcttgtcaaaactgctgcgaaaggccaggggttccacccaagcgcaccggccacatccggcgggctctccgcctcatcttccagttcacacaagacgccagcttcctcaagtagtgcactctcacatcccgccaagcctcactcagtgtcttcagctgggtccagctacaagaataacccatttgcctcaagcatctcgaaacatggggtcagctctggatcatctagtagtggcggtacaccggtccagtcctccgtgagtggaagcctagtaccaggtatccagccgccaagcgtgggccaggctacctcccgacccgtgccttcaagtgccggtaagaaaatgcccgtatcccagaagcttacacttgtagctcccccaggtggcccaaatggggacagttccgggggcactcagggtgtggccaagttactaacttccccatcgctgaagcccagtgccgtgtcttcggtaactagttcaactagtctatctaagggcgcgagtggcaccgttctcttagcaggcagttctctgatggcatccccgtataagagcagctctccgaagctcagcggtgccatgtcgtctaactctctgggcatcatcacacctgtccccattcctgtgcatgtcttatctttcagcgccgattcaagcgcaaaggccggagtctcgaaggatgctattgttaccggtccagcccctggaagtttccaccacggcctgggacattcagctagccaattacatggaaaaggtcctgccgtgccccggaaactgtag

SEQ ID NO: 106852 - DNA, 3315 bp, Artificial Sequence
  derived and/or modified sequence
atgtctgagccccaccgggtgcagttcaccagcctgcccggcagcctgaacccagccttcctgaagaagagcaggaaggaggaggccggggccggggagcagcaccaggactgtgagcctgctgctgctgctgtgcgcatcaccctgaccctgtttgagccagaccacaagcgctgcccagagttcttctacccagagctggtgaagaacatccggggcaaggtgaagggcctgcagcccggggacaagaagaaggacctgagtgaccccttcaatgatgaggagaaggagcggcacaaggtggaggccctggccaggaagtttgaggagaagtatggaggcaagaagaggaggaaggaccgcatccaggacctgattgacatgggctacggctatgatgaaagtgacagcttcatcgacaacagcgaggcctatgatgagctggtgcctgccagcctgaccaccaagtatggaggcttctacatcaacagcggcaccctgcagttccggcaggccagcgagagtgaagatgacttcatcaaggagaagaagaagaagagccccaagaagaggaagctgaaggagggcggggagaagatcaagaagaagaagaaggatgacacctatgacaaggagaagaagagcaagaagagcaagttcagcaaggccggcttcaccgccctgaatgccagcaaggagaagaagaagaagaagtacagcggggccctgtctgtgaaggagatgctgaagaagttccagaaggagaaggaggcccagaagaagcgggaggaggagcacaagcctgtggccgtgcccagcgctgaggcccagggcctgcgggagctggagggcgccagtgaccccctgctgagcctgtttggcagcaccagtgacaatgacctgctgcaggccgccacagccatggacagcctgacagacctggacctggagcacctgctgtctgagagccctgagggcagccccttccgggacatggatgatggcagtgacagcctgggcgtgggcctggaccaggagttccggcagcccagcagcctgcctgagggcctgcctgcccccctggagaagagggtgaaggagctggcccaggccgcccgggctgctgagggggagagccggcagaagttcttcacccaggacatcaatggcatcctgctggacatcgaggcccagacccgggagctgagcagccaggtgcgcagcggcgtgtatgcctacctggccagcttcctgccctgcagcaaggatgccctgctgaagagggccaggaagctgcacctgtatgagcagggcggccgcctgaaggagcccctgcagaagctgaaggaggccatcggccgggccatgcctgagcagatggccaagtaccaggatgagtgccaggcccacacccaggccaaggtggccaagatgctggaggaggagaaggacaaggagcagagggaccgcatctgcagtgatgaggaggaggatgaggagaagggcggccgccgcatcatgggccccaggaagaagttccagtggaatgatgagatccgggagctgctgtgccaggtggtgaagatcaagctggagagccaggacctggagaggaacaacaaggcccaggcctgggaggactgtgtgaagggcttcctggatgctgaggtgaagcccctgtggcccaagggctggatgcaggcccggaccctcttcaaggagagccggcggggccacggccacctgaccagcatcctggccaagaagaaggtgatggcccccagcaagatcaaggtgaaggagagcagcaccaagccagacaagaaggtgtctgtgcccagcggccagattggaggccccatcgccctgcccagcgaccaccagacaggaggcctgagcatcggggccagcagccgggagctgcccagccaggccagcggcggcctggccaaccccccacctgtgaacctggaggacagcctggatgaagatctcatcagaaatcctgccagctctgtggaggccgtgtccaaggagctggccgccctgaacagcagagctgctggcaacagcgagttcaccctgcctgcccccagcaaggccccagctgagaaggtgggcggcgtgctgtgcacagaggagaagaggaactttgccaagcccagccccagcgcccctcctccagccagcagcctgcagagccccctgaacttcctggccgagcaggccctggccctgggccagagcagccaggagaagaagccagagagcagcggctacaaggagctgagctgccaggcccccctgaacaagggcctgcctgaggtgcaccagagcaaggccaagcaccacagcctgcccaggaccagccacggcccccaggtggccgtgcctgtgcccggcccccaggtgaaggtgttccacgccggcacccagcagcagaagaacttcaccccacccagcccctttgccaacaagctgcagggccccaaggccagccccacccagtgccacaggagcctgctgcagctggtgaagacagctgccaagggccagggcttccaccccagcgccccagccaccagcggcggcctgagcgccagcagcagcagcagccacaagaccccagccagcagcagcagcgccctgagccacccagccaagccccacagcgtgagcagcgctggcagcagctacaagaacaacccctttgccagcagcatcagcaagcatggagtgagcagcggcagcagcagcagcggcggcacccctgtgcagagctctgtgtctggcagcctggtgcccggcatccagcccccatctgtgggccaggccaccagcaggcctgtgcccagcagcgctgggaagaagatgcctgtgtcccagaagctgaccctggtggcccctcctgggggccccaacggggacagcagcggcggcacccagggcgtggccaagctgctgaccagccccagcctgaagcccagcgctgtgtcctctgtgaccagcagcaccagcctgagcaaaggagccagcggcaccgtgctgctggccggcagcagcctgatggccagcccctacaagagcagcagccccaagctgagcggggccatgagcagcaacagcctgggcatcatcacccctgtgcccatccctgtgcacgtgctgtccttctctgctgacagcagcgccaaggccggcgtgtccaaggatgccatcgtgactggacctgcccctggcagcttccaccacggcctgggccacagcgccagccagctgcacggcaagggccctgctgtgcccaggaagctgtag

SEQ ID NO: 106853 - DNA, 3315 bp, Artificial Sequence
  derived and/or modified sequence
atgagcgagccccaccgggtgcagttcaccagcctgcccggcagcctcaaccccgctttcctgaaaaaatctcggaaagaagaggctggggcgggcgaacagcaccaggactgtgaacccgccgccgcagctgtaaggataaccctcaccttgtttgagcctgatcacaagcgatgccctgagtttttttatcccgaattagtgaagaatatccgtgggaaggtgaagggtctgcaacccggggataagaagaaggacttgtccgacccctttaacgacgaagagaaagagcgccacaaggtcgaggccctggcgcgcaagttcgaagaaaaatatggcggaaagaagcggcgaaaggaccgaatccaagacctaatagacatgggctacgggtacgatgagtctgacagttttatcgataactcagaggcttacgatgagctggtacccgcatcccttaccaccaaatacggcggattctacatcaacagtgggactttgcagtttcggcaggccagcgagtccgaggatgactttatcaaggaaaagaaaaagaagagcccaaaaaagcgcaagttaaaggaggggggcgagaagatcaagaaaaagaaaaaggacgatacgtatgacaaggagaaaaaaagtaaaaagtccaagttcagcaaagcaggcttcaccgccctgaatgctagcaaggagaaaaagaaaaaaaaatactccggcgctctgagcgtgaaagagatgctcaaaaaatttcaaaaagagaaggaagcccaaaaaaaacgcgaagaggagcacaagcctgtcgccgtgccttctgctgaagcacagggacttcgagaactggagggggcctctgaccccctgttgtcactctttggatcgactagtgataacgaccttctccaggctgctacagcgatggactcgctcacggacttagacctagaacatctgctgagcgaatcccccgagggaagcccattccgcgacatggacgacggctccgattctctaggcgtcggcctcgatcaagaattccgacagccttcttccctgcctgaagggctcccagccccactggagaaacgagtgaaggagctcgctcaagctgccagggctgcagagggagaatccagacaaaagttcttcacccaagatattaacggtatcctgctcgatattgaggcgcagactagggagctctctagccaggtccgatctggagtgtacgcttatctcgcctcttttttgccatgttccaaggatgcccttttaaagagagcccggaaactccacctctacgagcagggcgggcggctcaaggagcctctgcaaaaactcaaggaagccattggcagggccatgcctgaacagatggccaaatatcaggatgagtgccaagctcatacccaggccaaggtggcgaagatgctcgaggaggagaaagacaaggagcaacgagaccgaatctgttctgacgaagaggaggatgaggagaagggagggcggagaataatggggccccggaagaaatttcagtggaacgacgagatcagagagctgctgtgtcaagtggtgaaaataaagctcgagagtcaggacctcgagcgcaataacaaggcccaggcctgggaagactgtgtgaagggctttctggacgcagaagtgaaacccctttggccaaagggctggatgcaagccaggacactgtttaaggagtcccgtcggggtcacggccatctaacaagcatcttagcgaaaaaaaaggtgatggccccaagcaaaatcaaggtgaaagagtcctcaactaagcccgataagaaagtgagcgtgccaagtggccagattggtggccctatcgcactccccagcgatcaccagactggaggcctctccattggcgcaagtagccgggaactgccctcacaggccagtgggggactggctaacccacccccagtgaacttggaggacagcctggatgaggacctgattagaaatcccgcatctagcgttgaggcggtcagcaaagaactcgccgctttaaattctagagccgcaggtaatagcgaattcacactaccagccccgagtaaggctccagctgagaaggtcggaggagtgctctgtacagaagagaaaaggaattttgccaaacctagccccagtgctcctcccccggcaagctccctccagagcccactgaatttcctggcagagcaggcattagccctggggcagtccagccaagaaaaaaagcccgagagctccggttataaggaactatcttgtcaagccccccttaacaaaggcctgcccgaggttcaccagtccaaggcaaaacatcatagtctcccaaggacatctcatggccctcaggtggccgttcctgtgcccggtcctcaggtgaaggtgtttcatgcgggtacccagcagcaaaagaatttcactccacctagccctttcgccaacaaactgcaggggccaaaagcatcacccacacagtgccaccggagtcttctccaactcgtcaagaccgctgccaaagggcaggggttccatcctagtgcacccgcaacttcagggggtttgtccgcgagctctagttccagtcacaaaaccccggcttcatcttcctccgctttaagtcatcctgctaaacctcactccgttagctccgctggcagctcctataagaataatcctttcgcttcctcaatttcgaaacatggcgtttcctctgggagctcatcgtctggtggaactccagttcaatcatctgtgagcggatcactcgtgcctggaatccagccacccagcgtgggccaggccacctctcgaccagtgccttcttcagctggtaagaaaatgcccgtgtctcagaaactgaccctggtcgccccacctggggggccaaacggcgactcatcaggaggcacacagggggtggccaagcttctgacttcaccatcacttaaaccatctgccgtgagctctgtgactagctccacctcattgagcaagggtgcaagcggcactgttctgttagccgggtccagtctgatggctagtccttataaatcatcaagtcctaagctaagcggagccatgtcaagtaacagtttgggtattatcaccccggtaccaatacccgtgcacgtactgagcttcagcgcagattcctccgccaaagccggtgtcagtaaggacgcaatagtgacaggcccggctccaggctccttccaccacgggctgggacatagtgccagccaactgcacggcaaaggtcctgctgtgcccaggaagctgtag

SEQ ID NO: 106854 - DNA, 3315 bp, Artificial Sequence
  derived and/or modified sequence
atgagcgagcctcatagggtacaattcaccagccttcctgggagcctgaatccagcattcctaaagaagagtagaaaggaggaggcaggcgctggggagcaacaccaagattgcgagcctgcagccgcagctgtccgcataacattgaccctattcgagccggaccacaaacgctgcccggaatttttctatccagaactggtgaagaatatccggggaaaagtgaagggcctccagccaggcgacaaaaagaaagacctgagcgaccctttcaatgacgaggaaaaagagcggcacaaagtggaggcattagcccgaaagtttgaagagaaatatggcggaaagaaaaggcggaaggataggattcaggatctgattgacatggggtacgggtatgatgagtctgactctttcatagacaattcggaggcatatgatgaattggttcctgcttctctgactacaaagtatggcggattctatatcaattctggcactcttcagttccgtcaggcctccgagtcggaggacgattttattaaagagaaaaaaaaaaaaagtcctaagaagcggaaactaaaggagggtggggagaagatcaaaaagaagaaaaaggacgacacatacgataaagagaaaaagtccaagaagagcaagtttagtaaggctggtttcaccgctcttaatgcttctaaggaaaagaaaaagaaaaaatattccggcgctctcagcgtcaaagagatgttgaagaagttccagaaggagaaagaggcacaaaagaaaagagaggaagagcacaagccagtcgcagtgccatcagcagaagcccagggactccgggagctggaaggagccagtgatccactgctatcgctgttcggctctacctcagacaacgatctactgcaggcggctaccgctatggactccctgaccgatctggacctggagcacctactgtcagaatcccccgagggctctccattccgcgatatggatgatgggagcgattcccttggtgtgggcctcgatcaggagtttagacagccttcatctctgccagaggggctgcctgcacctctcgagaaaagggtaaaggaactggcgcaggctgcaagggcagccgagggagagtcccgacagaagtttttcacacaagacatcaacggcattctgctagacatagaagcccagacacgggaactgagtagccaggtgaggagtggagtgtatgcctacctcgcctccttcctgccatgtagcaaagacgccttgttgaagagggccaggaaactacacctatatgagcagggaggcaggctgaaggagcccctccagaagttaaaggaagccataggccgagctatgcccgagcaaatggctaagtaccaagacgagtgccaggctcacacacaggccaaagtcgcgaagatgctggaggaggagaaggataaagaacagagggatcgaatctgcagtgacgaggaggaagatgaggaaaaggggggacggcgaatcatggggccacgcaaaaaattccagtggaacgacgagatacgtgagctcttgtgtcaggtggttaagattaagctggagagtcaagacctggaacgtaacaacaaggctcaggcttgggaggactgcgtcaagggctttttggatgcggaggtcaaacctctttggccaaagggctggatgcaggcacggacgttattcaaggagtcccgtcggggtcatggccatctgacatcaatcctcgctaagaaaaaggtcatggccccatccaaaattaaggtgaaagaatctagtactaaacctgataagaaggtgagcgtgccttcgggtcagattggcggaccgatcgcactgccatcagatcaccagaccggtggattaagcattggtgcctccagcagagaactcccaagccaagcatccggcggattggctaatcctccgcctgttaatctggaagattccctcgacgaggacctaatcaggaatcctgcaagtagcgtggaggccgtgagtaaggagctggccgctctcaatagtcgtgcagccggaaattctgaatttacgcttcctgccccaagtaaggccccagctgaaaaggtggggggagtgctgtgtacagaggagaaaagaaatttcgctaagcctagcccttcagcgccacccccagcttccagtcttcagagtccgctgaacttcctggctgaacaagctctggcgctcggacaaagctcacaggagaagaagcccgagagctccgggtataaagagctatcttgtcaggctcctttgaataagggcctgcctgaagttcatcagagcaaggcaaagcatcacagcctccctcggacgtcgcacggtccacaggtcgccgttccagttcctggccctcaggttaaagtgtttcacgccggtactcagcagcagaagaacttcactcccccatctccatttgcaaacaagctccagggcccaaaggcctctcccactcaatgtcacagatcccttctgcaactcgttaaaacagcagctaagggccaggggttccatccttccgctcccgctacctcggggggattaagcgcctcctcttcttcttcccacaaaaccccggcatcttctagcagtgccctctcacatcctgctaaaccccattccgtgtcgagcgccggaagctcatacaaaaataaccccttcgcaagtagcatctctaaacacggtgtttcgtcaggatcctctagttcaggcggaacccctgtacaatcaagcgtgtctggaagcttggtaccaggtatccagccaccctcagtgggacaggctacaagccggccagtgccaagttctgctggaaagaaaatgccagtgtcacagaagttaacacttgtggctcccccaggcggtccaaatggcgactcgagcgggggaacacaaggtgtggccaagttactaacgtcacctagcctgaagcctagtgccgtatcatcggttacatcctctaccagcctctcaaagggcgcaagcggaaccgtgcttctggctggatccagtctgatggcctccccttacaaaagttctagtccaaaactcagcggagcaatgtcaagcaacagtttgggcattatcaccccggtgcctatccctgtgcacgtgctctctttctcagcagactcatccgccaaggctggcgtcagcaaggacgctattgtgaccggcccagctccaggctctttccaccacgggctggggcattccgcttcccagctccacggaaagggccctgcggtcccacgcaagctgtag

SEQ ID NO: 106855 - DNA, 5878 bp, Artificial Sequence
  derived and/or modified sequence
gtcccgcgccgcaagttctcctggggcgaccggaggctgctcccccgaccccctggtgtccccggagtggctgcgcggacgtcgagttggcatttcttcgcttcctcctgggccggcgcgcggcgcggcacaccaggctcccctgggctcggggacccggccatgggccgaggcgcgggccgcccgcccgctgggagccacggcttagcagccgaccgctagctgcgccgccgcccggggaccggcatgaggaccgccgcggggggacgtctgcggcccgcgtcggcgctggggacaaagaagccatgcagtgacacccgctaagacttgttggtagccatgtcggagccccacagggtccagttcacctctctcccaggttccctgaatcctgcgtttttgaagaagtcccggaaggaggaggctggggcaggagaacagcatcaggactgtgagccggctgcagcagctgttcggattacactcaccctctttgaaccagatcacaaacgctgcccagagttcttctacccagagctggtgaagaatatccgagggaaggtaaaaggccttcagcctggagataagaagaaagatctgtcagatcctttcaatgacgaagaaaaggaaaggcataaagtagaggcccttgcccgaaaatttgaagaaaaatacggtggaaagaaacgtagaaaagaccgaatacaggacttgatcgatatggggtatggttatgatgaatccgactccttcatcgataactctgaggcgtatgatgagcttgttcctgcttctttgactacgaagtatggaggattttacattaactcgggaaccctgcagtttagacaagcatcagagtctgaagatgacttcattaaagaaaagaagaaaaaatctccaaagaagcggaagttgaaggaaggtggtgagaagataaagaagaagaaaaaagatgacacttatgacaaggagaagaaatcgaaaaagtccaagttttccaaagccggcttcacagccctcaatgccagtaaggagaagaagaagaagaaatattctggggctttaagcgttaaagagatgctaaagaaatttcagaaagagaaagaggctcagaaaaaaagggaggaggagcataagcctgttgcggtcccatcagcggaagctcagggcctgcgggaactggagggtgcctctgaccccttgctctcactctttggctctacttctgacaacgacttgctccaggcggccactgccatggactcgctgacggatttggacttggagcatctgctcagtgagtctccagaaggaagtcccttccgagatatggatgatggaagtgattcccttggggtgggattggaccaggaattcaggcagccctcttctctccccgaaggcctgccagcacccctggagaagcgcgttaaggagctggctcaggctgccagagctgctgagggggagagcagacagaagttcttcacccaggatattaatggaatcctattagacatagaggcgcagactcgggagctgagcagtcaggtccgctctggggtgtatgcctatcttgcgtcattcctgccctgcagcaaggatgccctgctcaagcgtgctcggaaacttcacctctatgaacaggggggccgtctgaaggagcctctccagaagctcaaggaagccattggcagggcgatgccagagcagatggccaagtaccaggacgaatgccaggcacacacgcaggcaaaggttgccaagatgctggaagaggagaaagacaaggagcagagggaccggatttgttcggatgaggaagaagatgaagaaaaagggggcaggaggataatgggacctcggaagaagttccaatggaatgatgagatcagggagctactgtgccaggtggtgaagatcaaactggagagccaggacctggagaggaacaacaaagcccaggcttgggaggactgtgtgaagggctttctggatgcggaagtcaagcccctctggcccaaaggctggatgcaggccagaactctgtttaaggagagcagacgaggccatgggcacctgacttcaatcctggccaagaagaaagttatggccccttctaaaatcaaggtgaaggaatcgtctacgaagcctgataaaaaggtttctgtcccatcaggacagattggtggccccattgctttgccctcagatcaccaaacaggaggcctgagtattggggcctcgagcagggagctcccatcccaggcatcgggcggccttgctaaccctcctcctgtcaacctggaggactcattggatgaagacttgatccgcaatccagcctcctcggtggaagccgtgtccaaggaattggctgcattgaatagcagagcagctgggaactctgaattcacactgcctgcaccctcaaaagcacctgcagaaaaagttggaggcgttttatgtacagaagaaaaaaggaactttgcgaagcctagtccttctgctccaccaccagctagctctctgcagtcacccctcaattttctggcagaacaggctctggcactggggcagtcctctcaggagaaaaaaccagagagttctggctacaaagagctgtcctgccaggctcccctcaataagggcctgccagaagtacatcagtccaaagctaagcaccacagcttgccacggacgtctcacgggccccaagtggcagttcctgtgcctggcccccaggtcaaagtctttcatgccggcactcagcagcagaaaaacttcacgcccccatctccatttgccaataagctccaaggcccaaaggcttctcccacacagtgtcatcgttccctcctgcagttagtgaagacagcggccaaaggccagggcttccatccctctgcaccagccacctcaggaggcctgtcagcctccagcagcagctctcacaagaccccagcctcgtcctcttctgccctgagccatccagcaaagccacattcagtcagctctgcaggctcatcttacaagaataatccctttgccagctcaatctccaaacatggggtttcttctggcagctcttcctcgggaggaacaccagtccagagttctgtttctgggagcctggtccctggcatacagcctccctccgtgggacaggccaccagccgacccgtcccaagttcagcagggaaaaaaatgcctgtttcccagaagttgactctggtagcccctccaggcggtccaaacggagattccagtggtgggacccagggagtggcaaagttgctgacctcgccgtccctaaagccctctgcagttagtagtgtgacatcgtctacctccttgtcaaaaggagcgagtgggactgtgctgctggccggctcctctttgatggcttcaccctacaaatccagcagcccaaagctgtctggggccatgagctcgaactccttgggaattataacccctgtccctattcctgtccatgtgctctccttcagcgctgactcctctgccaaagcaggggtctccaaggatgccatcgtcacaggccctgcccccgggtccttccaccatggccttggccacagtgcttctcagcttcacgggaaagggcctgctgtaccacggaaattgtgaccgcttcagaggcaaggcttgccacttgggtctgggtggaatcagaacgtgcaggtctcccaggatgtacactcactgcgccctttctgctgcttggtgttcttctggaggagcgtgagttctcagcggagcgcttctcggcacttctgatgtgcctcccatggagggagccgggcccttgctgctcaggaggtgcagactgccccgtgctctgggccttgcagctctgtcgctagacggttgttagaggggcagctctaggctggggcttgcgctgggccgtggtgggaggcacagtgtttacaggctctggtggcagagcagttggcacacctgtgggtgaatctgcctgatcccctggcatttggtcagagtacctcagagcaccccactgctcaggggctccttctggctgcagtaagctccctggatggtcacagtgccgccccatccccaggctgtgtgctcaaagcggacaaaactcaggccagagccacagctgggagacctgcactgtccctgcgaaatactaagaacacctagggtgtgctcactgtgggggccagtttctcctcggaacatgacaatgaagctcttttagagaaaagacctttgtagattcaacaattatgataggatttttacagacacctattttgggctcagttttcatcattaccattaaatgcattggatagaaggggactgttcttcacacatcatattataggaagacataattccagtgcctttatggtggagcagaattcgacaacacatgtccattcagccctctgaatggatctgagacgaagacctttttaaagatatgtctgtattgaagagaaagccagttttgagttttttacacttgcacatcattatctgtgccgtcctgactagaaggttgtctgggcccccaaattccaagtcccagtatagccagggctcccattttgtttttccagagttcgtggaggtggactgcagagcccagagcccttcatctctctgagggtcaaggataccaggggtcccaagtcacagatagacattccagtttgtattcttaggaatcattcttaggcagtgcggcagaagcaggcctctgtgaagtgtctgccgggtagaaataggccttgaagtcctggggctctccaggcagtggggttatgtgtcgactgaagggtgatgtgcagaagagcttggagagtggatcagagagactaggacagttactgcagagctcctaagtcaccactcaaccagtggctgtttcacaaggatttgagggcacttgcctgtcttgtgaggtctgtgccacaaggtgagtctgaactgactgctccagctaagtgatcaggcacgttgagagtatacggtgtcctcagcacatacacctgtgggaaaacggaccgctcttggctcctgactcccagggtacagcgcccagtaactcatccttcattcagaggtttgctggccttcccggtttcccaaggagcaagacctctgtccgccctttggcccggcctctgctctgtctcctttttttacataagaaccaatccgtgtttcacattgggctaagtggattccttatccctttgttatatatattttttgcaacttggatttccagtttgtttacagagtagtcttaggtagtagcaaaagagccaaagaagagatttgtattgctgagctcaaagccaagcagaggccggcagtggaggctgagcagggactctccaggcttctctgcccataaacacccgggtcccaggccctccttcctttccctttggtgctccctcctccccacgtaccattgcgcgtgcagctggagcagaataccctcatttttaggaatctagtgatgcctcttgcctcagggaaacgtttctttgatggggagtttgagatttcttttccttgtttatgctttatttgtggtaatgaaagagcgaatgactgaacagccatggcaaggcagacctacaggcgaggccgcagcagagggtggggcagagcagcctcggggtctgggggctgcaggggtttccctggcgcagcgaaagtctctgagcacttaccgggcgtgaccgtttcttaggtgtgagaggggctgtggcttttgtgcagcgactatgttggtgttaggggtggtgtggagattgttaatcttgtataaagcaattcaataaattgtttcaaggtttcc

SEQ ID NO: 106856 - protein, 570 aa, Artificial Sequence
  derived and/or modified sequence
MQKMNNEVVDKSDRLLIKGGRIINDDQSLYADVYLEDGLIKQIGENLIVPGGVKTIEANGRMVIPGGIDVNTYLQKPSQGMTAADDFFQGTRAALVGGTTMIIDHVVPEPGSSLLTSFEKWHEAADTKSCCDYSLHVDITSWYDGVREELEVLVQDKGVNSFQVYMAYKDVYQMSDSQLYEAFTFLKGLGAVILVHAENGDLIAQEQKRILEMGITGPEGHALSRPEELEAEAVFRAITIAGRINCPVYITKVMSKSAADIIALARKKGPLVFGEPIAASLGTDGTHYWSKNWAKAAAFVTSPPLSPDPTTPDYLTSLLACGDLQVTGSGHCPYSTAQKAVGKDNFTLIPEGVNGIEERMTVVWDKAVATGKMDENQFVAVTSTNAAKIFNLYPRKGRIAVGSDADVVIWDPDKLKTITAKSHKSAVEYNIFEGMECHGSPLVVISQGKIVFEDGNINVNKGMGRFIPRKAFPEHLYQRVKIRNKVFGLQGVSRGMYDGPVYEVPATPKYATPAPSAKSSPSKHQPPPIRNLHQSNFSLSGAQIDDNNPRRTGHRIVAPPGGRSNITSLG

SEQ ID NO: 106857 - DNA, 1713 bp, Artificial Sequence
  derived and/or modified sequence
atgcagaagatgaataatgaagttgtagacaaatcggatagacttctgatcaaagggggacgaattatcaatgacgatcagagcttgtatgcagatgtttaccttgaggatggtctcatcaagcagattggagaaaacctcattgtccccgggggcgttaagaccatcgaagctaacggcagaatggtgattcccggggggattgatgtgaatacatacctgcaaaaaccttcacaaggaatgacggccgctgatgacttctttcaggggactcgggcagccctggtcggaggcacaaccatgatcatagaccatgttgtgcctgagcccggcagtagcctgctaaccagctttgaaaaatggcacgaggccgcagatactaagtcatgttgtgattacagcctacatgtggatattacttcttggtatgatggcgttcgtgaagaattagaggtcctggtgcaggacaaaggagtgaacagttttcaggtatacatggcatacaaggatgtttaccagatgtcggactcccagctctatgaagctttcacattcctgaagggtcttggggccgtgattctcgtccacgccgaaaatggagacttaatcgcccaggagcaaaagagaatcctcgaaatgggaatcacaggccctgaggggcacgcactctcccgccctgaagagttggaggctgaagcagtttttcgagctattacgattgccggccggattaattgtcctgtttatatcaccaaagtgatgagcaagtccgccgccgacatcatcgccttggctagaaaaaagggaccgctggtgttcggggagccaattgccgcaagcctgggtactgacggtacacactactggagtaaaaactgggccaaggcagctgctttcgtgactagcccccccctctctcctgatcctactactcccgactacctgaccagcttgctggcgtgcggcgacttacaagtaacaggttctgggcattgcccctattccacggcccaaaaagccgtgggtaaggacaacttcactcttattccagaaggggttaacgggattgaggagcggatgacagtggtatgggataaagcagtggctacggggaagatggacgagaatcaatttgtggccgttacaagcactaatgcagcgaagatattcaatctgtaccctagaaaagggcggatcgccgtcgggagtgatgccgatgtagtgatatgggatccagataagctaaagacaattaccgctaagtcacacaagagtgccgtcgagtacaacatcttcgagggtatggaatgccacggctctccccttgtagtgataagtcagggtaagatcgtgtttgaagacggaaacatcaatgtgaacaaaggaatggggcgatttattcctcggaaagcattccccgagcacctgtaccagcgggttaagatccgaaacaaagtgtttggcttgcaaggggtctccaggggcatgtacgacggaccagtctatgaggtccccgccaccccaaagtacgcaaccccagccccctccgccaaatcatccccatccaagcaccaacctcctcctattagaaatctgcaccaatccaacttctctctatccggggctcaaattgatgataacaacccacggagaactgggcaccgcatcgtagctcccccagggggtcgttcaaatatcaccagtctgggctag

SEQ ID NO: 106858 - DNA, 1713 bp, Artificial Sequence
  derived and/or modified sequence
atgcagaagatgaacaatgaggtggtggacaagagtgaccggctgctgatcaagggcggccgcatcatcaatgatgaccagagcctgtatgcagatgtgtacctggaggatggcctcatcaagcagattggagaaaatctcatcgtgcctgggggcgtgaagaccatcgaggccaatggaaggatggtgattcctgggggcattgatgtgaacacctacctgcagaagcccagccagggcatgacagctgctgatgacttcttccagggcaccagggctgccctggtgggcggcaccaccatgatcatcgaccacgtggtgcctgagcccggcagcagcctgctgaccagctttgagaagtggcatgaggccgctgacaccaagagctgctgtgactacagcctgcacgtggacatcacctcctggtatgatggagtgcgggaggagctggaggtgctggtgcaggacaagggcgtgaacagcttccaggtgtacatggcctacaaggatgtgtaccagatgtctgacagccagctgtatgaggccttcaccttcctgaagggcctgggcgctgtgatcctggtgcatgctgaaaatggagacctgattgcccaggagcagaagaggatcctggagatgggcatcaccggccctgagggccacgccctgagcaggcctgaggagctggaggccgaggccgtgttccgggccatcaccatcgccggccgcatcaactgccctgtgtacatcaccaaggtgatgagcaagtctgctgctgacatcatcgccctggccaggaagaagggccccctggtgtttggagagcccatcgccgccagcctgggcacagatggcacccactactggagcaagaactgggccaaggctgctgcctttgtgaccagcccccccctgagcccagaccccaccaccccagactacctgaccagcctgctggcctgtggggacctgcaggtgactggaagtggccactgcccctacagcacagcccagaaggctgtgggcaaggacaacttcaccctcatccctgagggcgtgaatggcatcgaggagaggatgacagtggtgtgggacaaggctgtggccaccgggaagatggatgagaaccagtttgtggccgtgaccagcaccaatgctgccaagatcttcaacctgtaccccaggaagggcagaattgctgtgggcagtgatgctgatgtggtgatctgggaccctgacaagctgaagaccatcacagccaagagccacaagtctgctgtggagtacaacatctttgagggcatggagtgccacggcagccccctggtggtgatcagccagggcaagatcgtgtttgaagatggcaacatcaacgtgaacaagggcatgggccgcttcatccccaggaaggccttccctgagcacctgtaccagagggtgaagatccggaacaaggtgtttggcctgcagggcgtgtcccggggcatgtatgatggccctgtgtatgaggtgcctgccacccccaagtatgccaccccagcccccagcgccaagagcagccccagcaagcaccagcccccacccatccggaacctgcaccagagcaacttcagcctgagcggggcccagattgatgacaacaaccccaggagaacaggccaccgcatcgtggcccctcctgggggccgcagcaacatcaccagcctgggctag

SEQ ID NO: 106859 - DNA, 1713 bp, Artificial Sequence
  derived and/or modified sequence
atgcagaagatgaacaacgaggtggtggacaagagcgaccggctgttgatcaaaggaggcaggatcattaatgatgatcaatccttgtacgccgacgtgtacctcgaagacggactgatcaaacaaattggcgaaaacctgatcgtgcctggcggtgtgaagactatcgaggccaacgggcgcatggtgattcctggcggaatcgacgtcaatacgtacctgcaaaaaccttcacagggaatgacggctgctgatgacttctttcagggcactcgcgccgccctggtaggtggtaccactatgatcatagaccacgtagtgcctgagcctggatcgtcccttctcacttcgtttgagaagtggcacgaagccgcagacaccaaatcctgctgtgattactcccttcacgtggatataacaagttggtatgatggagttagagaagaactggaagtgctcgtccaggataagggcgtcaattctttccaggtctacatggcctataaggatgtgtaccagatgagcgacagtcaactgtacgaggcctttactttcctcaaaggactgggggccgtgatcctggtgcacgccgagaatggtgatttgatagcccaggagcagaagcggatattagaaatgggtatcactggaccagaaggacacgcactgagtcgccctgaggagctcgaggcagaagcagtgtttcgcgccattactatcgctggacgcattaactgccccgtatacattaccaaagtcatgtctaaaagcgctgccgacatcatagcacttgctcgtaagaagggccctctggtttttggagaacccattgcagcgtccctgggcaccgacggtactcattattggagcaagaactgggccaaagccgccgcttttgttacttcaccccccttatcgccagatcccactacaccagactacctgacaagcctgctggcgtgtggtgacctacaggtaactggttccggccactgcccatactctaccgcacagaaagccgtgggaaaggacaatttcacgctcatacccgaaggggtcaacggcattgaagagagaatgactgtggtgtgggataaggccgtggccacgggaaagatggatgagaaccagttcgtcgccgtcaccagcactaatgctgccaagatattcaacctgtatcctcgaaaggggcggatcgccgtcggatcagacgcagatgtggtgatttgggaccccgacaaactgaagacgattacggccaagtctcataaatctgcagtggagtacaacatctttgaaggcatggagtgccatggcagccctttagtcgtgattagccagggaaagatcgtctttgaagatggtaacattaatgtgaacaagggcatgggaaggttcataccccgcaaggcattccccgaacatctgtaccagagggtgaaaatccgtaacaaggtttttggccttcagggcgttagtcgaggtatgtatgatggcccagtctacgaggtccccgctaccccaaaatacgccactccagcaccgagcgccaaatcatcaccttcaaagcaccagcccccacctatccggaatctgcaccagtccaacttcagcttgtcaggagcacagatcgacgataacaatccccgaagaactggacacaggatcgtggcaccacctggcggcagaagcaacattacttcccttggctag

SEQ ID NO: 106860 - DNA, 1713 bp, Artificial Sequence
  derived and/or modified sequence
atgcagaagatgaacaatgaagtggtagacaagtccgatcggctgttgataaaaggaggccgaattattaacgacgatcaatcactgtacgctgatgtttacttggaggatggtctgatcaagcagattggggagaatttgatcgttccaggaggtgttaagaccatcgaggccaacggccgaatggttatcccaggaggcatagacgttaacacttacctgcagaaacccagtcaaggcatgacggcagcagacgacttcttccagggcacccgtgccgcactcgtgggtgggactacaatgatcatcgatcacgtcgtgcccgagccaggcagctcattgcttacctcattcgaaaagtggcacgaagcagccgataccaagtcatgctgtgattattccctgcacgttgacatcacctcttggtacgacggcgttcgcgaagagctggaagtactcgtgcaggataaaggcgtgaactccttccaggtatacatggcctacaaagacgtatatcaaatgtcagacagtcagctgtacgaggcgtttacgttcttgaaaggccttggtgccgttattctcgttcatgccgagaacggtgacttgatagcacaggagcagaagcgcattctcgaaatggggatcaccggcccagaaggtcatgccttaagtaggccagaggaactcgaggctgaggccgtcttccgcgctatcactatcgcaggcagaatcaattgccctgtgtacatcactaaagtgatgagcaaaagcgcagctgatatcattgctttggctagaaagaaggggcctcttgttttcggagaaccaattgcggctagtctgggtaccgacggaacccattattggtccaaaaactgggccaaggctgctgccttcgtgactagcccccctttatcacccgatcccacaaccccagattatcttacctccctcctggcctgtggcgatctccaagtgacaggcagcggccattgtccatacagcaccgctcagaaagctgttggaaaggacaattttacattgatacccgagggcgtgaatggtatagaggaaagaatgaccgtcgtttgggacaaggctgtagcaacggggaagatggacgagaaccagttcgttgccgtaacaagcaccaacgcagcaaagattttcaacttgtacccaaggaaaggcagaatcgccgttggcagcgacgcagatgtcgtgatctgggacccagacaagttgaagaccatcacagcaaagtcacataaatctgctgtcgagtacaacatcttcgagggaatggaatgtcacggttccccactggtggtgatatcacaaggcaaaatagtctttgaggacggcaacattaacgtcaacaagggtatggggcgattcatcccacggaaagcctttcctgagcacttgtaccagagagtcaaaataagaaataaagtgtttggtctgcagggcgtgtcacgcggtatgtatgacggacctgtgtacgaggtgcccgcaacacctaagtatgccacccctgcacccagcgccaaatccagccctagtaaacaccagcccccacccatcaggaatctgcaccagtcgaatttcagcctgtctggagcccaaatcgacgataacaaccccaggcggacaggacatagaatcgtcgcacctccaggcggaaggtcaaacataacatcactgggctag

SEQ ID NO: 106861 - DNA, 2764 bp, Artificial Sequence
  derived and/or modified sequence
ctggtacggggaacctaggacttaacaactccaaggaagggagtgtaggagttggggagggacagtgtccccatctgcaatttccggtcattgacagggattttaggccccgctgagagccagggatgcatgaatgcgtggagggaaatgagttgtaaacagagtgtaggggaacctggcatctccatgctgctttgctgcagctaatatgttttgcacccggggtacatcattttacctctgtaagcctcaatttcctgtctgtaaaatgggaaaattatgcctagtgttcctgggatactgagctggcttctctgtgaagctaaaacctcacctctattttaaggcccaggtgtctctggcctcctgccctggattaggggactggcccctggggtggtgaaggtcagggccccagcccccaaccacagtgctgggggagctgtaccaagcctaggccaccctcgctctggatggcaacttgaaagcagaaaagatgagtagtttcataggacctgtggggttggatttcgcatgcagaaaatgaacaacgaagtggtggacaagagtgaccgactcctcatcaaaggtggacggatcatcaacgatgaccaatccctttatgctgacgtctacctggaggatggacttatcaaacaaataggagagaacttaatcgttcctggtggagtgaagaccattgaagccaacgggcggatggttattcccggaggtattgatgtcaacacgtacctgcagaagccctcccaggggatgactgcggctgatgacttcttccaagggaccagggcggcactggtgggcgggaccacgatgatcattgaccatgttgttcctgaacctgggtccagcctactgacctctttcgagaagtggcacgaagcagctgacaccaaatcctgctgtgattactccctccacgtggacatcacaagctggtacgatggcgttcgggaggagctggaggtgctggtgcaggacaaaggcgtcaattccttccaagtctacatggcctataaggatgtctaccaaatgtccgacagccagctctatgaagcctttaccttccttaagggcctgggagctgtgatcttggtccatgcagaaaatggagatttgatagctcaggaacaaaagcggatcctggagatgggcatcacgggtcccgagggccatgccctgagcagacctgaagagctggaggccgaggcggtgttccgggccatcaccattgcgggccggatcaactgccctgtgtacatcaccaaggtcatgagcaagagtgcagccgacatcatcgctctggccaggaagaaagggcccctagtttttggagagcccattgccgccagcctggggaccgatggcacccattactggagcaagaactgggccaaggctgcggcgttcgtgacttcccctcccctgagcccggaccctaccacgcccgactacttgacctccctactggcctgtggggacttgcaggtcacaggcagcggccactgtccctacagcactgcccagaaggcggtgggcaaggacaactttaccctgatccccgagggtgtcaacgggatagaggagcggatgacggtcgtctgggacaaggcggtggctactggcaaaatggatgagaaccagtttgtcgctgtcaccagcaccaatgcagccaagatctttaacctgtacccaaggaaagggcggattgccgtgggctcggatgccgacgtggtcatctgggaccccgacaagttgaagaccataacagccaaaagtcacaagtcggcggtggagtacaacatcttcgagggtatggagtgccacggctccccactagtggtcatcagccagggcaagatcgtctttgaagacggaaacatcaacgtcaacaagggcatgggccgcttcattccgcggaaggcgttcccggagcacctgtaccagcgcgtcaaaatcaggaataaggtttttggattgcaaggggtttccaggggcatgtatgacggtcctgtgtacgaggtaccagctacacccaaatatgcaactcccgctccttcagccaaatcttcgccttctaaacaccagcccccacccatcagaaacctccaccagtccaacttcagcttatcaggtgcccagatagatgacaacaatcccaggcgcaccggccaccgcatcgtggcgccccctggtggccgctccaacatcaccagcctcggttgaacgtggatgcgcggaggagctagcctgaaggattctgggaatcatgtccatcccttttcctgtcagtgtttttgaaacccacagttttagttggtgctgatggagggagggggaagtcgaaggatgctctttcccttttctgtttaggaagaagtggtactagtgtggtgtgtttgcttggaaattccttgccccacagttgtgttcatgctgaatccacctcggagcatggtgttttcattcccccttcctagtgaaccacaggttttagcattgtcttgttctgtcccttccacttctaactccactggctccatgattctctgagtggtggttcctttgcaccctgtagatgttctaggatagttgatgcatgttactaaattacgtatgcaagtctgtgagtgcgtctgaggggacatcgccaaggactgactgagacacgatgccgagacctcaagccctgaggggcagtcccaaaacccttacagtgaagatgtttactcattgcccccac

SEQ ID NO: 106862 - DNA, 1713 bp, Artificial Sequence
  derived and/or modified sequence
atgcagaagatgaacaacgaggtggtggacaagagcgacagactgctgatcaagggcggcagaatcatcaacgacgaccagagcctgtacgccgacgtgtacctggaggacggcctgatcaagcagatcggcgagaacctgatcgtgcccggcggcgtgaagaccatcgaggccaacggcagaatggtgatccccggcggcatcgacgtgaacacctacctgcagaagcccagccagggcatgaccgccgccgacgacttcttccagggcaccagagccgccctggtgggcggcaccaccatgatcatcgaccacgtggtgcccgagcccggcagcagcctgctgaccagcttcgagaagtggcacgaggccgccgacaccaagagctgctgcgactacagcctgcacgtggacatcaccagctggtacgacggcgtgagagaggagctggaggtgctggtgcaggacaagggcgtgaacagcttccaggtgtacatggcctacaaggacgtgtaccagatgagcgacagccagctgtacgaggccttcaccttcctgaagggcctgggcgccgtgatcctggtgcacgccgagaacggcgacctgatcgcccaggagcagaagagaatcctggagatgggcatcaccggccccgagggccacgccctgagcagacccgaggagctggaggccgaggccgtgttcagagccatcaccatcgccggcagaatcaactgccccgtgtacatcaccaaggtgatgagcaagagcgccgccgacatcatcgccctggccagaaagaagggccccctggtgttcggcgagcccatcgccgccagcctgggcaccgacggcacccactactggagcaagaactgggccaaggccgccgccttcgtgaccagcccccccctgagccccgaccccaccacccccgactacctgaccagcctgctggcctgcggcgacctgcaggtgaccggcagcggccactgcccctacagcaccgcccagaaggccgtgggcaaggacaacttcaccctgatccccgagggcgtgaacggcatcgaggagagaatgaccgtggtgtgggacaaggccgtggccaccggcaagatggacgagaaccagttcgtggccgtgaccagcaccaacgccgccaagatcttcaacctgtaccccagaaagggcagaatcgccgtgggcagcgacgccgacgtggtgatctgggaccccgacaagctgaagaccatcaccgccaagagccacaagagcgccgtggagtacaacatcttcgagggcatggagtgccacggcagccccctggtggtgatcagccagggcaagatcgtgttcgaggacggcaacatcaacgtgaacaagggcatgggcagattcatccccagaaaggccttccccgagcacctgtaccagagagtgaagatcagaaacaaggtgttcggcctgcagggcgtgagcagaggcatgtacgacggccccgtgtacgaggtgcccgccacccccaagtacgccacccccgcccccagcgccaagagcagccccagcaagcaccagcccccccccatcagaaacctgcaccagagcaacttcagcctgagcggcgcccagatcgacgacaacaaccccagaagaaccggccacagaatcgtggccccccccggcggcagaagcaacatcaccagcctgggctag

SEQ ID NO: 106863 - protein, 753 aa, Artificial Sequence
  derived and/or modified sequence
MPMDLILVVWFCVCTARTVVGFGMDPDLQMDIVTELDLVNTTLGVAQVSGMHNASKAFLFQDIEREIHAAPHVSEKLIQLFRNKSEFTILATVQQKPSTSGVILSIRELEHRIYERVIDPPDTNLPPGINLWLGQRNQKHGLFKGIIQDGKIIFMPNGYITQCPNLNHTCPTCSDFLSLVQGIMDLQELLAKMTAKLNYAETRLSQLENCHCEKTCQVSGLLYRDQDSWVDGDHCRNCTCKSGAVECRRMSCPPLNCSPDSLPVHIAGQCCKVCRPKCIYGGKVLAEGQRILTKSCRECRGGVLVKITEMCPPLNCSEKDHILPENQCCRVCRGHNFCAEGPKCGENSECKNWNTKATCECKSGYISVQGDSAYCEDIDECAAKMHYCHANTVCVNLPGLYRCDCVPGYIRVDDFSCTEHDECGSGQHNCDENAICTNTVQGHSCTCKPGYVGNGTICRAFCEEGCRYGGTCVAPNKCVCPSGFTGSHCEKDIDECSEGIIECHNHSRCVNLPGWYHCECRSGFHDDGTYSLSGESCIDIDECALRTHTCWNDSACINLAGGFDCLCPSGPSCSGDCPHEGGLKHNGQVWTLKEDRCSVCSCKDGKIFCRRTACDCQNPSADLFCCPECDTRVTSQCLDQNGHKLYRSGDNWTHSCQQCRCLEGEVDCWPLTCPNLSCEYTAILEGECCPRCVSDPCLADNITYDIRKTCLDSYGVSRLSGSVWTMAGSPCTTCKCKNGRVCCSVDFECLQNN

SEQ ID NO: 106864 - DNA, 2262 bp, Artificial Sequence
  derived and/or modified sequence
atgcctatggacctgatactcgtcgtttggttctgtgtctgtaccgcaaggacagtcgttggtttcgggatggaccccgatctccaaatggatatcgtgacagaactggacctggtcaacacgacactgggggtggcccaagtgtccggaatgcacaacgcctctaaagcctttctgtttcaggatatagagagagagatacacgctgcgccgcacgtttccgagaaactgattcagttgtttagaaacaaatcggaattcacaatccttgccacagtccagcagaagccgagtactagcggcgtgatactgagcatcagggagttggaacaccgcatctatgagagggtgattgatcctccagacacgaatctaccaccaggaatcaatctgtggctgggccagaggaaccagaaacacgggctgtttaaagggatcatccaggatggaaagatcatattcatgccaaacgggtacatcacacaatgccctaacctaaatcatacatgtccaacctgttcggactttttaagcttggtgcaggggatcatggacctgcaggagctcctggctaagatgactgccaaattaaattacgctgaaacccgcctatcacagcttgagaattgtcattgcgaaaagacttgccaggtatctgggctgctgtatcgcgatcaggacagctgggtggatggagaccactgccggaactgcacatgcaaatctggcgccgtcgagtgccggcgtatgtcctgtccccccctcaattgctcgcctgatagcctaccggtccacatcgccggacagtgctgtaaagtctgtcgtcccaagtgcatttacggtggcaaagttcttgcagagggacagagaattcttaccaagtcatgtcgcgagtgccggggaggagttctggtgaagatcaccgagatgtgcccacctctaaattgttccgagaaagaccacatcttgcccgagaatcaatgctgccgcgtttgccggggccacaatttttgtgccgagggacctaaatgcggagagaattcagagtgtaagaactggaataccaaggccacctgcgagtgtaagtctgggtacatctccgtgcagggagattcagcctactgcgaagacatcgatgagtgtgcagcgaaaatgcactactgtcatgctaataccgtatgcgttaatttacctggcctctatcgatgcgactgcgttcctggttacatccgagttgacgacttctcttgtaccgagcatgatgaatgcggatccggtcagcacaattgtgatgagaacgcgatttgtacaaacactgtccaaggtcatagttgtacttgcaaaccagggtacgtcggaaatggaaccatctgccgggccttctgcgaggaggggtgccggtatggaggtacctgcgtagcacccaacaagtgcgtgtgtccctccggattcaccggatcacactgcgagaaggatattgatgagtgttctgagggtataattgaatgtcataaccacagtcgttgcgtgaatcttcctggatggtaccattgcgagtgtcgctccggattccatgacgacggtacatattccctgtctggagaaagctgcattgatatagacgagtgtgcattgaggacccacacttgctggaatgacagtgcatgtattaaccttgcggggggtttcgattgcctttgccccagcgggccaagttgttccggcgactgcccccatgagggcgggctgaaacacaacggccaggtgtggacactgaaagaagatcgatgttctgtgtgctcctgtaaggacgggaaaattttttgtagacggaccgcatgcgactgccagaacccctctgccgaccttttttgttgccccgagtgcgatacacgcgtgaccagtcaatgcctggatcagaatgggcacaaactttatcgtagtggagacaactggactcacagttgccagcagtgcaggtgtctggaaggcgaggtggattgttggccactgacatgcccaaacctttcatgcgaatacaccgctatcttggaaggtgaatgttgtccccgctgcgtgagcgatccatgtcttgccgacaacatcacttatgacatcaggaaaacctgcctcgactcgtatggggtatcccggttgtccggaagtgtctggaccatggccggcagcccatgtacgacctgcaaatgcaagaacgggagagtatgttgtagcgtagactttgaatgcctccagaataattag

SEQ ID NO: 106865 - DNA, 2262 bp, Artificial Sequence
  derived and/or modified sequence
atgcccatggacctgatcctggtggtgtggttctgtgtgtgcacagccaggacagtggtgggcttcggcatggaccctgacctgcagatggacatcgtgacagagctggacctggtgaacaccaccctgggcgtggcccaggtgtctggcatgcacaatgccagcaaggccttcctgttccaggacatcgagcgggagatccatgctgccccccacgtgtctgagaagctgatccagctgttcaggaacaagtctgagttcaccatcctggccaccgtgcagcagaagcccagcaccagcggggtcatcctgagcatccgggagctggagcaccgcatctatgaaagagtcatcgaccccccagacaccaacctgcccccaggcatcaacctgtggctgggccagaggaaccagaagcacggcctcttcaagggcatcatccaggacggcaagatcatcttcatgcccaacggctacatcacccagtgccccaacctgaaccacacctgccccacctgcagcgacttcctgagcctggtgcagggcatcatggacctgcaggagctgctggccaagatgacagccaagctgaactatgcagagacccggctgagccagctggagaactgccactgtgagaagacctgccaggtgtctggcctgctgtacagagaccaggacagctgggtggatggagaccactgcaggaactgcacctgcaagagcggggctgtggagtgcaggaggatgagctgcccccccctgaactgcagcccagacagcctgcctgtgcacatcgccggccagtgctgcaaggtgtgccggcccaagtgcatctacggcggcaaggtgctggccgagggccagaggatcctgaccaagagctgccgggagtgccggggcggcgtgctggtgaagatcacagagatgtgcccccccctgaactgcagcgagaaggaccacatcctgcctgagaaccagtgctgccgggtgtgccggggccacaacttctgtgccgagggccccaagtgtggggagaacagcgagtgcaagaactggaacaccaaggccacctgtgagtgcaagagcggctacatctctgtgcagggcgacagcgcctactgtgaggacattgatgaatgtgccgccaagatgcactactgccacgccaacacagtgtgtgtgaacctgcccggcctgtaccgctgtgactgtgtgcccggctacatccgggtggatgacttcagctgcacagaacatgatgaatgtggcagcggccagcacaactgtgatgaaaatgccatctgcaccaacacagtgcagggccacagctgcacctgcaagccaggctacgtgggcaatggcaccatctgccgggccttctgtgaggagggctgccgctatggaggcacctgtgtggcccccaacaagtgtgtgtgccccagcggcttcaccggcagccactgtgagaaggacattgatgaatgttctgagggcatcatcgagtgccacaaccacagccgctgtgtgaacctgcccggctggtaccactgtgaatgtcgcagcggcttccatgatgatggcacctacagcctgtctggagagagctgcatcgacattgatgaatgtgccctgcggacccacacctgctggaatgacagcgcctgcatcaacctggccggcggctttgactgcctgtgccccagcggccccagctgcagcggggactgcccccatgaaggaggcctgaagcacaacggccaggtgtggaccctgaaggaggaccgctgcagcgtgtgcagctgcaaggatggcaagatcttctgcagaagaacagcctgtgactgccagaaccccagcgctgacctcttctgctgcccagaatgtgacaccagggtgaccagccagtgcctggaccagaatggccacaagctgtaccgcagcggggacaactggacccacagctgccagcagtgccgctgcctggagggggaggtggactgctggcccctgacctgccccaacctgagctgtgagtacacagccatcctggagggggagtgctgcccccgctgtgtgtctgacccctgcctggccgacaacatcacctatgacatcaggaagacctgcctggacagctatggagtgtcccggctgagcggctctgtgtggaccatggccggcagcccctgcaccacctgcaagtgcaagaatggccgggtgtgctgcagcgtggactttgagtgcctgcagaacaactag

SEQ ID NO: 106866 - DNA, 2262 bp, Artificial Sequence
  derived and/or modified sequence
atgcccatggacctgatcctggtggtgtggttctgcgtgtgcaccgcgcgcacagtggttggcttcggcatggacccggatctgcaaatggatatcgtgactgagttggacttagtgaacactaccctgggagtcgcccaggtgtcaggtatgcataacgcatccaaggccttcctgttccaggacatcgagcgggagattcacgctgccccccacgtatcggagaaactgattcaattgtttcggaacaaatccgagttcaccatcctagcaaccgtgcagcaaaagccctcaacctcaggagtgatcctgagtattcgagaactcgaacatagaatttacgagagggtaattgacccacccgataccaatttgccccccggcataaacctgtggctaggtcagcgtaatcagaagcacggcttatttaaggggatcattcaggacggcaagatcatctttatgcctaatgggtatattactcaatgtccaaatctcaatcatacatgtcccacgtgctcagatttcctgagcctggtgcaggggatcatggacctgcaagagctgctcgcaaaaatgaccgccaaactgaactatgcagagaccagactgtctcaactggaaaactgtcactgtgagaagacatgtcaagttagcggccttttataccgtgaccaggattcttgggtggatggcgatcattgtcgcaattgcacatgcaagtctggggcggtggaatgccgccggatgtcgtgtccgccactcaattgctccccagattcactccccgtccacatcgctggacagtgttgtaaggtttgccgcccgaagtgtatatacggcggcaaggttttggccgagggacagcgcattctgactaagagctgtcgagagtgtaggggaggcgtgcttgtcaagataactgagatgtgtccacccctgaactgttcagaaaaggatcacatcctgccagaaaaccagtgctgcagagtgtgcaggggacacaatttttgtgctgagggacctaaatgtggagagaactctgagtgcaagaattggaatacgaaggccacctgcgagtgtaagtccggatacatttcagttcagggggattcggcctactgcgaagacattgatgaatgtgccgctaagatgcattactgtcacgccaacactgtgtgtgtaaatttgcctggtctttaccgttgcgattgcgtgcccggctacatcagggttgatgactttagctgcactgaacatgacgagtgcggaagcggacaacacaattgcgatgagaatgccatttgcacaaatacggtacaggggcacagctgcacatgcaaacccggatacgtaggcaacgggacaatttgcagagccttttgtgaagaaggttgtagatacggtggtacgtgcgtagcaccaaacaagtgtgtctgcccatctgggtttactggctctcactgtgagaaagacattgacgagtgcagcgaaggcattatcgagtgccacaaccatagccgttgtgtgaacctacctggctggtaccattgtgaatgtagatcgggctttcacgatgacggcacttactctctcagcggcgagtcttgcatagatatcgacgagtgtgcactgcggacacacacctgttggaacgactctgcatgcattaatttggccggcggcttcgattgcctgtgtcctagcggcccttcttgtagcggcgactgtccccacgagggcgggctgaagcataacgggcaagtctggacgctcaaggaggaccgttgttctgtgtgcagctgtaaggacggcaagattttttgcagacggacagcctgcgactgccagaatccaagcgccgacctcttctgttgccccgagtgcgatacgagagtcacaagccagtgcttagatcaaaatggacacaaactctaccggagcggggacaactggacacacagctgtcagcagtgccggtgcctagaaggcgaagtagactgttggcccctcacttgtccaaacctaagctgtgagtataccgctatcctggaaggggagtgctgcccccggtgtgtgtctgatccctgtctggccgacaacatcacatatgatattcgcaagacttgcctggattcctacggtgtcagccgccttagcgggtctgtctggaccatggctggtagtccttgtacaacgtgcaagtgtaaaaacgggcgcgtgtgctgctccgtcgacttcgagtgccttcagaacaactag

SEQ ID NO: 106867 - DNA, 2712 bp, Artificial Sequence
  derived and/or modified sequence
agcacccggcgctgccgagccacctcccccgccgcccgctagcaagtttggcggctccaagccaggcgcgcctcaggatccaggctcatttgcttccacctagcttcggtgccccctgctaggcggggaccctcgagagcgatgccgatggatttgattttagttgtgtggttctgtgtgtgcactgccaggacagtggtgggctttgggatggaccctgaccttcagatggatatcgtcaccgagcttgaccttgtgaacaccacccttggagttgctcaggtgtctggaatgcacaatgccagcaaagcatttttatttcaagacatagaaagagagatccatgcagctcctcatgtgagtgagaaattaattcagctgttccggaacaagagtgaattcaccattttggccactgtacagcagaagccatccacttcaggagtgatactgtccattcgagaactggagcacaggatttatgagcgtgtgatagaccctccagataccaaccttcccccaggaatcaatttatggcttggccagcgcaaccaaaagcatggcttattcaaagggatcatccaagatgggaagatcatctttatgccgaatggatatataacacagtgtccaaatctaaatcacacttgcccaacctgcagtgatttcttaagcctggtgcaaggaataatggatttacaagagcttttggccaagatgactgcaaaactaaattatgcagagacaagacttagtcaattggaaaactgtcattgtgagaagacttgtcaagtgagtggactgctctatcgagatcaagactcttgggtagatggtgaccattgcaggaactgcacttgcaaaagtggtgccgtggaatgccgaaggatgtcctgtccccctctcaattgctccccagactccctcccagtgcacattgctggccagtgctgtaaggtctgccgaccaaaatgtatctatggaggaaaagttcttgcagaaggccagcggattttaaccaagagctgtcgggaatgccgaggtggagttttagtaaaaattacagaaatgtgtcctcctttgaactgctcagaaaaggatcacattcttcctgagaatcagtgctgccgtgtctgtagaggtcataacttttgtgcagaaggacctaaatgtggtgaaaactcagagtgcaaaaactggaatacaaaagctacttgtgagtgcaagagtggttacatctctgtccagggagactctgcctactgtgaagatattgatgagtgtgcagctaagatgcattactgtcatgccaatactgtgtgtgtcaaccttcctgggttatatcgctgtgactgtgtcccaggatacattcgtgtggatgacttctcttgtacagaacacgatgaatgtggcagcggccagcacaactgtgatgagaatgccatctgcaccaacactgtccagggacacagctgcacctgcaaaccgggctacgtggggaacgggaccatctgcagagctttctgtgaagagggctgcagatacggtggaacgtgtgtggctcccaacaaatgtgtctgtccatctggattcacaggaagccactgcgagaaagatattgatgaatgttcagagggaatcattgagtgccacaaccattcccgctgcgttaacctgccagggtggtaccactgtgagtgcagaagcggtttccatgacgatgggacctattcactgtccggggagtcctgtattgacattgatgaatgtgccttaagaactcacacctgttggaacgattctgcctgcatcaacctggcagggggctttgactgtctctgcccctctgggccctcctgctctggtgactgtcctcatgaaggggggctgaagcacaatggccaggtgtggaccttgaaagaagacaggtgttctgtctgctcctgcaaggatggcaagatattctgccgacggacagcttgtgattgccagaatccaagtgctgacctattctgttgcccagaatgtgacaccagagtcacaagtcaatgtttagaccaaaatggtcacaagctgtatcgaagtggagacaattggacccatagctgtcagcagtgtcggtgtctggaaggagaggtagattgctggccactcacttgccccaacttgagctgtgagtatacagctatcttagaaggggaatgttgtccccgctgtgtcagtgacccctgcctagctgataacatcacctatgacatcagaaaaacttgcctggacagctatggtgtttcacggcttagtggctcagtgtggacgatggctggatctccctgcacaacctgtaaatgcaagaatggaagagtctgttgttctgtggattttgagtgtcttcaaaataattgaagtatttacagtggactcaacgcagaagaatggacgaaatgaccatccaacgtgattaaggataggaatcggtagtttggtttttttgtttgttttgtttttttaaccacagataattgccaaagtttccacctgaggacggtgtttggaggttgccttttggacctaccactttgctcattcttgctaacctagtctaggtgacctacagtgccgtgcatttaagtcaatggttgttaaaagaagtttcccgtgttgtaaatcatgtttcccttatcagatcatttgcaaatacatttaaatgatctc

SEQ ID NO: 106868 - DNA, 2262 bp, Artificial Sequence
  derived and/or modified sequence
atgcccatggacctcattttggtggtttggttttgcgtctgcacagccagaactgtcgtgggatttggtatggaccccgatctccagatggatatcgtgaccgaactggatttagtcaacacaactttaggcgtcgcacaggtaagtggaatgcacaatgccagtaaggcgtttctgttccaggacatagagcgtgaaatccacgccgcacctcatgtctctgagaaactaattcagctgttcagaaataagtccgaattcacaatactcgccaccgtacaacagaagccgtctacttccggggtgatcttgtctatcagagagctggagcacaggatctacgaacgcgtgatagatccaccagatacaaacctgccacccggaatcaatttgtggctgggacaacgcaaccaaaaacacggtctgttcaagggtatcatccaagacggaaagatcatcttcatgccgaatggatacattacacaatgtcccaacctaaaccatacatgtcccacttgttctgatttcctgagtttggtgcagggcataatggacctgcaggaattactggccaaaatgactgccaaacttaactatgcggaaacccggctgtcccagctcgagaactgccactgtgagaagacatgccaggtctcggggctactttaccgtgatcaggatagctgggtcgatggcgatcattgccgtaattgcacctgcaaatccggtgccgtggagtgtcgcaggatgagttgtccccctctcaattgcagtccagatagtctccccgtgcacatcgccggtcagtgttgcaaggtgtgcaggccgaagtgtatatatggcggaaaagtgctggcagaaggacagcggatcctgactaaaagctgccgtgagtgtcgtgggggagtgctggttaaaattaccgagatgtgccctccgcttaactgtagcgagaaggaccatattttacctgagaatcagtgctgcagagtgtgcaggggccataacttctgcgccgaaggacccaagtgtggcgaaaattctgagtgcaagaattggaatacgaaagcaacttgcgagtgcaagtcaggatatatctccgtgcaaggggactctgcgtactgcgaagacatagacgagtgcgctgcaaagatgcattactgtcacgccaatacagtgtgcgttaacctgcccggtttgtacagatgtgactgcgtacctggctatatccgcgtggatgacttttcctgcactgaacacgatgagtgtgggagcgggcagcataactgcgatgagaacgcaatttgtacaaacacggtgcaaggacatagttgtacatgtaagccgggatatgtgggaaacggtacaatttgccgagctttctgcgaagagggctgccgctatggaggaacttgcgtagcgcctaacaaatgtgtgtgtccatccgggtttaccggtagccattgcgagaaagacatagacgaatgttcggaagggattatcgagtgtcataaccattcaagatgtgtcaatcttccaggctggtaccattgcgagtgccggtccggatttcacgatgacgggacttacagtctgtccggtgaatcgtgtatagatatagatgagtgcgcactcaggacccacacatgctggaatgactctgcatgtatcaatctcgcaggcggattcgattgcctgtgcccttctggccctagctgcagcggggattgtcctcatgagggaggtcttaaacacaatggacaggtgtggaccctcaaagaagatcggtgttcggtctgcagctgcaaagatggtaagattttttgccggaggacggcctgtgattgtcagaatcccagtgccgacttgttctgctgtccagaatgcgacaccagagttacatcacaatgtttggaccagaacggtcataagctgtatcgaagtggtgataactggactcattcctgtcagcagtgcaggtgcctggagggagaggtcgattgttggcccctgacttgtccaaatttatcttgtgagtacacagccatcttggagggggagtgttgtcctagatgcgtgtcagacccctgcctggccgataacatcacctacgacatcaggaagacatgcctcgattcttacggggtctctcgcctgtccggatctgtgtggacaatggccggatccccctgcaccacctgcaaatgcaaaaatggcagagtgtgctgttcagtggacttcgaatgccttcagaacaactag

SEQ ID NO: 106869 - DNA, 2262 bp, Artificial Sequence
  derived and/or modified sequence
atgcccatggacctgatcctggtggtgtggttctgcgtgtgcaccgccagaaccgtggtgggcttcggcatggaccccgacctgcagatggacatcgtgaccgagctggacctggtgaacaccaccctgggcgtggcccaggtgagcggcatgcacaacgccagcaaggccttcctgttccaggacatcgagagagagatccacgccgccccccacgtgagcgagaagctgatccagctgttcagaaacaagagcgagttcaccatcctggccaccgtgcagcagaagcccagcaccagcggcgtgatcctgagcatcagagagctggagcacagaatctacgagagagtgatcgacccccccgacaccaacctgccccccggcatcaacctgtggctgggccagagaaaccagaagcacggcctgttcaagggcatcatccaggacggcaagatcatcttcatgcccaacggctacatcacccagtgccccaacctgaaccacacctgccccacctgcagcgacttcctgagcctggtgcagggcatcatggacctgcaggagctgctggccaagatgaccgccaagctgaactacgccgagaccagactgagccagctggagaactgccactgcgagaagacctgccaggtgagcggcctgctgtacagagaccaggacagctgggtggacggcgaccactgcagaaactgcacctgcaagagcggcgccgtggagtgcagaagaatgagctgcccccccctgaactgcagccccgacagcctgcccgtgcacatcgccggccagtgctgcaaggtgtgcagacccaagtgcatctacggcggcaaggtgctggccgagggccagagaatcctgaccaagagctgcagagagtgcagaggcggcgtgctggtgaagatcaccgagatgtgcccccccctgaactgcagcgagaaggaccacatcctgcccgagaaccagtgctgcagagtgtgcagaggccacaacttctgcgccgagggccccaagtgcggcgagaacagcgagtgcaagaactggaacaccaaggccacctgcgagtgcaagagcggctacatcagcgtgcagggcgacagcgcctactgcgaggacatcgacgagtgcgccgccaagatgcactactgccacgccaacaccgtgtgcgtgaacctgcccggcctgtacagatgcgactgcgtgcccggctacatcagagtggacgacttcagctgcaccgagcacgacgagtgcggcagcggccagcacaactgcgacgagaacgccatctgcaccaacaccgtgcagggccacagctgcacctgcaagcccggctacgtgggcaacggcaccatctgcagagccttctgcgaggagggctgcagatacggcggcacctgcgtggcccccaacaagtgcgtgtgccccagcggcttcaccggcagccactgcgagaaggacatcgacgagtgcagcgagggcatcatcgagtgccacaaccacagcagatgcgtgaacctgcccggctggtaccactgcgagtgcagaagcggcttccacgacgacggcacctacagcctgagcggcgagagctgcatcgacatcgacgagtgcgccctgagaacccacacctgctggaacgacagcgcctgcatcaacctggccggcggcttcgactgcctgtgccccagcggccccagctgcagcggcgactgcccccacgagggcggcctgaagcacaacggccaggtgtggaccctgaaggaggacagatgcagcgtgtgcagctgcaaggacggcaagatcttctgcagaagaaccgcctgcgactgccagaaccccagcgccgacctgttctgctgccccgagtgcgacaccagagtgaccagccagtgcctggaccagaacggccacaagctgtacagaagcggcgacaactggacccacagctgccagcagtgcagatgcctggagggcgaggtggactgctggcccctgacctgccccaacctgagctgcgagtacaccgccatcctggagggcgagtgctgccccagatgcgtgagcgacccctgcctggccgacaacatcacctacgacatcagaaagacctgcctggacagctacggcgtgagcagactgagcggcagcgtgtggaccatggccggcagcccctgcaccacctgcaagtgcaagaacggcagagtgtgctgcagcgtggacttcgagtgcctgcagaacaactag

SEQ ID NO: 106870 - protein, 181 aa, Artificial Sequence
  derived and/or modified sequence
MSSMSSAEEQFQWQSQDGQKDIEDELTTGLELVDSCIRSLQESGILDPQDYSTGERPSLLSQSALQLNSKPEGSFQYPASYHSNQTLALGETTPSQLPARGTQARATGQSFSQGTTSRAGHLAGPEPAPPPPPPPREPFAPSLGSAFHLPDAPPAAAAAALYYSSSTLPAPPRGGSPLAAP

SEQ ID NO: 106871 - DNA, 546 bp, Artificial Sequence
  derived and/or modified sequence
atgagtagcatgtcgtctgccgaggaacaatttcaatggcagagccaagatggacagaaggatattgaagatgaattgaccaccgggcttgaactggtcgactcctgtatccgctccttgcaggagagcgggatcttggatccccaggactattcgaccggtgaaaggccaagtctgctgtctcaatcagccctccagctcaatagtaaaccagaaggttctttccagtatccagcatcctatcactctaaccagaccctggctctaggtgagactaccccctcgcaacttcctgctcgcgggacccaggctagagctaccggccagtctttctcccaagggacgacctcacgggccggccatttagctggacccgagcccgcacccccacctcccccacccccccgtgaaccgtttgcaccaagcttagggagtgcatttcatcttcctgacgcaccccctgcagccgcagccgcagcactatactatagttcttccacacttccagcacctccacgcggcgggtctccactcgctgcgccctag

SEQ ID NO: 106872 - DNA, 546 bp, Artificial Sequence
  derived and/or modified sequence
atgagctccatgagcagcgctgaggagcagttccagtggcagagccaggacggccagaaggacattgaagatgagctgaccaccggcctggagctggtggacagctgcatccgcagcctgcaggagagcggcatcctggacccccaggactacagcactggagagcggcccagcctgctgagccagagcgccctgcagctgaacagcaagccagagggcagcttccagtacccagccagctaccacagcaaccagaccctggccctgggggagaccacccccagccagctgcctgcccggggcacccaggcccgggccaccggccagagcttcagccagggcaccaccagcagagctggccacctggccggccctgagcccgcccctcctcctcctcctccaccccgggagccctttgcccccagcctgggcagcgccttccacctgcctgatgcccctcctgctgctgctgctgctgccctgtactacagcagcagcaccctgcctgccccaccccggggcggcagccccctggccgccccctag

SEQ ID NO: 106873 - DNA, 546 bp, Artificial Sequence
  derived and/or modified sequence
atgagcagcatgagcagcgccgaggagcagttccagtggcagagccaagatggccagaaagacatagaagacgaacttacaacaggacttgaacttgtagactcttgcattagatccctgcaggaaagcggcatccttgatccacaggactatagtaccggcgagcggccctctctactttcccaatctgccctgcagctgaatagcaaacccgaagggagcttccagtatccagcctcttaccactccaaccagaccctggccctcggcgagacgacaccctctcagttgcccgcccgaggcacacaagcgcgggccaccggtcagtcatttagccaggggacaactagccgcgcaggccaccttgccggacccgagccagctcccccgccccctcctcccccacgcgagccattcgctccttcgctggggtctgcctttcacttgcctgatgcaccacccgcagcagcagctgccgcattgtactactcatcaagtaccctccccgctccacctcgaggcgggagcccacttgctgcaccctag

SEQ ID NO: 106874 - DNA, 546 bp, Artificial Sequence
  derived and/or modified sequence
atgtcttcaatgagctcggctgaggagcaatttcagtggcagagtcaagatgggcagaaagacatcgaggatgagctgacaacagggctggaactggtagattcctgcatccgcagcctccaggagagcgggattttagacccccaggattatagtacaggagaacggccttccctcctaagccaaagcgctctccagcttaactcaaagccagagggaagttttcagtatcctgccagctaccactccaaccagaccctggcgctcggcgaaaccaccccatcacaactcccagccagagggacccaggctcgcgcaacaggacaaagcttctctcagggcaccacctctagagctgggcaccttgctggccctgagcccgcacccccaccccctcccccacccagagaaccttttgctccatcgctgggctcagcattccatctacctgacgctccgccagccgcagccgctgcagctctgtattattcctctagtaccctcccagccccacctcgagggggatccccgctggctgctccctag

SEQ ID NO: 106875 - DNA, 546 bp, Artificial Sequence
  derived and/or modified sequence
atgagcagcatgagcagcgccgaggagcagttccagtggcagagccaggacggccagaaggacatcgaggacgagctgaccaccggcctggagctggtggacagctgcatcagaagcctgcaggagagcggcatcctggacccccaggactacagcaccggcgagagacccagcctgctgagccagagcgccctgcagctgaacagcaagcccgagggcagcttccagtaccccgccagctaccacagcaaccagaccctggccctgggcgagaccacccccagccagctgcccgccagaggcacccaggccagagccaccggccagagcttcagccagggcaccaccagcagagccggccacctggccggccccgagcccgcccccccccccccccccccccccagagagcccttcgcccccagcctgggcagcgccttccacctgcccgacgccccccccgccgccgccgccgccgccctgtactacagcagcagcaccctgcccgccccccccagaggcggcagccccctggccgccccctag

SEQ ID NO: 106876 - protein, 888 aa, Artificial Sequence
  derived and/or modified sequence
MSSMSSAEEQFQWQSQDGQKDIEDELTTGLELVDSCIRSLQESGILDPQDYSTGETGSRASYSSQHGHLGPELRALQSPEHHIDPIYEDRVYQKPPMRSLSQSQGDPLPPAHTGTYRTSTAPSSPGVDSVPLQRTGSQHGPQNAAAATFQRASYAAGPASNYADPYRQLQYCPSVESPYSKSGPALPPEGTLARSPSIDSIQKDPREFGWRDPELPEVIQMLQHQFPSVQSNAAAYLQHLCFGDNKIKAEIRRQGGIQLLVDLLDHRMTEVHRSACGALRNLVYGKANDDNKIALKNCGGIPALVRLLRKTTDLEIRELVTGVLWNLSSCDALKMPIIQDALAVLTNAVIIPHSGWENSPLQDDRKIQLHSSQVLRNATGCLRNVSSAGEEARRRMRECDGLTDALLYVIQSALGSSEIDSKTVENCVCILRNLSYRLAAETSQGQHMGTDELDGLLCGEANGKDAESSGCWGKKKKKKKSQDQWDGVGPLPDCAEPPKGIQMLWHPSIVKPYLTLLSECSNPDTLEGAAGALQNLAAGSWKWSVYIRAAVRKEKGLPILVELLRIDNDRVVCAVATALRNMALDVRNKELIGKYAMRDLVHRLPGGNNSNNTASKAMSDDTVTAVCCTLHEVITKNMENAKALRDAGGIEKLVGISKSKGDKHSPKVVKAASQVLNSMWQYRDLRSLYKKDGWSQYHFVASSSTIERDRQRPYSSSRTPSISPVRVSPNNRSASAPASPREMISLKERKTDYECTGSNATYHGAKGEHTSRKDAMTAQNTGISTLYRNSYGAPAEDIKHNQVSAQPVPQEPSRKDYETYQPFQNSTRNYDESFFEDQVHHRPPASEYTMHLGLKSTGNYVDFYSAARPYSELNYETSHYPASPDSWV

SEQ ID NO: 106877 - DNA, 2667 bp, Artificial Sequence
  derived and/or modified sequence
atgagcagtatgtcatccgctgaggagcagtttcagtggcagagtcaggatggtcagaaggacattgaggacgaactgaccacgggactggagctggttgatagttgtatcaggagtttgcaggaatccggcattctggacccccaagactattccacaggcgaaaccggatccagggcatcatattcctcacaacacggtcatctgggacctgaactgcgcgccctccagagcccagagcaccacatcgatcccatctacgaagacagggtgtaccaaaagccgccaatgaggtccttgagccagagccaaggagatcccctgcctccagctcatacaggcacttataggacgtctactgctccttcctcacccggcgttgattcagtacccctgcagaggaccggatcccaacacggtccacagaatgccgccgctgcaacgttccagagggctagctacgcggccggtccggcttcgaattatgccgatccctacaggcagttgcaatattgcccttctgtcgaatccccttattccaagagcggcccagctctccccccagaaggaacgctggctcgatcaccttcaatcgattccattcagaaagacccacgggagttcggttggcgggacccagagttgcctgaagtgattcagatgttgcagcaccagttcccatcagtccagagcaatgcggccgcctatctccagcacctgtgtttcggcgataacaaaattaaggccgaaataagaaggcaagggggaattcaactgttagtcgatctgttggaccacagaatgactgaggtacacagatctgcctgtggcgcgttacggaatctggtttacggcaaagctaatgacgacaacaaaatcgctctgaagaattgcggtggaattccagccctggtccggcttctgaggaaaacaaccgatctggaaatccgagaactcgtaaccggcgttttgtggaatctgagctcctgcgacgctcttaagatgcccattatccaggacgctctggctgtcctgaccaacgcggttattattccccatagtgggtgggagaattcgcctctgcaagacgatcgaaagatccagctgcatagcagtcaggtgttgaggaatgctacaggctgtctccgcaatgtgtcctccgccggcgaagaagctaggaggaggatgcgggagtgcgacgggctgacagacgccctcctgtacgtgattcagagcgccttggggagcagcgaaattgatagtaaaaccgtggagaactgtgtgtgcatcctccggaacctttcctacaggctggcagccgaaaccagtcagggacagcacatgggtacggatgagttggacggtctcctgtgtggcgaggctaatggtaaagatgcggagtcatcaggctgttggggcaagaaaaagaaaaaaaagaagagccaggaccagtgggacggggtgggacctttgccagactgcgccgaacctccaaaagggatccagatgctgtggcacccctccatcgtgaaaccatatctgacactgctttccgagtgtagtaatcctgacaccctcgagggggcagctggtgctctccagaacctggctgcaggttcatggaagtggtctgtgtatataagggctgccgttcggaaagagaaaggcctcccgatccttgtggagctgctacggattgataatgacagagtagtctgcgccgttgccaccgctttgcggaacatggctctcgacgtacggaataaggaactgataggcaaatatgccatgagagatctcgtgcacagactcccaggaggaaataatagcaataatactgcctcaaaagcaatgagcgatgacaccgtaacagccgtctgttgcactcttcacgaggtaataacaaaaaacatggagaatgcaaaggccctgcgagatgcagggggcattgagaaactggttgggatctcaaagtccaaaggagataaacactctcctaaggtcgtgaaggccgccagccaggtgctgaattccatgtggcagtaccgagaccttagatccctgtataagaaggatggatggagtcagtatcatttcgttgcgtccagctccacgatcgagcgggatcgtcagcgcccttactcatcctcccgaacacctagtatttctcccgtacgcgtctccccaaacaaccggtccgcttccgcgccagcttcgccaagggagatgatcagcctgaaggaacggaagactgattacgagtgcactgggagcaacgccacctaccacggtgcaaaaggcgagcatacatcccgaaaggatgctatgaccgcccagaacacgggtatcagcacactgtataggaatagctatggtgctccagccgaggacatcaagcacaatcaagtcagtgcccagcccgtcccccaggagcccagtaggaaagactacgaaacctaccaacccttccagaattcaacccggaattacgacgagtccttcttcgaggaccaggtacatcatcggcctccagcctccgaatatacaatgcacctgggactcaaaagcactggaaattatgtggatttctactctgctgcaaggccttattccgagttaaactatgaaacctcccactatccggcgagtcctgactcctgggtgtag

SEQ ID NO: 106878 - DNA, 2667 bp, Artificial Sequence
  derived and/or modified sequence
atgagctccatgagcagcgctgaggagcagttccagtggcagagccaggacggccagaaggacattgaagatgagctgaccaccggcctggagctggtggacagctgcatccgcagcctgcaggagagcggcatcctggacccccaggactacagcactggagagaccggcagccgggccagctacagcagccagcacggccacctgggccctgagctgcgggccctgcagagccctgagcaccacatcgaccccatctatgaggacagagtgtaccagaagccacccatgaggagcctgagccagagccagggcgaccccctgcccccagcccacacaggcacctaccgcaccagcacagcccccagcagccctggggtggacagcgtgcccctgcagaggacaggcagccagcacggcccccagaatgctgctgctgccaccttccagagggccagctatgctgctggccctgccagcaactatgctgacccctaccggcagctgcagtactgccccagcgtggagagcccctacagcaagagcggccctgccctgcccccagagggcaccctggcccggagccccagcattgacagcatccagaaggacccccgggagtttggctggagggaccctgagctgcctgaggtgatccagatgctgcagcaccagttccccagcgtgcagagcaatgctgctgcctacctgcagcacctgtgcttcggggacaacaagatcaaggccgagatccggcggcagggcggcatccagctgctggtggacctgctggaccacaggatgacagaggtgcacaggtctgcctgtggggccctgaggaacctggtgtatggcaaggccaatgatgacaacaagatcgccctgaagaactgtggcggcatcccagccctggtgcggctgctgaggaagaccacagacctggagatccgggagctggtgactggagtgctgtggaacctgagcagctgtgatgccctgaagatgcccatcatccaggatgccctggccgtgctgaccaatgctgtgatcatcccccacagcggctgggagaacagccccctgcaggatgacaggaagatccagctgcacagcagccaggtgctgagaaatgccaccggctgcctgagaaatgtgtcctctgctggggaggaggcccggcggaggatgagagaatgtgatggcctgacagatgccctgctgtatgtgatccagagcgccctgggcagcagcgagattgacagcaagacagtggagaactgtgtgtgcatcctgaggaacctgagctaccgcctggccgctgagaccagccagggccagcacatgggcacagatgagctggatggcctgctgtgtggggaggccaacgggaaggatgctgagagcagcggctgctggggcaagaagaagaagaagaagaagagccaggaccagtgggatggagtgggccccctgcctgactgtgccgagccccccaagggcatccagatgctgtggcaccccagcatcgtgaagccctacctgaccctgctgtctgaatgtagcaacccagacaccctggagggcgccgccggggccctgcagaacctggccgccggctcctggaagtggagcgtgtacatccgggctgctgtgaggaaggagaagggcctgcccatcctggtggagctgctgagaattgacaatgacagagtggtgtgtgctgtggccacagccctgaggaacatggccctggatgtgaggaacaaggagctgattggcaagtatgccatgagggacctggtgcaccggctgcccggcggcaacaacagcaacaacacagccagcaaggccatgtctgatgacacagtgacagctgtgtgctgcaccctgcatgaagtcatcaccaagaacatggagaatgccaaggccctgagagatgctgggggcatcgagaagctggtgggcatcagcaagagcaagggggacaagcacagccccaaggtggtgaaggccgccagccaggtgctgaacagcatgtggcagtacagagacctgcggagcctgtacaagaaggatggctggagccagtaccactttgtggccagcagcagcaccatcgagcgggaccggcagaggccctacagcagcagcaggacccccagcatcagccctgtgcgggtgagccccaacaacagaagtgccagcgccccagccagcccccgggagatgatcagcctgaaggagaggaagacagattatgagtgcaccggcagcaatgccacctaccatggagccaagggggagcacaccagcaggaaggatgccatgacagcccagaacacaggcatcagcaccctgtacagaaacagctatggagccccagctgaggacatcaagcacaaccaggtgtctgcccagcctgtgccccaggagcccagcaggaaggactatgagacctaccagcccttccagaacagcaccaggaactatgatgagagcttctttgaggaccaggtgcaccaccggcccccagccagcgagtacaccatgcacctgggcctgaagagcactggaaactacgtggacttctacagcgctgcccggccctacagcgagctgaactatgagaccagccactacccagccagcccagacagctgggtgtag

SEQ ID NO: 106879 - DNA, 2667 bp, Artificial Sequence
  derived and/or modified sequence
atgagcagcatgagcagcgccgaggagcagttccagtggcagagccaagacggacagaaagacattgaagacgaactcacaacggggctggaacttgtcgattcctgcattaggtctctgcaggaatccggaattctggacccacaggattatagcactggagaaactggaagccgggcttcatacagttctcaacatggacatctaggtcccgagctgcgggcacttcagagccctgagcatcacatcgatccaatttacgaggaccgggtctatcagaaacccccgatgcgcagcctgagccagagccagggggatcccctgcccccagctcatacaggaacatatcgaacttctactgccccatcatcccctggagtggacagtgtcccattgcagcgaacaggttcacaacacgggcctcagaacgccgccgccgccacatttcaaagagcctcatatgcagccggccctgcctcgaactatgctgatccctaccggcaattgcagtactgtccatccgtggaatctccttattccaagagtggacctgcgctaccccctgaaggtaccttagcacgcagtccttctatcgactcaattcagaaagatccccgcgagttcggatggcgcgaccctgagctgcccgaggtgatacagatgttgcagcaccagtttcccagcgtgcaatccaacgccgcggcctatctgcagcacctgtgcttcggagacaataagatcaaagcagaaatacgacgtcagggaggaattcagttgttagtggacctgcttgatcaccgcatgactgaagtgcaccgcagcgcctgtggggctctgaggaaccttgtttatggcaaggcaaatgacgacaataagatagctctgaaaaactgtggaggcatccccgccctggtgcggctcctgaggaaaactacagacctggaaatcagggagctggttactggcgtgctttggaacctgagttcctgcgatgcactaaagatgccaattatccaagatgctctcgccgtactgaccaacgctgtgatcatccctcattctggatgggaaaattccccccttcaggatgatagaaaaattcagctgcactcttctcaggttctaagaaacgcaaccgggtgcctgcgcaacgtatcaagcgccggagaggaggcgaggcgaagaatgagggaatgcgacggactaaccgacgcactgctgtacgtgatacagagtgcacttgggtcatcagagatcgatagtaaaaccgtggaaaattgtgtatgcattctaaggaatctgagctataggctcgcggccgaaacctcgcaaggccagcatatgggcacggatgagctcgatggattgctttgcggcgaagctaatggcaaagacgctgaaagcagcgggtgctggggtaagaagaagaaaaaaaagaagagtcaggatcagtgggatggggtcgggcccctgcccgactgcgccgaaccacctaagggaattcagatgctttggcacccatctattgtcaaaccgtatctcacacttctgtcagagtgctcaaacccagacaccttggagggagccgccggggcactgcagaacctcgcagctggcagttggaagtggtcggtgtacattcgagccgccgtccgcaaggaaaaaggcttaccaattctcgttgagttgctgcgtatagataatgatagggttgtgtgcgcagttgccacagcactgcgcaatatggcactcgacgtcagaaacaaagaactgatcgggaaatacgccatgagggatctggttcacagacttccaggcggaaacaattctaacaacacagcatctaaagcaatgagtgatgacacagtaacggcagtttgctgcactctgcacgaagtgattactaagaacatggaaaacgcaaaagctcttagagatgcgggtgggatcgaaaagttggtgggaatttcgaaatctaaaggagacaagcattcccctaaggtcgtgaaggcagcctctcaagtgctcaacagcatgtggcagtaccgcgatctgcgcagcctgtacaaaaaagacggttggtctcagtatcactttgtcgcaagtagcagcaccatcgaaagggatcgacagagaccatacagcagttcaaggactccctcgattagccccgtgagggtttcacccaacaatcgctcagcctccgcccccgcctccccaagggaaatgatcagcttgaaggaaagaaaaaccgactacgagtgtacaggctctaacgctacttatcatggagctaagggggagcataccagccgtaaggatgctatgacggcccagaataccggcatcagtacgctgtaccggaatagctacggagctcctgcagaagacattaagcacaaccaggtgtcagcacagcctgtccctcaagagcctagtaggaaggattacgaaacttaccagccatttcagaattcgaccaggaattatgacgagagcttttttgaagatcaggtccatcatcgtccaccagcctccgagtacactatgcatctgggtttgaagagcaccggcaactacgtcgacttttatagcgcagcccggccgtatagtgagctgaactacgaaacttcccactatccggcttcacccgattcctgggtgtag

SEQ ID NO: 106880 - DNA, 2667 bp, Artificial Sequence
  derived and/or modified sequence
atgagttctatgagctccgctgaggagcagttccagtggcagagccaggatggccagaaggacatcgaagatgagcttaccactggactggaactggtggattcttgcattcgttctcttcaggaaagtggcatcctggatcctcaggactactccaccggcgagacgggttcccgtgcttcctacagttcgcagcacggccatctgggacccgaactcagagcactccagtcaccagagcaccacattgatcccatttatgaggacagagtttatcaaaaaccacctatgcgtagtttgtcgcagagccaaggggaccccctgcctcctgcccatactgggacttaccgaacgtcaaccgctccctcttctcctggcgtcgattctgtacccctgcagcgcactggatctcagcacggcccacaaaacgccgctgcagcaactttccaaagggcatcgtacgccgctggtccagcatcaaattacgccgatccttacagacagctgcagtattgcccctccgtggaatcgccctactcgaagagtgggcctgctctgcctcccgaaggcaccctggccaggtctccgtctatcgacagcatccaaaaagacccaagagaattcggctggcgcgatcctgaactcccagaggtaatccaaatgctgcagcatcaattcccctcggtgcagtctaatgccgcagcttatctgcagcatttgtgttttggggataacaagattaaagcagagatcagacgccaggggggaatccagttgctggtggacctgctcgaccaccggatgacagaggtgcaccgatccgcctgtggcgctctcagaaatttggtgtatggaaaggccaatgacgacaacaagatcgccttgaaaaattgcggagggatacccgcacttgtgcgcctgttgcgaaaaaccacagaccttgaaatccgagagctcgtcactggagtgctgtggaacctttccagttgtgatgccctaaagatgcctatcatccaggatgctctggctgtgttaacgaacgccgtgatcatacctcacagtggatgggaaaattctcctttgcaggatgatcgaaagatccagctgcatagctcccaagtgctgaggaatgcgaccggatgtctgagaaacgtgagctcagcgggagaggaagcacgtcgacggatgcgggaatgcgacgggctcactgatgcactgctgtacgttatccagagcgccttgggctccagcgagatcgattccaaaaccgtagagaattgcgtgtgcatcctacgtaacctctcataccgtctagcagctgagacaagtcagggacagcacatgggaaccgacgaactcgacgggctcctttgtggggaggccaacggcaaggacgctgaatcttctggttgttggggaaaaaagaaaaaaaagaaaaagtcacaagaccagtgggacggcgtgggcccactacccgattgcgccgagccccctaaagggattcaaatgctgtggcacccaagcatcgttaaaccctacctcaccctgctcagtgagtgctctaaccccgatactctagaaggagccgcaggtgcactccagaacctggctgctggctcctggaagtggtcggtatacattcgcgcagccgtccgaaaggagaagggtcttccaatcctggttgaattattaaggatcgacaatgacagagtggtctgcgcggtggccaccgctttaaggaacatggctctggacgtccgaaataaggaactcatcgggaaatacgctatgcgcgacctggtgcaccgtcttcctgggggtaataactccaataataccgccagtaaagccatgagcgatgataccgtcaccgccgtttgttgtaccttgcacgaagttatcactaaaaacatggaaaatgccaaggctcttcgggacgccggtggcattgagaagttggttggcatttctaaatctaaaggagacaagcactccccaaaagtagttaaagccgcatctcaggtgttaaattccatgtggcagtaccgcgacttgagaagcttgtataagaaggatggttggagtcagtatcatttcgttgccagctctagcaccatcgagcgggatagacagcgtccctatagtagctctcgaacccccagtatttcccctgttagggtcagccctaacaatcgttccgcctccgcccctgctagcccacgcgagatgataagcctgaaggaacgcaaaaccgactatgagtgcactggtagcaatgccacttatcatggcgctaaaggtgaacatactagcaggaaggatgccatgacggcccaaaataccgggatcagtactttgtacaggaactcatatggagctccagcggaggatattaagcacaatcaggtctccgcacaaccagtgccacaggagcccagccgcaaagactacgagacataccagcctttccagaatagcacgcgtaactacgatgagagtttctttgaagatcaggtgcaccatagacccccagcctccgagtataccatgcacctgggactgaagagcacaggaaattacgtggacttctactcagctgcccgtccgtactccgaactgaattatgagactagtcactacccagcatctccagactcctgggtgtag

SEQ ID NO: 106881 - DNA, 2982 bp, Artificial Sequence
  derived and/or modified sequence
agcctggggaaggagggaagagtaacccttcatctttgggactagtcgtcttgtttgcctagactacagttttcaagtatttaaggaccatttatttcaaaaggaattacagtttgaaaggctgacccgagagctggaggctgaacggcagatcgtagccagccagctggagcgatgcaagctcggatccgagactggcagcatgagcagcatgagttcagcagaagagcagtttcagtggcagtcacaagatggtcaaaaagatatcgaagatgagcttacaacaggtctcgagctggtggactcctgtattaggtcactacaggaatcaggaatacttgacccacaggattattctacaggtgaaactggttcccgagcctcatacagcagccagcatgggcacctgggcccagagttgcgggccctgcagtccccagaacaccacatagatcccatctatgaagaccgcgtctatcagaagccccctatgaggagtctcagccagagccagggggaccctctgccgccagcacacaccggcacctaccgcacgagcacagccccatcttcccctggtgtcgactccgtccccttgcagcgcacaggcagccagcacggcccacagaatgccgccgcggccaccttccagagggccagctatgccgccggcccagcctccaattacgcggacccctaccgacagctgcagtattgtccctctgttgagtctccatacagcaaatccggccctgctctcccgcctgaaggcaccttggccaggtccccgtccattgatagcattcagaaagatcccagagaatttggatggagagacccggaactgccggaagtgattcagatgttgcagcaccagtttccctcggtccagtctaacgcggcagcctacttgcaacacctctgttttggagacaacaaaattaaagccgagataaggagacaaggaggcatccagctcctggtggacctgttggatcatcggatgaccgaagtccaccgtagtgcctgtggagctctgagaaacctggtgtatgggaaggccaacgatgataacaaaattgccctgaaaaactgtggtggcatcccagcactggtgaggttactccgcaagacgactgacctggagatccgggagctggtcacaggagtcctttggaacctctcctcatgcgatgcactcaaaatgccaatcatccaggatgccctagcagtactgaccaacgcggtgattatcccccactcaggctgggaaaattcgcctcttcaggatgatcggaaaatacagctgcattcatcacaggtgctgcgtaacgccaccgggtgcctaaggaatgttagttcggccggagaggaggcccgcagaaggatgagagagtgtgatgggcttacggatgccttgctgtacgtgatccagtctgcgctggggagcagtgagatcgatagcaagaccgttgaaaactgtgtgtgcattttaaggaacctctcgtaccggctggcggcagaaacgtctcagggacagcacatgggcacggacgagctggacgggctactctgtggcgaggccaatggcaaggatgctgagagctctgggtgctggggcaagaagaagaagaaaaagaaatcccaagatcagtgggatggagtaggacctcttccagactgtgctgaaccaccaaaagggatccagatgctgtggcacccatcaatagtcaaaccctacctcacactgctctctgagtgctcaaatccagacacgctggaaggggcggcaggcgccctgcagaacttggctgcagggagctggaagtggtcagtatatatccgagccgctgtccgaaaagagaaaggcctgcccatcctcgtggagctgctccgaatagacaatgaccgtgtggtgtgcgcggtggccactgcgctgcggaacatggccttggacgtcagaaataaggagctcatcggcaaatacgccatgcgagacctagtccacaggcttccaggagggaacaacagcaacaacactgcaagcaaggccatgtcggatgacacagtgacagctgtctgctgcacactgcacgaagtgattaccaagaacatggagaacgccaaggccttacgggatgccggtggcatcgagaagttggtcggcatctccaaaagcaaaggagataaacactctccaaaagtggtcaaggctgcatctcaggtcctcaacagcatgtggcagtaccgagatctgaggagtctctacaaaaaggatggatggtcacaataccactttgtagcctcgtcttcaaccatcgagagggaccggcaaaggccctactcctcctcccgcacgccctccatctcccctgtgcgcgtgtctcccaacaaccgctcagcaagtgccccagcttcacctcgggaaatgatcagcctcaaagaaaggaaaacagactacgagtgcaccggcagcaacgccacctaccacggagctaaaggcgaacacacttccaggaaagatgccatgacagctcaaaacactggaatttcaactttgtataggaattcttatggtgcgcccgctgaagacatcaaacacaaccaggtttcagcacagccagtcccacaggagcccagcagaaaagattacgagacctaccagccatttcagaattccacaagaaattacgatgagtccttcttcgaggaccaggtccaccatcgccctcccgccagcgagtacaccatgcacctgggtctcaagtccaccggcaactacgttgacttctactcagctgcccgtccctacagtgaactgaactatgaaacgagccactacccggcctcccccgactcctgggtgtgaggagcagggcacaggcgctccgggaacagtgcatgtgcatgcataccacaagacatttctttctgttttgtttttttctcctgcaaatttagtttgttaaagcctgttccata

SEQ ID NO: 106882 - DNA, 2667 bp, Artificial Sequence
  derived and/or modified sequence
atgagcagcatgagcagcgccgaggagcagttccagtggcagagccaggacggccagaaggacatcgaggacgagctgaccaccggcctggagctggtggacagctgcatcagaagcctgcaggagagcggcatcctggacccccaggactacagcaccggcgagaccggcagcagagccagctacagcagccagcacggccacctgggccccgagctgagagccctgcagagccccgagcaccacatcgaccccatctacgaggacagagtgtaccagaagccccccatgagaagcctgagccagagccagggcgaccccctgccccccgcccacaccggcacctacagaaccagcaccgcccccagcagccccggcgtggacagcgtgcccctgcagagaaccggcagccagcacggcccccagaacgccgccgccgccaccttccagagagccagctacgccgccggccccgccagcaactacgccgacccctacagacagctgcagtactgccccagcgtggagagcccctacagcaagagcggccccgccctgccccccgagggcaccctggccagaagccccagcatcgacagcatccagaaggaccccagagagttcggctggagagaccccgagctgcccgaggtgatccagatgctgcagcaccagttccccagcgtgcagagcaacgccgccgcctacctgcagcacctgtgcttcggcgacaacaagatcaaggccgagatcagaagacagggcggcatccagctgctggtggacctgctggaccacagaatgaccgaggtgcacagaagcgcctgcggcgccctgagaaacctggtgtacggcaaggccaacgacgacaacaagatcgccctgaagaactgcggcggcatccccgccctggtgagactgctgagaaagaccaccgacctggagatcagagagctggtgaccggcgtgctgtggaacctgagcagctgcgacgccctgaagatgcccatcatccaggacgccctggccgtgctgaccaacgccgtgatcatcccccacagcggctgggagaacagccccctgcaggacgacagaaagatccagctgcacagcagccaggtgctgagaaacgccaccggctgcctgagaaacgtgagcagcgccggcgaggaggccagaagaagaatgagagagtgcgacggcctgaccgacgccctgctgtacgtgatccagagcgccctgggcagcagcgagatcgacagcaagaccgtggagaactgcgtgtgcatcctgagaaacctgagctacagactggccgccgagaccagccagggccagcacatgggcaccgacgagctggacggcctgctgtgcggcgaggccaacggcaaggacgccgagagcagcggctgctggggcaagaagaagaagaagaagaagagccaggaccagtgggacggcgtgggccccctgcccgactgcgccgagccccccaagggcatccagatgctgtggcaccccagcatcgtgaagccctacctgaccctgctgagcgagtgcagcaaccccgacaccctggagggcgccgccggcgccctgcagaacctggccgccggcagctggaagtggagcgtgtacatcagagccgccgtgagaaaggagaagggcctgcccatcctggtggagctgctgagaatcgacaacgacagagtggtgtgcgccgtggccaccgccctgagaaacatggccctggacgtgagaaacaaggagctgatcggcaagtacgccatgagagacctggtgcacagactgcccggcggcaacaacagcaacaacaccgccagcaaggccatgagcgacgacaccgtgaccgccgtgtgctgcaccctgcacgaggtgatcaccaagaacatggagaacgccaaggccctgagagacgccggcggcatcgagaagctggtgggcatcagcaagagcaagggcgacaagcacagccccaaggtggtgaaggccgccagccaggtgctgaacagcatgtggcagtacagagacctgagaagcctgtacaagaaggacggctggagccagtaccacttcgtggccagcagcagcaccatcgagagagacagacagagaccctacagcagcagcagaacccccagcatcagccccgtgagagtgagccccaacaacagaagcgccagcgcccccgccagccccagagagatgatcagcctgaaggagagaaagaccgactacgagtgcaccggcagcaacgccacctaccacggcgccaagggcgagcacaccagcagaaaggacgccatgaccgcccagaacaccggcatcagcaccctgtacagaaacagctacggcgcccccgccgaggacatcaagcacaaccaggtgagcgcccagcccgtgccccaggagcccagcagaaaggactacgagacctaccagcccttccagaacagcaccagaaactacgacgagagcttcttcgaggaccaggtgcaccacagaccccccgccagcgagtacaccatgcacctgggcctgaagagcaccggcaactacgtggacttctacagcgccgccagaccctacagcgagctgaactacgagaccagccactaccccgccagccccgacagctgggtgtag

SEQ ID NO: 106883 - DNA, 963 bp, Artificial Sequence
  derived and/or modified sequence
atgacagtatggtgtgccgtggcgacagccctccggaacatggcactcgacgtcagaaataaggagttaattggaaagtacgcgatgagggacctggtgcaccgactacctggggggaataattccaacaatactgcatctaaggctatgtcagacgacacagttactgcggtgtgttgtacactgcacgaggtgattaccaagaacatggaaaacgcgaaagcgctgagggacgctggcggaattgagaaactagtcggcatcagtaaatccaagggggacaagcactcacctaaggtcgtgaaggccgctagccaggttctaaatagtatgtggcagtaccgggatctgcgtagtctctataagaaggatggttggagccagtatcacttcgttgcttccagcagcaccattgaaagagatcgtcagcgcccgtactcttcttctcgcactccttcgataagccctgtacgcgtgagccccaataatcggagcgcctctgctccggcctctccacgcgagatgatttctctgaaggagcgtaaaactgactacgaatgtactggctctaatgccacgtaccatggcgccaagggtgagcacactagccgcaaggatgcaatgacggctcagaataccggcattagtacgctatacagaaattcatacggggcaccggccgaggacatcaaacataatcaggtttctgctcagcctgtaccacaagagccgtcgagaaaagactatgagacatatcagcccttccagaactccactcgcaactacgatgagtccttcttcgaagatcaggtgcaccacagaccaccagcgagcgagtacacgatgcacttaggcctgaaatccactggaaattacgttgacttctattctgccgcacgaccatactctgaacttaattacgagacaagccactatcctgcctcccccgactcgtgggtctag

SEQ ID NO: 106884 - DNA, 963 bp, Artificial Sequence
  derived and/or modified sequence
atgacagtgtggtgtgctgtggccacagccctgaggaacatggccctggatgtgaggaacaaggagctgattggcaagtatgccatgagggacctggtgcaccggctgcccggcggcaacaacagcaacaacacagccagcaaggccatgtctgatgacacagtgacagctgtgtgctgcaccctgcatgaagtcatcaccaagaacatggagaatgccaaggccctgagagatgctgggggcatcgagaagctggtgggcatcagcaagagcaagggggacaagcacagccccaaggtggtgaaggccgccagccaggtgctgaacagcatgtggcagtacagagacctgcggagcctgtacaagaaggatggctggagccagtaccactttgtggccagcagcagcaccatcgagcgggaccggcagaggccctacagcagcagcaggacccccagcatcagccctgtgcgggtgagccccaacaacagaagtgccagcgccccagccagcccccgggagatgatcagcctgaaggagaggaagacagattatgagtgcaccggcagcaatgccacctaccatggagccaagggggagcacaccagcaggaaggatgccatgacagcccagaacacaggcatcagcaccctgtacagaaacagctatggagccccagctgaggacatcaagcacaaccaggtgtctgcccagcctgtgccccaggagcccagcaggaaggactatgagacctaccagcccttccagaacagcaccaggaactatgatgagagcttctttgaggaccaggtgcaccaccggcccccagccagcgagtacaccatgcacctgggcctgaagagcactggaaactacgtggacttctacagcgctgcccggccctacagcgagctgaactatgagaccagccactacccagccagcccagacagctgggtgtag

SEQ ID NO: 106885 - DNA, 963 bp, Artificial Sequence
  derived and/or modified sequence
atgaccgtgtggtgcgccgtggccaccgccctgcggaacatggccctggatgtaagaaacaaggagttgatcggtaagtacgcaatgagggatctcgtgcataggctgcctgggggaaacaattctaacaataccgcatctaaggcaatgagcgatgatacagtgacggctgtgtgttgtacacttcatgaagtgatcacaaaaaatatggagaacgcgaaggcactcagagatgcaggaggcattgaaaaactggtaggaatcagcaagtctaagggggataaacacagtcccaaggttgtaaaggcggcaagccaggtgctgaatagcatgtggcagtaccgggatttacggagcctctataaaaaagatggttggtcccagtaccacttcgtggctagtagttctacgatcgaacgagaccgacaaagaccttacagctcatcacggactcctagcatctcacccgtgcgggtgagcccaaacaatcgttctgcctcagctcctgcatcccctagagagatgatcagcctgaaagaaaggaagacagattatgagtgtaccgggtcgaacgccacctaccacggggctaaaggtgaacacacatcaagaaaggatgctatgaccgcgcaaaacacaggtataagtacattgtaccgaaactcctatggggcccctgcagaagacataaagcataatcaggtaagtgcccaaccagttccacaagaaccttctcgaaaagattacgagacttatcagccattccagaacagcacccgaaattatgacgaaagcttctttgaagatcaggtacaccacagaccccctgcttccgagtatacgatgcacttgggcctgaagtccaccggaaactatgtagatttttactccgctgcgaggccttattcagagctgaactacgagacatcgcactatccagcaagccctgattcttgggtgtag

SEQ ID NO: 106886 - DNA, 963 bp, Artificial Sequence
  derived and/or modified sequence
atgaccgtgtggtgtgcggtggctacggcactaaggaatatggcactggacgtaaggaacaaggagctgatagggaaatacgctatgagggacctggtgcatcgcctgcccggtggcaacaactcgaataacaccgcttctaaggccatgtcagatgatacggttaccgcagtgtgctgtacactgcacgaagttatcaccaagaacatggagaacgccaaagccttgcgggacgcgggaggtattgaaaagcttgtggggatatccaagagtaagggcgacaaacactctccgaaagtggtgaaagccgcaagccaggttttgaattctatgtggcagtatagagacttaagatcactgtacaagaaggacggctggtctcagtatcactttgtggcctcaagctcaacaattgagagggatagacagaggccctatagcagctccaggacaccctccataagtcctgtgcgtgtgagtcctaacaatcgatctgcctctgctcccgcaagcccgagggagatgatttccctgaaggaaagaaagaccgactatgagtgcacgggctcaaatgccacttaccacggtgccaagggagaacacacctcacgaaaggacgcaatgacggctcaaaatacaggcatctctacgctgtatcgcaatagttatggagcacctgccgaggatatcaaacataaccaagtgtcagcacagcccgtgccccaggaaccctcccgtaaggattatgagacgtaccaacccttccagaactcaacacggaactatgatgagtcttttttcgaggaccaggttcaccataggcctcccgcaagtgaatacactatgcacttaggcttgaaatctacaggtaattacgtggacttctactccgccgcaaggccatactccgagctgaactacgagacctctcattaccccgcttcccctgattcttgggtgtag

SEQ ID NO: 106887 - DNA, 963 bp, Artificial Sequence
  derived and/or modified sequence
atgaccgtgtggtgcgccgtggccaccgccctgagaaacatggccctggacgtgagaaacaaggagctgatcggcaagtacgccatgagagacctggtgcacagactgcccggcggcaacaacagcaacaacaccgccagcaaggccatgagcgacgacaccgtgaccgccgtgtgctgcaccctgcacgaggtgatcaccaagaacatggagaacgccaaggccctgagagacgccggcggcatcgagaagctggtgggcatcagcaagagcaagggcgacaagcacagccccaaggtggtgaaggccgccagccaggtgctgaacagcatgtggcagtacagagacctgagaagcctgtacaagaaggacggctggagccagtaccacttcgtggccagcagcagcaccatcgagagagacagacagagaccctacagcagcagcagaacccccagcatcagccccgtgagagtgagccccaacaacagaagcgccagcgcccccgccagccccagagagatgatcagcctgaaggagagaaagaccgactacgagtgcaccggcagcaacgccacctaccacggcgccaagggcgagcacaccagcagaaaggacgccatgaccgcccagaacaccggcatcagcaccctgtacagaaacagctacggcgcccccgccgaggacatcaagcacaaccaggtgagcgcccagcccgtgccccaggagcccagcagaaaggactacgagacctaccagcccttccagaacagcaccagaaactacgacgagagcttcttcgaggaccaggtgcaccacagaccccccgccagcgagtacaccatgcacctgggcctgaagagcaccggcaactacgtggacttctacagcgccgccagaccctacagcgagctgaactacgagaccagccactaccccgccagccccgacagctgggtgtag

SEQ ID NO: 106888 - protein, 764 aa, Artificial Sequence
  derived and/or modified sequence
MAGWIQAQQLQGDALRQMQVLYGQHFPIEVRHYLAQWIESQPWDAIDLDNPQDRAQATQLLEGLVQELQKKAEHQVGEDGFLLKIKLGHYATQLQCSSPAGILVDAMSQKHLQINQTFEELRLVTQDTENELKKLQQTQEYFIIQYQESLRIQAQFAQLAQLSPQERLSRETALQQKQVSLEAWLQREAQTLQQYRVELAEKHQKTLQLLRKQQTIILDDELIQWKRRQQLAGNGGPPEGSLDVLQSWCEKLAEIIWQNRQQIRRAEHLCQQLPIPGPVEEMLAEVNATITDIISALVTSTFIIEKQPPQVLKTQTKFAATVRLLVGGKLNVHMNPPQVKATIISEQQAKSLLKNENTRNECSGEILNNCCVMEYHQATGTLSAHFRNMSLKRIKRADRRGAESVTEEKFTVLFESQFSVGSNELVFQVKTLSLPVVVIVHGSQDHNATATVLWDNAFAEPGRVPFAVPDKVLWPQLCEALNMKFKAEVQSNRGLTKENLVFLAQKLFNNSSSHLEDYSGLSVSWSQFNRENLPGWNYTFWQWFDGVMEVLKKHHKPHWNDGAILGFVNKQQAHDLLINKPDGTFLLRFSDSEIGGITIAWKFDSPERNLWNLKPFTTRDFSIRSLADRLGDLSYLIYVFPDRPKDEVFSKYYTPVLAKAVDGYVKPQIKQVVPEFVNASADAGGSSATYMDQAPSPAVCPQAPYNMYPQNPDHVLDQDGEFDLDETMDVARHVEELLRRPMDSLDSRLSPPAGLFTSARGSLS

SEQ ID NO: 106889 - DNA, 2295 bp, Artificial Sequence
  derived and/or modified sequence
atggccggctggatccaggcccagcagctgcagggcgacgccctgagacagatgcaggtgctgtacggccagcacttccccatcgaggtgagacactacctggcccagtggatcgagagccagccctgggacgccatcgacctggacaacccccaggacagagcccaggccacccagctgctggagggcctggtgcaggagctgcagaagaaggccgagcaccaggtgggcgaggacggcttcctgctgaagatcaagctgggccactacgccacccagctgcagtgcagcagccccgccggcatcctggtggacgccatgagccagaagcacctgcagatcaaccagaccttcgaggagctgagactggtgacccaggacaccgagaacgagctgaagaagctgcagcagacccaggagtacttcatcatccagtaccaggagagcctgagaatccaggcccagttcgcccagctggcccagctgagcccccaggagagactgagcagagagaccgccctgcagcagaagcaggtgagcctggaggcctggctgcagagagaggcccagaccctgcagcagtacagagtggagctggccgagaagcaccagaagaccctgcagctgctgagaaagcagcagaccatcatcctggacgacgagctgatccagtggaagagaagacagcagctggccggcaacggcggcccccccgagggcagcctggacgtgctgcagagctggtgcgagaagctggccgagatcatctggcagaacagacagcagatcagaagagccgagcacctgtgccagcagctgcccatccccggccccgtggaggagatgctggccgaggtgaacgccaccatcaccgacatcatcagcgccctggtgaccagcaccttcatcatcgagaagcagcccccccaggtgctgaagacccagaccaagttcgccgccaccgtgagactgctggtgggcggcaagctgaacgtgcacatgaaccccccccaggtgaaggccaccatcatcagcgagcagcaggccaagagcctgctgaagaacgagaacaccagaaacgagtgcagcggcgagatcctgaacaactgctgcgtgatggagtaccaccaggccaccggcaccctgagcgcccacttcagaaacatgagcctgaagagaatcaagagagccgacagaagaggcgccgagagcgtgaccgaggagaagttcaccgtgctgttcgagagccagttcagcgtgggcagcaacgagctggtgttccaggtgaagaccctgagcctgcccgtggtggtgatcgtgcacggcagccaggaccacaacgccaccgccaccgtgctgtgggacaacgccttcgccgagcccggcagagtgcccttcgccgtgcccgacaaggtgctgtggccccagctgtgcgaggccctgaacatgaagttcaaggccgaggtgcagagcaacagaggcctgaccaaggagaacctggtgttcctggcccagaagctgttcaacaacagcagcagccacctggaggactacagcggcctgagcgtgagctggagccagttcaacagagagaacctgcccggctggaactacaccttctggcagtggttcgacggcgtgatggaggtgctgaagaagcaccacaagccccactggaacgacggcgccatcctgggcttcgtgaacaagcagcaggcccacgacctgctgatcaacaagcccgacggcaccttcctgctgagattcagcgacagcgagatcggcggcatcaccatcgcctggaagttcgacagccccgagagaaacctgtggaacctgaagcccttcaccaccagagacttcagcatcagaagcctggccgacagactgggcgacctgagctacctgatctacgtgttccccgacagacccaaggacgaggtgttcagcaagtactacacccccgtgctggccaaggccgtggacggctacgtgaagccccagatcaagcaggtggtgcccgagttcgtgaacgccagcgccgacgccggcggcagcagcgccacctacatggaccaggcccccagccccgccgtgtgcccccaggccccctacaacatgtacccccagaaccccgaccacgtgctggaccaggacggcgagttcgacctggacgagaccatggacgtggccagacacgtggaggagctgctgagaagacccatggacagcctggacagcagactgagcccccccgccggcctgttcaccagcgccagaggcagcctgagctag

SEQ ID NO: 106890 - DNA, 2295 bp, Artificial Sequence
  derived and/or modified sequence
atggccggctggatccaggcgcagcaactgcagggagacgctcttcggcaaatgcaagtcctgtacgggcagcactttcccatcgaggttaggcattacctcgcacaatggatcgaaagtcagccgtgggatgccattgacctcgacaatccacaggatcgggcacaggccactcaattgcttgaagggctggttcaagaactgcagaagaaggcagaacaccaggtcggagaggatggcttcctgctgaagataaaactcggtcattacgcaacgcagctgcagtgttctagtcccgctggcatccttgttgacgccatgtctcaaaagcatctacagatcaatcagaccttcgaagagctgcgcctggtcacacaggataccgagaatgagctcaaaaaattgcagcaaacccaagagtatttcatcattcagtaccaggaatcccttcgaatccaggctcagtttgcccagctcgcccagttgagtccccaggaacgacttagtcgagaaaccgcgttgcagcagaagcaggtaagccttgaagcctggctgcagcgggaagcacagactctgcagcagtatagggtggagctggcagaaaagcatcagaagaccctgcagttactgcgaaagcaacagacaatcatacttgatgacgagctcatccagtggaagcggcgacagcagctggctggaaatggcgggccaccggagggctcactcgacgttctccagtcatggtgtgaaaaactcgctgagataatctggcagaatcgccagcaaattcggagggccgagcacctgtgccagcagttaccgattcctggtccggtggaagagatgctcgctgaagtgaacgctacgatcaccgatataatttccgcactcgtgacaagtacattcataattgagaagcagcctccacaggtactgaaaacccagacaaagttcgccgcaaccgttcgactgttggtggggggtaaactcaacgttcatatgaatccccctcaagtgaaggctacaattatatccgagcagcaggcgaaaagtctgctgaagaacgagaacacacgcaacgagtgtagcggcgagatcctgaacaactgctgtgttatggagtatcaccaggctacagggacactcagcgcccacttcagaaacatgagcctcaagcgaataaaacgcgcagaccgtagaggcgcagagtcagtaacagaagagaaatttactgtactttttgagagtcaattctcagttgggagcaatgaacttgtgtttcaggtgaagactctgtctctgcctgtggtggtcattgtgcacggcagtcaggatcacaatgccaccgcaaccgttctttgggacaatgcctttgctgaacccggtcgcgttccattcgctgtgccagacaaagtgctgtggccgcagttatgcgaagccctgaacatgaagttcaaagccgaggtgcagagcaacaggggcctaactaaagagaatctggtgttcctggcgcagaaactgtttaacaacagcagcagtcatttggaggactattctggtctgtctgtcagctggtctcagttcaatagagagaatctgccaggctggaactatactttttggcaatggtttgacggtgttatggaggtgctgaagaaacaccacaagcctcactggaacgacggagcaatcctcggctttgtgaacaaacagcaggcacacgacctgctgataaataaacctgatggcacctttctgctgagattctcagattccgagatcggcggtattactattgcatggaaattcgattcacccgaacgaaacctgtggaatctgaaaccatttaccacccgcgattttagtatcaggtctctggctgacagattaggtgatctgtcgtacctcatttacgttttccccgatcgccctaaggatgaggtattctctaaatactatactccagtgctggccaaggccgtggatggttatgtgaaacctcagataaaacaggtcgtgcctgagttcgtcaacgcgtcggcagacgcaggcgggtcatctgcaacctacatggaccaggccccctcccccgcagtgtgcccccaggccccctataacatgtatcctcaaaatcctgaccacgtactggatcaggatggggagtttgacctggacgagacaatggacgtggcacgccatgtagaagaactcttaagacgccccatggacagcctcgatagtaggctcagccctccagccgggctctttacaagtgcaaggggctcactttcctag

SEQ ID NO: 106891 - DNA, 2295 bp, Artificial Sequence
  derived and/or modified sequence
atggcaggctggatccaggcccagcaattgcagggcgacgccctcaggcagatgcaagttctgtacggtcaacactttcccatcgaagtccggcattatctggcgcagtggatcgaatcccagccctgggatgcgattgatctggacaacccacaagacagggcacaggcaacgcaactcctggaaggacttgtccaggagttgcagaaaaaggccgagcaccaagtgggggaagatggattcttgctcaagataaagcttggacactacgcgactcagctgcagtgctcatccccagcaggcattttagtcgatgccatgtctcagaaacacctacagatcaatcaaactttcgaagaactacggctggtgacccaagatacagaaaacgagctgaaaaagttgcagcagactcaggagtatttcatcatccagtatcaggagtccttacgcatccaggcccaattcgcacagttagcccagctgtccccccaggagcggctgtcccgagagactgcgctccagcagaaacaggtgtccttagaagcttggttgcaacgggaggcccagacgctgcagcagtaccgcgtcgagctcgccgagaagcaccaaaaaacactgcagctgttgcggaaacaacagaccataattctcgacgatgagctcatacagtggaagaggcgtcagcagctggctggaaacgggggaccccccgaaggaagcctggacgtcctacagtcctggtgtgagaaactggcagaaataatttggcagaatcggcagcaaattagacgcgctgagcacctgtgccagcagttacccattccaggtcccgtcgaggagatgctggcggaggtgaacgcaacaatcacagacatcatctctgcgctcgttacgtcgacatttatcatagagaaacaacctccccaggtgttgaaaacacagaccaagtttgctgctactgtgagactcctggtgggcggtaagttgaacgtccatatgaatccccctcaagtcaaagctacaatcatatctgaacaacaggctaagagcctgctgaagaacgagaatacccgcaacgagtgttctggcgagatccttaacaattgttgtgtcatggagtaccatcaagcaactggaactttgtcagcacacttccgaaacatgtcactgaagcggatcaagcgtgctgatcgccgtggcgctgagtccgtgactgaggagaagttcacagtcctctttgagtctcagtttagcgtaggctccaacgaattggtcttccaggtgaagaccctcagtctgcctgtggttgtcatcgttcacgggtctcaggatcacaacgccacagcaactgtcctgtgggataacgctttcgccgagcccggccgagtaccctttgccgtcccagacaaagtgttgtggccacagctgtgcgaggctctgaacatgaagtttaaagccgaggtgcaatctaataggggccttactaaagaaaatcttgtttttctggcgcagaaattgtttaacaactctagctcccatctcgaagattactctgggctttcagtgtcgtggagccaatttaatagggaaaatcttccggggtggaattatacattttggcagtggtttgatggcgtcatggaggttctgaaaaagcaccacaagccccactggaacgatggagccatcctcgggtttgtgaacaagcagcaggcccatgacctactgattaataaaccagacggcacattcctactccgtttttccgattcagaaattgggggaatcacgatcgcctggaagtttgacagcccagagagaaacctttggaacctcaagcctttcacaaccagggacttttccattcgttctctggcagatcgcctcggggatcttagttacctcatatacgtctttccggatcggcctaaagatgaagtatttagtaaatactacaccccagtgctggccaaagcagtagacggctacgttaagccacagattaaacaggttgttcctgagttcgtcaacgccagtgccgacgctggggggtctagcgcgacttatatggatcaggcacccagcccagcggtttgtcctcaggcaccttataacatgtacccgcagaacccagatcatgtcctggaccaagatggagaatttgatttagacgagacaatggacgtggctagacacgtcgaagaactgcttagacggcccatggatagcttggacagccggctgtctcctcctgctgggttgtttaccagcgcacggggcagcctgtcctag

SEQ ID NO: 106892 - DNA, 2295 bp, Artificial Sequence
  derived and/or modified sequence
atggccggctggatccaggcccagcagctgcagggagatgccctgcggcagatgcaggtgctgtatggccagcacttccccatcgaggtgcgccactacctggcccagtggattgagagccagccctgggatgccatcgacctggacaacccccaggaccgggcccaggccacccagctgctggagggcctggtgcaggagctgcagaagaaggccgagcaccaggtgggggaggatggcttcctgctgaagatcaagctgggccactacgccacccagctgcagtgcagcagccctgctggcatcctggtggatgccatgagccagaagcacctgcagatcaaccagacctttgaggagctgcggctggtgacccaggacacagaaaatgagctgaagaagctgcagcagacccaggagtacttcatcatccagtaccaggagagcctgcgcatccaggcccagtttgcccagctggcccagctgagcccccaggagcggctgagccgggagacagccctgcagcagaagcaggtgtccctggaggcctggctgcagcgggaggcccagaccctgcagcagtacagagtggagctggccgagaagcaccagaagaccctgcagctgctgaggaagcagcagaccatcatcctggatgatgagctgatccagtggaagaggcggcagcagctggccggaaatggaggccccccagagggcagcctggatgtgctgcagagctggtgtgagaagctggccgagatcatctggcagaaccggcagcagatccggcgggcagagcacctgtgccagcagctgcccatccctggccctgtggaggagatgctggccgaggtgaatgccaccatcacagacatcatcagcgccctggtgaccagcaccttcatcatcgagaagcagcccccccaggtgctgaagacccagaccaagtttgctgccaccgtgcggctgctggtgggcggcaagctgaatgtgcacatgaaccccccccaggtgaaggccaccatcatcagcgagcagcaggccaagagcctgctgaagaatgaaaacaccagaaatgaatgttctggagagatcctgaacaactgctgcgtgatggagtaccaccaggccaccggcaccctgagcgcccacttcaggaacatgagcctgaagaggatcaagagagctgacagaagaggagctgagagcgtgacagaggagaagttcaccgtgctgtttgagagccagttctctgtgggcagcaatgagctggtgttccaggtgaagaccctgagcctgcctgtggtggtgattgtgcacggcagccaggaccacaatgccacagccaccgtgctgtgggacaatgcctttgctgagcccggccgggtgccctttgctgtgcctgacaaggtgctgtggccccagctgtgtgaggccctgaacatgaagttcaaggccgaggtgcagagcaacagaggcctgaccaaggagaacctggtgttcctggcccagaagctgttcaacaacagcagcagccacctggaggactacagcggcctgtctgtgtcctggagccagttcaaccgggagaacctgcccggctggaactacaccttctggcagtggtttgatggagtgatggaggtgctgaagaagcaccacaagccccactggaatgatggagccatcctgggctttgtgaacaagcagcaggcccatgacctgctgatcaacaagccagatggcaccttcctgctgcgcttcagtgacagcgagatcggcggcatcaccatcgcctggaagtttgacagccctgagaggaacctgtggaacctgaagcccttcaccacccgggacttcagcatccgcagcctggccgaccggctgggggacctgagctacctgatctacgtgtttcctgaccggcccaaggatgaggtgttcagcaagtactacacccctgtgctggccaaggctgtggatggctacgtgaagccccagatcaagcaggtggtgcctgagtttgtgaatgccagcgcagatgctgggggcagcagcgccacctacatggaccaggcccccagccctgctgtgtgcccccaggccccctacaacatgtacccccagaacccagaccacgtgctggaccaggatggagaatttgacctggatgagaccatggatgtggcccggcacgtggaggagctgctgcggcggcccatggacagcctggacagccggctgagccccccagctggcctcttcaccagcgcccggggcagcctgtcctag

SEQ ID NO: 106893 - DNA, 2295 bp, Artificial Sequence
  derived and/or modified sequence
atggccggctggatccaggcccagcagctgcagggcgacgccctgcgacagatgcaggtgttgtacgggcagcacttccctatcgaggtgcggcactatctggcccagtggatagagagtcaaccttgggacgcaattgacttggacaatcctcaggaccgtgctcaagccacccagctgcttgaagggttagtccaggagctccaaaagaaggcagaacatcaggtgggcgaggatggcttcctgctgaagattaaactgggccattacgcaacccaactccagtgctcgtctccagccggaatcctggttgatgctatgtcccaaaaacatttgcaaattaatcagacatttgaagagctccggctcgttacacaggatactgagaacgagctcaaaaagctgcaacagacccaagaatattttatcatccagtatcaggagtcacttcgaatccaggcccaattcgcccagctcgctcaactgagtccccaggagcgtctcagcagagagacagcgctccagcagaagcaggtatctttggaggcatggctgcaacgtgaagctcaaacgttgcagcagtatagggttgaattagcagagaaacaccagaagacactgcagctccttcgtaagcagcagaccattatcctagacgatgagctgattcaatggaagaggaggcagcagctggccggaaacggaggaccccccgagggttctcttgatgttctacaatcatggtgcgagaaactggcagagattatatggcagaatcgacagcaaatccggagggcagagcatttgtgccagcagctccctattcccggtcccgtggaggaaatgctggcagaagtcaatgccaccatcaccgatatcatatcggccttggtcacaagcacgttcattatcgagaaacaaccccctcaggtccttaagacccagacaaagtttgctgcaacagttaggctgctggtgggcggcaaactgaacgtgcacatgaatcctccccaggtgaaggcaactattatctctgagcagcaggctaagagcttgttgaagaatgaaaatacaaggaacgagtgctccggagaaatcctcaacaactgctgtgtcatggagtatcatcaggcaactggcacactgagcgcccacttcaggaacatgagcttaaagcgtatcaaaagggcagatagaaggggtgcagagtctgtgactgaggagaagttcactgtgttatttgagtctcaattttccgtggggtccaatgaactagtgttccaggtgaagaccctcagtctcccggttgtcgtgatcgtgcacggtagtcaggatcacaatgctacggccacggtgttgtgggacaacgctttcgctgagccaggacgcgtgccttttgctgtccccgacaaggttctgtggcctcagttatgtgaagccctcaatatgaaatttaaggccgaagttcagtccaatcgcggactgaccaaagaaaatttggtgttcttagctcagaagttgtttaataattcgagctctcacctagaagactactctgggcttagtgtctcctggtcccagtttaatcgggagaatctgcccggctggaactacacattctggcagtggtttgacggcgtcatggaggtgctgaagaaacaccacaagcctcactggaacgacggggccatccttggctttgtgaataagcagcaagcccatgatctgctcattaacaaaccagacggaacgtttttactccgcttctcagattcggagatcggaggcatcacgatcgcctggaaattcgatagcccagaaagaaatctatggaatttgaagcccttcaccacgcgggacttttcaattcgctccctggctgacaggctaggggatctgtcctatcttatttacgtcttccccgaccggccgaaagatgaggtgtttagcaagtactatactccggtgctcgcaaaagcagttgacgggtacgtgaagccgcagatcaaacaagtcgtgccagagttcgtaaacgcttctgccgatgcgggcgggtccagcgcgacatatatggaccaggctcctagccccgcggtgtgcccccaggcaccttataatatgtacccccaaaatcccgatcatgtgctcgatcaggacggagaatttgatcttgacgaaacgatggacgtggcccgacatgtcgaagaactgctgcggcgtcctatggatagtctagactcaagattaagtccgcccgcaggactcttcacctccgccaggggcagcctgtcctag

SEQ ID NO: 106894 - DNA, 2295 bp, Artificial Sequence
  derived and/or modified sequence
atggccggctggatccaggcccagcagctgcagggcgacgccctgcgacagatgcaggtattgtatggacagcacttcccgattgaggtgagacactacctggctcagtggattgagtcacagccatgggacgctattgatttggacaacccccaggatagagctcaagccacacaactgttagaagggttagttcaggagcttcagaaaaaggccgagcaccaggtgggcgaagacggtttcctccttaagattaagctgggccactacgccacccaactgcagtgctcatcacccgccggaattctggtagatgccatgtcccaaaagcacctacagataaatcaaacgtttgaggagctgcgtctagtcacccaggacaccgaaaatgagcttaagaaactgcagcagacacaagaatatttcatcatccagtaccaggaaagcctacggattcaagcccagtttgcacaactcgctcagcttagtcctcaggaacgactttcacgcgaaacagctcttcagcagaagcaagtgtccttagaagcatggctccaacgggaagcacagacattgcagcagtatcgggtcgagctggctgaaaaacatcagaagacgcttcagctgctccggaagcaacaaaccattattcttgacgatgagcttatacagtggaagcggcggcaacaactggccggcaatggcggccccccggaaggctcccttgacgtgcttcaatcttggtgcgagaagcttgctgagattatttggcagaaccgccaacaaatcaggagggcggagcacctgtgtcagcagttacctatcccaggacctgttgaggaaatgctcgctgaagtgaacgccaccatcacagacattatatccgctcttgtcacctccacctttatcatagaaaaacagccaccacaggttctgaaaactcagaccaagtttgcagccactgtccgcttgctggttggcgggaagctgaatgttcacatgaatcccccccaggtgaaagcaacgatcatctctgaacagcaggccaaaagcctcctaaaaaacgaaaacaccaggaatgaatgctccggtgagatcctgaacaattgctgcgtcatggagtaccatcaggctacagggaccctgagcgcacacttccgaaacatgagtcttaagcgcatcaagcgcgcagaccgaaggggcgctgaaagcgtcactgaagaaaaattcaccgttctcttcgaatcacaattttctgtgggcagcaacgagcttgtgtttcaggtgaagaccctcagtctcccagtcgtggtaatcgtccatgggtcccaggaccataatgctaccgcaaccgtgctgtgggataacgccttcgccgagccgggcagagtcccgtttgctgtgcctgataaggtgctctggccccaactctgcgaagctttgaacatgaagtttaaggccgaagtgcagtctaacagaggcctgacaaaagaaaacctcgtgttcctcgctcagaagctctttaacaacagtagttcccacctcgaggactattccggtttgtccgtgtcctggagccagtttaacagagaaaatctcccaggatggaactacaccttctggcaatggtttgacggtgtgatggaggtgctgaagaaacatcacaaaccccactggaacgacggcgctatcctaggatttgtgaacaagcagcaggcccacgatctgctcattaataagccagatggaactttcctgctccggttctctgacagcgagataggcggcatcactattgcctggaagtttgacagccccgagagaaacttatggaacctgaaaccatttaccaccagggatttcagcattcgctcacttgctgatcggctgggtgacctgagctacctcatttatgtttttcccgatcggcctaaggacgaagtttttagtaagtactacacccctgtcctcgccaaggcggtggatggttatgttaagccgcagatcaagcaagtcgtgcccgagttcgtaaacgcctccgctgacgcagggggaagtagcgccacctacatggatcaggccccgagccctgctgtatgtccacaggcaccatacaacatgtacccacagaacccagatcacgtactggatcaagacggtgagtttgatttagatgagacaatggatgtcgctcggcatgtagaagaactcttgcgtagacctatggacagtcttgatagccgtctctcaccccccgccggcctgtttacgagtgcaagaggatctttgtcgtag

SEQ ID NO: 106895 - DNA, 2295 bp, Artificial Sequence
  derived and/or modified sequence
atggctggatggatccaggcacagcaactccagggagatgctttacggcaaatgcaggtgctgtacggacagcacttcccaattgaggtgagacactacctcgctcagtggattgagtcccagccttgggatgccatcgacctggacaatccacaggatcgagctcaggcaacccagctgttggaagggctcgtccaggagctgcagaaaaaggcggagcaccaagtgggagaggatggttttctgctcaagattaaactgggccactacgccacccaactgcaatgttcctctcccgcaggcatactggtcgacgcaatgtcacagaagcacctccagatcaaccaaacattcgaagaattgcgcctggttactcaggacacagaaaacgagctcaagaagttgcaacagacacaggagtatttcatcattcagtatcaggagagtctgaggatccaggcgcaattcgctcagctcgcacagctgtctccccaggagaggctgtctcgtgaaaccgctttgcaacaaaaacaggtgagtctcgaagcctggctccagagggaagcccagaccttgcaacagtacagggtggaactcgccgagaagcatcagaagacactgcagctgttgcgaaagcagcagacaattatcctggacgacgaattgattcaatggaagaggagacagcagctggcgggaaatggcggaccccctgaggggagtctggacgtgctgcagtcatggtgtgaaaaattagcagaaatcatctggcagaacaggcagcaaataagacgtgccgaacacctctgtcagcagctcccaatccccggaccagtggaagagatgttagccgaggtcaacgctaccatcaccgacatcattagcgcactcgtcactagcacgtttattatagagaagcaacctccacaggtgctgaaaacccaaacgaaatttgccgcaacggtaagattgctggtggggggtaaattaaacgttcacatgaatccccctcaggtcaaagccactatcatcagtgagcagcaggctaagtctctcttaaaaaacgaaaatacacgaaacgaatgcagcggcgaaatcctgaataactgctgcgtgatggaataccatcaggccacgggtaccttgtctgcccactttaggaacatgagtttgaagagaatcaagcgggctgatcgacggggtgcagagtcagtcacagaggagaagtttacagtgctgttcgagtcacaattctctgtcggttccaatgagctggtgttccaggtgaaaactctctcattgcccgtcgtcgtaattgtgcatgggagccaggaccataatgccaccgccactgttctgtgggacaacgcctttgctgagccaggcagggtgccgtttgcagtgccagataaagtactgtggccacagctgtgcgaagctctcaatatgaagtttaaagccgaggttcagagtaaccggggtttgacaaaggagaatcttgtcttcctcgctcagaagctcttcaataactcctcatcacaccttgaagattactcgggcctgtctgtctcctggtcccagtttaatcgggagaatctgcccggttggaactatactttctggcaatggttcgacggagtaatggaagtgttgaagaagcatcataaacctcattggaatgacggcgctattttagggttcgtcaacaagcaacaggctcatgatcttttaatcaacaagcccgacggcaccttcttgctgcgattcagtgactctgagatcggcggtattaccatcgcatggaaattcgactcacccgaaaggaacctatggaatcttaagccattcacgaccagggacttctcgattagatcattggcggataggctgggggatcttagctatctgatatacgtgtttccagatagaccgaaggacgaggtcttctctaaatattatacccccgtcctggccaaagccgttgatgggtacgtaaagcctcaaatcaaacaggtggttcctgaattcgtcaatgctagcgccgacgctggcggatctagtgccacctacatggaccaggccccttcacctgccgtgtgtccacaggcaccctacaatatgtatcctcagaaccccgaccacgtgcttgaccaggatggcgagttcgacttagacgaaactatggatgtggcacgacacgtagaagaattgctccggagacccatggactccctcgactctcgcctgtcacctccagccggactctttacctccgctcgagggtctctctcctag

SEQ ID NO: 106896 - DNA, 2295 bp, Artificial Sequence
  derived and/or modified sequence
atggctggctggatacaggcccagcagctgcaaggagacgctctgaggcagatgcaggtgctctatgggcaacattttcctattgaggtcagacactacctcgcccagtggatcgagagccagccatgggacgccatagacctggataatccccaagaccgagcccaggcgacccagcttctggaaggcctcgtccaggagctgcagaagaaggcagagcaccaggtaggtgaggatggattcttgctgaaaattaaactgggccactatgccactcagctacagtgttcctccccagccggtatcctggtggacgctatgagccagaagcacctacagataaaccagactttcgaggagctgcggctcgtgacccaagacaccgaaaacgaactgaaaaagctgcaacagacccaggagtattttattattcagtaccaggagagccttcgtatccaggcccagtttgcgcaactggcccagctctcgcctcaggagagactgtctcgtgaaaccgccctgcagcagaaacaggtgtccctggaagcctggctgcaaagagaggcccagacacttcagcagtatagagttgagctagccgagaagcatcagaaaaccctgcagctgctgaggaagcaacagacaatcattctagatgacgaattaatacagtggaaaaggcggcagcaactggccggaaatggaggacctcccgaaggatctttggacgttctccaatcctggtgtgaaaaattggccgagatcatctggcaaaacagacagcagatccgcagagcagagcacctgtgccagcagcttccaattcccggtccagtggaggaaatgcttgccgaagtgaatgcaacaatcacggacatcatcagcgccctcgtaacttctactttcatcatcgagaaacagccaccacaggtgcttaagacacagactaaattcgctgctacagttcgattactggtcgggggaaaactaaatgtgcacatgaacccacctcaggtgaaagcaaccattatcagtgagcagcaggctaagtcactgttgaagaatgagaatacaaggaatgagtgctccggggagattctcaataactgctgtgtgatggagtatcaccaggccactggcaccctgtcagctcatttccgcaacatgtcattaaagcgcattaagcgcgctgacagaagaggagccgagagtgtgaccgaggagaaatttaccgtgctgttcgagtctcagttctcagttggatcaaacgagttggtcttccaggtcaaaacgctttcattgccggtggtggtaatcgtccacggaagtcaggaccacaatgccacagccacggtcctgtgggataacgcgttcgcagagcctggaagagttcccttcgcggttccagacaaagtcctgtggcctcagctgtgcgaggcattgaacatgaaatttaaggcggaagtccagtctaacaggggtctcacaaaagagaatctcgtgtttctggcacagaagctattcaacaattcgtcctcacatctcgaagactattcgggcctctcggtctcctggagccagtttaatcgcgaaaatctgcctgggtggaattacacgttctggcagtggttcgacggtgttatggaagtcttgaaaaaacaccacaaaccacactggaacgatggcgctattctgggtttcgtgaacaagcagcaggcccatgatctgctcatcaacaagccagatggaacgttcctgcttcggttctcagattctgaaattgggggtattactatcgcctggaagtttgatagtcccgagcgcaatctgtggaatctgaagccctttacaactagggatttctcgatccggagcttagctgatcgcttgggagacttgagttatcttatttacgtgtttccggaccgccctaaagatgaggtgttctccaagtactacactcctgtgcttgccaaagcagtggatggctacgtcaagcctcaaattaaacaggttgtgccagagtttgtgaatgcctcagctgatgctggagggtcaagcgccacttatatggatcaggctccttccccagccgtttgccctcaggcgccttataacatgtacccgcagaaccctgaccacgtcctggaccaggatggagagttcgacctggacgagactatggacgtggctcgccatgtggaagaactactgcgtcgtcccatggatagcctggacagtaggctgagcccccctgccggattgttcacgtccgccagaggaagcctcagctag

SEQ ID NO: 106897 - DNA, 2653 bp, Artificial Sequence
  derived and/or modified sequence
agtaacagccgccgctgccgccgccgccaggaaccccggccgggagcgagagccgcggggcgcagagccggcccggctgccggacggtgcggccccaccaggtgaacggccatggcgggctggatccaggcccagcagctgcagggagacgcgctgcgccagatgcaggtgctgtacggccagcacttccccatcgaggtccggcactacttggcccagtggattgagagccagccatgggatgccattgacttggacaatccccaggacagagcccaagccacccagctcctggagggcctggtgcaggagctgcagaagaaggcggagcaccaggtgggggaagatgggtttttactgaagatcaagctggggcactacgccacgcagctccagtgcagctctccggctgggatcctggttgacgccatgtcccagaagcaccttcagatcaaccagacatttgaggagctgcgactggtcacgcaggacacagagaatgagctgaagaaactgcagcagactcaggagtacttcatcatccagtaccaggagagcctgaggatccaagctcagtttgcccagctggcccagctgagcccccaggagcgtctgagccgggagacggccctccagcagaagcaggtgtctctggaggcctggttgcagcgtgaggcacagacactgcagcagtaccgcgtggagctggccgagaagcaccagaagaccctgcagctgctgcggaagcagcagaccatcatcctggatgacgagctgatccagtggaagcggcggcagcagctggccgggaacggcgggccccccgagggcagcctggacgtgctacagtcctggtgtgagaagttggccgagatcatctggcagaaccggcagcagatccgcagggctgagcacctctgccagcagctgcccatccccggcccagtggaggagatgctggccgaggtcaacgccaccatcacggacattatctcagccctggtgaccagcacattcatcattgagaagcagcctcctcaggtcctgaagacccagaccaagtttgcagccaccgtacgcctgctggtgggcgggaagctgaacgtgcacatgaatcccccccaggtgaaggccaccatcatcagtgagcagcaggccaagtctctgcttaaaaatgagaacacccgcaacgagtgcagtggtgagatcctgaacaactgctgcgtgatggagtaccaccaagccacgggcaccctcagtgcccacttcaggaacatgtcactgaagaggatcaagcgtgctgaccggcggggtgcagagtccgtgacagaggagaagttcacagtcctgtttgagtctcagttcagtgttggcagcaatgagcttgtgttccaggtgaagactctgtccctacctgtggttgtcatcgtccacggcagccaggaccacaatgccacggctactgtgctgtgggacaatgcctttgctgagccgggcagggtgccatttgccgtgcctgacaaagtgctgtggccgcagctgtgtgaggcgctcaacatgaaattcaaggccgaagtgcagagcaaccggggcctgaccaaggagaacctcgtgttcctggcgcagaaactgttcaacaacagcagcagccacctggaggactacagtggcctgtccgtgtcctggtcccagttcaacagggagaacttgccgggctggaactacaccttctggcagtggtttgacggggtgatggaggtgttgaagaagcaccacaagccccactggaatgatggggccatcctaggttttgtgaataagcaacaggcccacgacctgctcatcaacaagcccgacgggaccttcttgttgcgctttagtgactcagaaatcgggggcatcaccatcgcctggaagtttgactccccggaacgcaacctgtggaacctgaaaccattcaccacgcgggatttctccatcaggtccctggctgaccggctgggggacctgagctatctcatctatgtgtttcctgaccgccccaaggatgaggtcttctccaagtactacactcctgtgctggctaaagctgttgatggatatgtgaaaccacagatcaagcaagtggtccctgagtttgtgaatgcatctgcagatgctgggggcagcagcgccacgtacatggaccaggccccctccccagctgtgtgcccccaggctccctataacatgtacccacagaaccctgaccatgtactcgatcaggatggagaattcgacctggatgagaccatggatgtggccaggcacgtggaggaactcttacgccgaccaatggacagtcttgactcccgcctctcgccccctgccggtcttttcacctctgccagaggctccctctcatgaatgtttgaatcccacgcttctctttggaaacaatatgcaatgtgaagcggtcgtgttgtgagtttagtaaggctgtgtacactgacacctttgcaggcatgcatgtgcttgtgtgtgtgtgtgtgtgtgtgtccttgtgcatgagctacgcctgcctcccctgtgcagtcctgggatgtggctgcagcagcggtggcctcttttcagatcatggcatccaagagtgcgccgagtctgtctctgtcat

SEQ ID NO: 106898 - protein, 125 aa, Artificial Sequence
  derived and/or modified sequence
MAGWIQAQQLQGDALRQMQVLYGQHFPIEVRHYLAQWIESQPWDAIDLDNPQDRAQATQLLEGLVQELQKKAEHQVGEDGFLLKIKLGHYATQLQKTYDRCPLELVRCIRHILYNEQRLVREANN

SEQ ID NO: 106899 - protein, 765 aa, Artificial Sequence
  derived and/or modified sequence
TAMAGWIQAQQLQGDALRQMQVLYGQHFPIEVRHYLAQWIESQPWDAIDLDNPQDRAQATQLLEGLVQELQKKAEHQVGEDGFLLKIKLGHYATQLQKTYDRCPLELVRCIRHILYNEQRLVREANNCSSPAGILVDAMSQKHLQINQTFEELRLVTQDTENELKKLQQTQEYFIIQYQESLRIQAQFAQLAQLSPQERLSRETALQQKQVSLEAWLQREAQTLQQYRVELAEKHQKTLQLLRKQQTIILDDELIQWKRRQQLAGNGGPPEGSLDVLQSWCEKLAEIIWQNRQQIRRAEHLCQQLPIPGPVEEMLAEVNATITDIISALVTSTFIIEKQPPQVLKTQTKFAATVRLLVGGKLNVHMNPPQVKATIISEQQAKSLLKNENTRNECSGEILNNCCVMEYHQATGTLSAHFRNMSLKRIKRADRRGAESVTEEKFTVLFESQFSVGSNELVFQVKGRVPFAVPDKVLWPQLCEALNMKFKAEVQSNRGLTKENLVFLAQKLFNNSSSHLEDYSGLSVSWSQFNRENLPGWNYTFWQWFDGVMEVLKKHHKPHWNDGAILGFVNKQQAHDLLINKPDGTFLLRFSDSEIGGITIAWKFDSPERNLWNLKPFTTRDFSIRSLADRLGDLSYLIYVFPDRPKDEVFSKYYTPVLAKAVDGYVKPQIKQVVPEFVNASADAGGSSATYMDQAPSPAVCPQAPYNMYPQNPDHVLDQDGEFDLDETMDVARHVEELLRRPMDSLDSRLSPPAGLFTSARGSLS

SEQ ID NO: 106900 - DNA, 2298 bp, Artificial Sequence
  derived and/or modified sequence
accgccatggccggctggatccaggcccagcagctgcagggcgacgccctgagacagatgcaggtgctgtacggccagcacttccccatcgaggtgagacactacctggcccagtggatcgagagccagccctgggacgccatcgacctggacaacccccaggacagagcccaggccacccagctgctggagggcctggtgcaggagctgcagaagaaggccgagcaccaggtgggcgaggacggcttcctgctgaagatcaagctgggccactacgccacccagctgcagaagacctacgacagatgccccctggagctggtgagatgcatcagacacatcctgtacaacgagcagagactggtgagagaggccaacaactgcagcagccccgccggcatcctggtggacgccatgagccagaagcacctgcagatcaaccagaccttcgaggagctgagactggtgacccaggacaccgagaacgagctgaagaagctgcagcagacccaggagtacttcatcatccagtaccaggagagcctgagaatccaggcccagttcgcccagctggcccagctgagcccccaggagagactgagcagagagaccgccctgcagcagaagcaggtgagcctggaggcctggctgcagagagaggcccagaccctgcagcagtacagagtggagctggccgagaagcaccagaagaccctgcagctgctgagaaagcagcagaccatcatcctggacgacgagctgatccagtggaagagaagacagcagctggccggcaacggcggcccccccgagggcagcctggacgtgctgcagagctggtgcgagaagctggccgagatcatctggcagaacagacagcagatcagaagagccgagcacctgtgccagcagctgcccatccccggccccgtggaggagatgctggccgaggtgaacgccaccatcaccgacatcatcagcgccctggtgaccagcaccttcatcatcgagaagcagcccccccaggtgctgaagacccagaccaagttcgccgccaccgtgagactgctggtgggcggcaagctgaacgtgcacatgaaccccccccaggtgaaggccaccatcatcagcgagcagcaggccaagagcctgctgaagaacgagaacaccagaaacgagtgcagcggcgagatcctgaacaactgctgcgtgatggagtaccaccaggccaccggcaccctgagcgcccacttcagaaacatgagcctgaagagaatcaagagagccgacagaagaggcgccgagagcgtgaccgaggagaagttcaccgtgctgttcgagagccagttcagcgtgggcagcaacgagctggtgttccaggtgaagggcagagtgcccttcgccgtgcccgacaaggtgctgtggccccagctgtgcgaggccctgaacatgaagttcaaggccgaggtgcagagcaacagaggcctgaccaaggagaacctggtgttcctggcccagaagctgttcaacaacagcagcagccacctggaggactacagcggcctgagcgtgagctggagccagttcaacagagagaacctgcccggctggaactacaccttctggcagtggttcgacggcgtgatggaggtgctgaagaagcaccacaagccccactggaacgacggcgccatcctgggcttcgtgaacaagcagcaggcccacgacctgctgatcaacaagcccgacggcaccttcctgctgagattcagcgacagcgagatcggcggcatcaccatcgcctggaagttcgacagccccgagagaaacctgtggaacctgaagcccttcaccaccagagacttcagcatcagaagcctggccgacagactgggcgacctgagctacctgatctacgtgttccccgacagacccaaggacgaggtgttcagcaagtactacacccccgtgctggccaaggccgtggacggctacgtgaagccccagatcaagcaggtggtgcccgagttcgtgaacgccagcgccgacgccggcggcagcagcgccacctacatggaccaggcccccagccccgccgtgtgcccccaggccccctacaacatgtacccccagaaccccgaccacgtgctggaccaggacggcgagttcgacctggacgagaccatggacgtggccagacacgtggaggagctgctgagaagacccatggacagcctggacagcagactgagcccccccgccggcctgttcaccagcgccagaggcagcctgagctag

SEQ ID NO: 106901 - DNA, 2298 bp, Artificial Sequence
  derived and/or modified sequence
actgccatggccgggtggatccaggcacagcaactacagggcgatgccctgcggcagatgcaggtgttgtacggtcagcacttcccgatagaggtgagacattatctggcccagtggattgaaagtcagccgtgggacgctatagacctggataaccctcaagacagagcccaggccacacaactactggagggtctggtgcaggaattacaaaagaaggctgagcaccaagtgggcgaggacggattcctgctcaagatcaagctgggacactacgctacacagctgcagaagacctatgacagatgccccttggaactcgtgcgatgcatccgacatatcctatataatgaacaaaggctggtacgggaagcaaataattgttcctccccggcgggtatcctggttgacgccatgtcgcaaaagcatctccagatcaaccagaccttcgaagaactacgcttggtgactcaggatactgagaatgagctaaagaagctacagcaaacgcaagagtatttcattatccaataccaggagtctttgagaattcaggcacagttcgctcaactagcccagttgagcccgcaagagcgcctttctcgggagaccgcactccagcaaaagcaagtgtccctggaggcatggctgcagcgcgaggctcagacactgcagcagtaccgagtggaattggccgagaagcatcagaagacacttcagctcctgcgaaaacagcaaaccataatcctggatgatgagctgatccagtggaagcgcagacaacagttggccggcaatggaggccccccggagggcagcctggatgtgctccaatcatggtgcgaaaagctagcggaaatcatctggcagaacagacagcagattcgaagagccgaacatttatgccaacagctgcctataccagggccagtggaagagatgttggcagaggtgaacgccactataacagacattattagcgcccttgtgactagtacatttatcatcgaaaaacaacctccacaggtactgaaaacccaaaccaagttcgccgctaccgtcagactactcgtcgggggaaaactcaatgtccacatgaaccctccccaggtaaaagcaactattatcagcgagcagcaggccaagtcactgttgaaaaacgagaatacaagaaacgagtgctcaggagaaattctgaacaattgttgcgtgatggaatatcaccaggcaacaggcacactatccgcccactttaggaacatgagtttgaaaagaatcaagcgcgccgatagacgtggtgcagagtctgtaaccgaggagaagttcaccgtcttattcgagtcacagttttccgtcgggtccaatgagctagtctttcaagtaaagggacgggtgccctttgctgttccagacaaagtgctgtggccgcaactatgtgaggctttgaatatgaagttcaaagctgaagttcagtcaaatagaggcctcacaaaagagaatctagtgttcctggctcagaagttgttcaataatagctcctcccatttggaggattactcaggcctgtccgtctcatggtcccaattcaatagagaaaacttacctggttggaactatacattctggcaatggtttgacggggtgatggaagtactgaagaagcaccacaagccacattggaacgatggcgctattttgggctttgttaataaacagcaggctcacgatctccttatcaataaaccagatggaacatttcttctaagattcagtgattctgagattggcggaatcaccattgcatggaagttcgactcccctgaacggaacctctggaacctgaaaccttttaccaccagggacttctctattagatctctggccgatcgtcttggagatctttcttatttgatatatgttttcccggaccgaccaaaagacgaggtgttctccaaatattacacacccgtactcgccaaggccgtcgatgggtacgtcaaaccacagattaaacaggtcgtgccagagtttgtcaatgcgagcgcggatgcgggcggctcatccgccacatatatggatcaggcaccaagccctgcagtctgtcctcaagctccatataatatgtatccacagaatcctgaccatgttctagatcaggacggggagtttgaccttgatgaaacaatggatgttgcccgacacgtggaggagctactcaggaggcctatggattctctcgatagtaggctgagcccacccgccggtctgtttacttcagcccgcggatccctttcttag

SEQ ID NO: 106902 - DNA, 2298 bp, Artificial Sequence
  derived and/or modified sequence
acagccatggccggctggatccaggcccagcagctgcagggagatgccctgcggcagatgcaggtgctgtatggccagcacttccccatcgaggtgcgccactacctggcccagtggattgagagccagccctgggatgccatcgacctggacaacccccaggaccgggcccaggccacccagctgctggagggcctggtgcaggagctgcagaagaaggccgagcaccaggtgggggaggatggcttcctgctgaagatcaagctgggccactacgccacccagctgcagaagacctatgaccgctgccccctggagctggtgcgctgcatccgccacatcctgtacaatgagcagaggctggtgcgggaggccaacaactgcagcagccctgctggcatcctggtggatgccatgagccagaagcacctgcagatcaaccagacctttgaggagctgcggctggtgacccaggacacagaaaatgagctgaagaagctgcagcagacccaggagtacttcatcatccagtaccaggagagcctgcgcatccaggcccagtttgcccagctggcccagctgagcccccaggagcggctgagccgggagacagccctgcagcagaagcaggtgtccctggaggcctggctgcagcgggaggcccagaccctgcagcagtacagagtggagctggccgagaagcaccagaagaccctgcagctgctgaggaagcagcagaccatcatcctggatgatgagctgatccagtggaagaggcggcagcagctggccggaaatggaggccccccagagggcagcctggatgtgctgcagagctggtgtgagaagctggccgagatcatctggcagaaccggcagcagatccggcgggcagagcacctgtgccagcagctgcccatccctggccctgtggaggagatgctggccgaggtgaatgccaccatcacagacatcatcagcgccctggtgaccagcaccttcatcatcgagaagcagcccccccaggtgctgaagacccagaccaagtttgctgccaccgtgcggctgctggtgggcggcaagctgaatgtgcacatgaaccccccccaggtgaaggccaccatcatcagcgagcagcaggccaagagcctgctgaagaatgaaaacaccagaaatgaatgttctggagagatcctgaacaactgctgcgtgatggagtaccaccaggccaccggcaccctgagcgcccacttcaggaacatgagcctgaagaggatcaagagagctgacagaagaggagctgagagcgtgacagaggagaagttcaccgtgctgtttgagagccagttctctgtgggcagcaatgagctggtgttccaggtgaagggccgggtgccctttgctgtgcctgacaaggtgctgtggccccagctgtgtgaggccctgaacatgaagttcaaggccgaggtgcagagcaacagaggcctgaccaaggagaacctggtgttcctggcccagaagctgttcaacaacagcagcagccacctggaggactacagcggcctgtctgtgtcctggagccagttcaaccgggagaacctgcccggctggaactacaccttctggcagtggtttgatggagtgatggaggtgctgaagaagcaccacaagccccactggaatgatggagccatcctgggctttgtgaacaagcagcaggcccatgacctgctgatcaacaagccagatggcaccttcctgctgcgcttcagtgacagcgagattggaggcatcaccatcgcctggaagtttgacagccctgagaggaacctgtggaacctgaagcccttcaccacccgggacttcagcatccgcagcctggccgaccggctgggggacctgagctacctgatctacgtgtttcctgaccggcccaaggatgaggtgttcagcaagtactacacccctgtgctggccaaggctgtggatggctacgtgaagccccagatcaagcaggtggtgcctgagtttgtgaatgccagcgcagatgctgggggcagcagcgccacctacatggaccaggcccccagccctgctgtgtgcccccaggccccctacaacatgtacccccagaacccagaccacgtgctggaccaggatggagaatttgacctggatgagaccatggatgtggcccggcacgtggaggagctgctgcggcggcccatggacagcctggacagccggctgagccccccagctggcctcttcaccagcgcccggggcagcctgtcctag

SEQ ID NO: 106903 - DNA, 2298 bp, Artificial Sequence
  derived and/or modified sequence
accgccatggccggctggatccaggcccagcagctgcagggcgacgcgctaaggcagatgcaggtcctttacggccagcacttccctatcgaggtgagacactacttagctcaatggattgagtctcagccttgggacgccatagacctagacaaccctcaggaccgcgcccaggccacccagttgcttgaaggactcgtgcaggaactgcagaaaaaagcagagcatcaggtcggcgaggatggtttcctgcttaagatcaagttgggtcattacgccacacagttacagaaaacctacgacagatgtccactagagctggtgagatgcattagacacattctttacaacgagcagaggttggtcagagaagctaataattgctcaagtcctgccgggattttggtcgacgctatgtcccaaaaacatctgcagatcaatcagacctttgaggagctccgactcgtgacccaggacacagaaaacgaactgaagaagctacagcagacacaggagtacttcataatacagtatcaggagtctttaagaattcaggcccagtttgcacaactcgcccagctgtctccacaggagcggctgtctagagaaacggcactccagcagaagcaggtgagtttagaagcctggctacagcgagaagcacagacactgcagcagtacagagtcgaactagccgaaaaacaccagaagaccctgcaactgctcaggaaacagcagactattattctcgatgacgagctgatccagtggaaacgccgtcaacagttggcaggcaatggcggcccccccgaagggagtttggacgtgcttcagtcatggtgtgagaaactagccgagatcatatggcagaacagacaacagatccgccgcgccgagcacctatgccagcaattgcctattccagggcccgttgaggaaatgctcgctgaggtgaatgcgacaatcacagatatcattagcgcgttagttacctcaacctttattatagagaaacagcctccacaggttttgaaaactcagacaaaattcgcggcaactgtgcgcctcctagtaggtggaaaattgaacgtgcacatgaaccccccccaggtgaaggcaactatcatcagcgaacagcaggccaagagcctccttaaaaatgaaaatacccgtaacgagtgttctggggagatcctaaacaattgttgcgtaatggagtaccatcaggcaacagggaccttgagcgcacactttcgtaacatgtcactcaaacggatcaagagagcagaccgccgcggagccgaaagtgtgacggaagaaaaatttaccgtcctgtttgaatctcagttttcggtaggatccaacgagctggtgttccaggttaagggacgcgtgccattcgcagtccccgataaggtgctatggcctcagttgtgcgaggctttgaacatgaaattcaaggctgaagtccaatcaaatcgaggacttacaaaagaaaacctcgttttcttggcacagaagctcttcaacaattcttccagccacttggaggattacagcggactctccgtgtcctggtcccagttcaatcgcgagaatctgccaggatggaactacacgttctggcagtggttcgatggcgtcatggaggtgctcaaaaaacatcacaagccccattggaacgatggcgccattttgggctttgtcaacaaacagcaagcacacgatctgctgatcaacaagcccgacggcacttttctgttgcgtttcagtgacagtgagattggcgggatcaccattgcctggaagttcgactctcccgagaggaacttatggaaccttaagccttttacgaccagggacttctctattcgttccctcgctgaccgactcggagacctctcttatctcatttatgttttccctgataggcctaaagatgaggttttctcgaaatactatacaccagtgctggcaaaagccgttgacggttatgtgaaacctcagattaaacaggtagtgccagagtttgtgaatgctagcgctgatgcaggtgggtcttctgctacatatatggaccaagccccttctcctgctgtctgcccacaggctccatacaacatgtacccccagaacccggaccacgtgctagaccaagatggcgaattcgacctggatgagactatggatgtagcccgacacgtcgaagaactgctcagacggcctatggactcccttgattctcgactgagcccgccagctgggttgtttacgtcagccagaggatccctatcctag

SEQ ID NO: 106904 - DNA, 2298 bp, Artificial Sequence
  derived and/or modified sequence
acagctatggcgggatggattcaggctcagcagttgcagggagatgcgctgcgccagatgcaagttctgtatggacaacactttcctatcgaggttagacattatctggcccaatggatagagtcccagccttgggatgcaattgatcttgacaatccccaggatagagcacaggcgacacagctgctagaagggcttgtccaggagctccagaagaaggccgagcatcaagtgggagaggatgggttcttattaaagattaaattagggcactacgccacgcagctccagaaaacttacgaccggtgccccttggaactagtgcgctgtatccgtcacatcctctataacgagcaaagattggtgagggaggccaataattgtagcagcccggctggaatacttgtggacgctatgtctcagaagcacttacagatcaatcagacattcgaggaacttcgcctcgtgactcaggacacagaaaacgaactcaaaaaacttcaacagacacaggaatacttcatcattcagtaccaggagtcactgaggatccaggcacagttcgcacagctggctcagctgagtccccaggaaagactatccagagagaccgctctgcaacagaaacaggtgtccttagaggcatggctacagcgcgaagcccagacactgcagcagtaccgggtggagcttgccgaaaagcaccagaagaccttacagttgttgcggaaacagcagaccataattttggatgacgaactcattcaatggaagaggcgccagcagcttgccggaaatgggggtcctcctgagggctcactcgatgtactgcagtcatggtgcgaaaagctggctgaaatcatatggcagaataggcagcaaatcaggcgtgccgaacacctttgccagcagctgcctattcccggaccagttgaggagatgctcgcagaggtgaacgccaccatcactgatatcatcagcgcgttagtaacaagcacttttataatcgagaagcagcctcctcaggttctaaagacacagaccaagtttgctgctaccgtaagactgctggtgggcggaaagttaaatgtgcatatgaatccccctcaggtcaaagccacaattatcagcgagcagcaggctaaatcactcttgaagaacgaaaatacccgtaacgaatgtagcggggagattcttaataattgctgcgtgatggagtaccaccaggctaccgggactttgtcggcccacttcaggaatatgtcgcttaaaaggattaagagagccgaccgcagaggcgctgaatccgtcacagaggaaaagttcaccgttctctttgagtcccagttcagcgttggatcaaatgagcttgtgttccaagtcaagggcagggtgcctttcgccgtgcccgacaaggtgttgtggcctcagctgtgcgaggcattgaacatgaagttcaaggccgaggtgcaatctaaccgagggctgacaaaggaaaatctcgtgtttctggctcagaaactttttaataattcctcttcccacctcgaggattactccggactctccgtatcctggtcacagttcaaccgggaaaatctgccgggatggaactatactttctggcagtggttcgatggtgttatggaggttctgaagaaacatcacaaaccccactggaacgatggcgctattctcggtttcgtcaataaacagcaggcgcacgacttgctgattaacaaaccggatggaacattcctgctacgattcagtgactccgagatcggaggaatcacaattgcctggaagtttgactctcccgaacgcaacctgtggaatctgaaaccctttaccacccgggacttttctattaggagcctggccgaccggctgggcgacctctcttacctaatatacgtttttccagatcgccctaaggatgaagtttttagcaagtactatacacccgttctagccaaagcggttgatgggtatgtgaagccccagatcaaacaggtggtccctgagttcgtgaacgcgtctgccgacgccggagggagttccgccacgtacatggaccaagcaccctcacctgctgtgtgccctcaggccccttataacatgtaccctcaaaaccccgaccatgtcctggatcaggatggtgagttcgacttggacgaaaccatggatgtcgctcggcatgtggaggagttactgagacggcctatggacagcctggactctcggctgagcccacccgcagggctgtttacatcagccagaggcagtctgtcatag

SEQ ID NO: 106905 - DNA, 3671 bp, Artificial Sequence
  derived and/or modified sequence
gtaacagccgccgctgccgccgccgccaggaaccccggccgggagcgagagccgcggggcgcagagccggcccggctgccggacggtgcggccccaccaggtgaacggccatggcgggctggatccaggcccagcagctgcagggagacgcgctgcgccagatgcaggtgctgtacggccagcacttccccatcgaggtccggcactacttggcccagtggattgagagccagccatgggatgccattgacttggacaatccccaggacagagcccaagccacccagctcctggagggcctggtgcaggagctgcagaagaaggcggagcaccaggtgggggaagatgggtttttactgaagatcaagctggggcactacgccacgcagctccagaaaacatatgaccgctgccccctggagctggtccgctgcatccggcacattctgtacaatgaacagaggctggtccgagaagccaacaattgcagctctccggctgggatcctggttgacgccatgtcccagaagcaccttcagatcaaccagacatttgaggagctgcgactggtcacgcaggacacagagaatgagctgaagaaactgcagcagactcaggagtacttcatcatccagtaccaggagagcctgaggatccaagctcagtttgcccagctggcccagctgagcccccaggagcgtctgagccgggagacggccctccagcagaagcaggtgtctctggaggcctggttgcagcgtgaggcacagacactgcagcagtaccgcgtggagctggccgagaagcaccagaagaccctgcagctgctgcggaagcagcagaccatcatcctggatgacgagctgatccagtggaagcggcggcagcagctggccgggaacggcgggccccccgagggcagcctggacgtgctacagtcctggtgtgagaagttggccgagatcatctggcagaaccggcagcagatccgcagggctgagcacctctgccagcagctgcccatccccggcccagtggaggagatgctggccgaggtcaacgccaccatcacggacattatctcagccctggtgaccagcacattcatcattgagaagcagcctcctcaggtcctgaagacccagaccaagtttgcagccaccgtacgcctgctggtgggcgggaagctgaacgtgcacatgaatcccccccaggtgaaggccaccatcatcagtgagcagcaggccaagtctctgcttaaaaatgagaacacccgcaacgagtgcagtggtgagatcctgaacaactgctgcgtgatggagtaccaccaagccacgggcaccctcagtgcccacttcaggaacatgtcactgaagaggatcaagcgtgctgaccggcggggtgcagagtccgtgacagaggagaagttcacagtcctgtttgagtctcagttcagtgttggcagcaatgagcttgtgttccaggtgaagggcagggtgccatttgccgtgcctgacaaagtgctgtggccgcagctgtgtgaggcgctcaacatgaaattcaaggccgaagtgcagagcaaccggggcctgaccaaggagaacctcgtgttcctggcgcagaaactgttcaacaacagcagcagccacctggaggactacagtggcctgtccgtgtcctggtcccagttcaacagggagaacttgccgggctggaactacaccttctggcagtggtttgacggggtgatggaggtgttgaagaagcaccacaagccccactggaatgatggggccatcctaggttttgtgaataagcaacaggcccacgacctgctcatcaacaagcccgacgggaccttcttgttgcgctttagtgactcagaaatcgggggcatcaccatcgcctggaagtttgactccccggaacgcaacctgtggaacctgaaaccattcaccacgcgggatttctccatcaggtccctggctgaccggctgggggacctgagctatctcatctatgtgtttcctgaccgccccaaggatgaggtcttctccaagtactacactcctgtgctggctaaagctgttgatggatatgtgaaaccacagatcaagcaagtggtccctgagtttgtgaatgcatctgcagatgctgggggcagcagcgccacgtacatggaccaggccccctccccagctgtgtgcccccaggctccctataacatgtacccacagaaccctgaccatgtactcgatcaggatggagaattcgacctggatgagaccatggatgtggccaggcacgtggaggaactcttacgccgaccaatggacagtcttgactcccgcctctcgccccctgccggtcttttcacctctgccagaggctccctctcatgaatgtttgaatcccacgcttctctttggaaacaatatgcaatgtgaagcggtcgtgttgtgagtttagtaaggctgtgtacactgacacctttgcaggcatgcatgtgcttgtgtgtgtgtgtgtgtgtgtgtccttgtgcatgagctacgcctgcctcccctgtgcagtcctgggatgtggctgcagcagcggtggcctcttttcagatcatggcatccaagagtgcgccgagtctgtctctgtcatggtagagaccgagcctctgtcactgcaggcactcaatgcagccagacctattcctcctgggcccctcatctgctcagcagctatttgaatgagatgattcagaaggggaggggagacaggtaacgtctgtaagctgaagtttcactccggagtgagaagctttgccctcctaagagagagagacagagagacagagagagagaaagagagagtgtgtgggtctatgtaaatgcatctgtcctcatgtgttgatgtaaccgattcatctctcagaagggaggctggggttcattttcgagtagtattttatactttagtgaacgtggactccagactctctgtgaaccctatgagagcgcgtctgggcccggccatgtccttagcacaggggggccgccggtttgagtgagggtttctgagctgctctgaattagtccttgcttggctgcttggccttgggcttcattcaagtctatgatgctgttgcccacgtttcccgggatatatattctctcccctccgttgggccccagccttctttgcttgcctctctgtttgtaaccttgtcgacaaagaggtagaaaagattgggtctaggatatggtgggtggacaggggccccgggacttggagggttggtcctcttgcctcctggaaaaaacaaaaacaaaaaactgcagtgaaagacaagctgcaaatcagccatgtgctgcgtgcctgtggaatctggagtgaggggtaaaagctgatctggtttgactccgctggaggtggggcctggagcaggccttgcgctgttgcgtaactggctgtgttctggtgaggccttgctcccaaccccacacgctcctccctctgaggctgtaggactcgcagtcaggggcagctgaccatggaagattgagagcccaaggtttaaacttctctgaagggaggtggggatgagaagaggggtttttttgtactttgtacaaagaccacacatttgtgtaaacagtgttttggaataaaatatttttttc

SEQ ID NO: 106906 - protein, 315 aa, Artificial Sequence
  derived and/or modified sequence
MKLKLKNVFLAYFLVSIAGLLYALVQLGQPCDCLPPLRAAAEQLRQKDLRISQLQAELRRPPPAPAQPPEPEALPTIYVVTPTYARLVQKAELVRLSQTLSLVPRLHWLLVEDAEGPTPLVSGLLAASGLLFTHLVVLTPKAQRLREGEPGWVHPRGVEQRNKALDWLRGRGGAVGGEKDPPPPGTQGVVYFADDDNTYSRELFEEMRWTRGVSVWPVGLVGGLRFEGPQVQDGRVVGFHTAWEPSRPFPVDMAGFAVALPLLLDKPNAQFDSTAPRGHLESSLLSHLVDPKDLEPRAANCTRTESRCVTQAGVQ

SEQ ID NO: 106907 - DNA, 948 bp, Artificial Sequence
  derived and/or modified sequence
atgaagctcaagcttaagaatgtgttcctggcctactttctcgtttctatcgccggtcttctttatgccctggtgcaattgggacaaccatgcgactgcctccctccacttagagcggcagcagaacaactgcgtcagaaagacctccgaatcagccagctccaggcagaactccgacggcccccccccgcacctgctcagcccccagagcccgaggccttgccaacaatttatgtggtcacacctacctatgcccgcctagtacagaaagccgagcttgtcagactttctcagacactgagtctggtgccacgcctgcactggcttctcgttgaggatgcagagggcccgactccactggtgagtggcctgttagcggcaagcggcctgctgttcactcacctggtcgtgctgacaccgaaggcacagagactgagagagggggagccagggtgggtccacccccgcggtgtggaacagagaaataaggctttggactggcttcgaggccgtggaggagcagtcggaggcgaaaaggaccctcccccacctggtactcagggtgtggtgtatttcgccgatgatgacaacacctactccagagaactttttgaagagatgaggtggacacgcggagtctccgtctggccagtcgggctcgtcgggggactgcgcttcgagggaccacaggtccaagatggccgggtcgtcggcttccatacagcctgggaacctagtcgtccattccctgtcgatatggccggcttcgcagtcgcactgcccctcctgcttgacaaacccaacgctcagttcgattccactgcaccccgggggcacctagagagttcactcctgagtcacttggtggacccaaaggacctggagccacgggcggctaactgcaccagaactgagtctcgatgtgttactcaggccggggtccagtag

SEQ ID NO: 106908 - DNA, 948 bp, Artificial Sequence
  derived and/or modified sequence
atgaagctgaagctgaagaatgtgttcctggcctacttcctggtgtccattgctggcctgctgtatgccctggtgcagctgggccagccctgtgactgcctgccccccctgcgggctgctgctgagcagctgcggcagaaggacctgcgcatcagccagctgcaggccgagctgcggcggcccccaccagccccagcccagcccccagagcctgaggccctgcccaccatctacgtggtgacccccacctacgcccggctggtgcagaaggccgagctggtgcggctgagccagaccctgagcctggtgccccggctgcactggctgctggtggaggatgctgagggccccacccccctggtgtctggcctgctggccgccagcggcctgctcttcacccacctggtggtgctgacccccaaggcccagaggctgcgggagggggagcccggctgggtgcacccccggggcgtggagcagaggaacaaggccctggactggctgcggggccggggcggcgctgtgggcggggagaaggaccccccacctcctggcacccagggcgtggtgtactttgctgatgatgacaacacctacagccgggagctgtttgaggagatgcgctggacccggggcgtgtctgtgtggcctgtgggcctggtgggcggcctgcgctttgagggcccccaggtgcaggacggccgggtggtgggcttccacacagcctgggagcccagccggcccttccctgtggacatggccggctttgctgtggccctgcccctgctgctggacaagcccaatgcccagtttgacagcacagccccccggggccacctggagagcagcctgctgagccacctggtggaccccaaggacctggagccccgggccgccaactgcaccaggacagagagccgctgtgtgacccaggccggcgtgcagtag

SEQ ID NO: 106909 - DNA, 948 bp, Artificial Sequence
  derived and/or modified sequence
atgaagctgaagctgaagaacgtgttcctggcctacttcctggtgagcatcgccgggcttctgtatgcactcgtccagctaggacaaccttgtgactgcctgccaccgctgcgcgctgccgcagagcagcttcgacaaaaggacctaaggatcagccaacttcaggcagaactccggcggccacccccagccccagcccagccacctgagccagaggccctgccgactatttacgtagtaacgccaacctatgcccgccttgtgcaaaaggctgagctcgtgagattgtctcagacactctcacttgtgcctagactgcactggttgctggtggaggatgctgagggccctactcccttggtctcaggcctgctggcggcttcaggcttactgtttacccacctcgtggtacttactcctaaggctcagcgactgcgggagggagagccaggatgggtccacccacgcggtgtggagcaacggaacaaggctcttgattggctgagaggccgcggcggagcggtcggtggtgagaaggatccaccacctccggggacacagggcgtcgtgtatttcgccgacgatgacaacacgtatagccgagaattgtttgaggaaatgcgatggacacgcggggtgagtgtgtggcctgtggggctcgtgggcggcttaaggtttgagggcccgcaggtccaggacggtcgagtggtggggttccataccgcttgggagccctctaggccatttccggttgacatggcaggtttcgccgtggccctcccactgctgctcgacaaacctaatgctcaattcgactcaacggctcccagaggtcatcttgagtcctccttgttgagtcatctagtagatcccaaggatctcgaaccccgcgccgccaattgtacacggacagagagccgctgcgtgactcaggcaggtgttcaatag

SEQ ID NO: 106910 - DNA, 948 bp, Artificial Sequence
  derived and/or modified sequence
atgaaactcaagctcaagaacgtcttcttagcgtattttttggttagtatcgctgggcttctatatgccctggtgcagctgggacagccatgtgattgcttgccccctctgcgcgctgcagcagaacagttgcgtcaaaaagatttgaggatcagccagctacaggctgaactaaggagaccccctcccgctccggctcaacccccagagcccgaggcgctcccgaccatttacgtggttaccccgacatatgcgagactggtgcaaaaggcagaactggtccgcctgtctcagacactatccctcgtgcctaggctccattggttgctggtggaagatgccgaagggccaacccctctggtgagcggcctgttggcagccagtggcctgttgttcactcatctcgtggttcttaccccaaaagcgcagcgactgcgggagggcgagcctgggtgggtacatccaaggggggtcgagcaacgcaataaagctctagactggctgcgtgggagggggggagctgtcggtggcgagaaggacccccctccgcctgggacacaaggggttgtatacttcgctgacgatgataatacttactcacgagaactgttcgaggaaatgcggtggactaggggcgtgtccgtgtggcctgtggggctggtaggaggactgcgctttgaaggacctcaagttcaggatgggcgagtggtgggattccacaccgcctgggagcccagtcgtccttttcccgtggacatggccggtttcgccgtggctctgcccctgctattggacaagcccaacgctcagtttgattctacagctcccaggggacacctggaatcctccctgttgtcccatctggtggacccgaaagatctcgagccgagggctgccaattgcaccaggactgaaagcaggtgcgtgactcaggccggagtacagtag

SEQ ID NO: 106911 - DNA, 1120 bp, Artificial Sequence
  derived and/or modified sequence
agaccccgcctgctcgggcgcgggcggcggcgcggccatgaagctgaagctgaagaacgtgtttctcgcctacttcctggtgtcgatcgccggcctcctctacgcgctggtacagctcggccagccatgtgactgccttcctcccctgcgggcagcagccgagcagctacggcagaaggatctgaggatttcccagctgcaagcggaactccgacggccaccccctgcccctgcccagccccctgaacccgaggccctgcctactatctatgttgttacccccacctatgccaggctggtacagaaggcagagctggtacgactgtcccagacactgagcctggtgccccggctgcattggctgctggtggaggatgctgagggtcccaccccgctggtctcagggctgctggctgcctctggcctcctcttcacacacctggtggtcctcacgcccaaagcccagcggcttcgggagggcgagcctggctgggttcatccccgtggtgtcgagcagcggaacaaggccctggactggctccggggcagagggggtgctgtgggtggggagaaggacccaccaccaccagggacccaaggagtcgtctactttgctgacgatgacaacacctacagccgggagctgtttgaggagatgcgctggacccgtggtgtctcagtgtggcctgtggggctggtgggcggcctgcgattcgagggccctcaggtacaggacggccgggtagtgggcttccacacagcatgggagcccagcaggcccttccctgtggatatggctggatttgccgtggccctgcccttgctgttagataagcccaatgcccaatttgattccaccgctccccggggccacctggagagcagtcttctgagccaccttgtggatcccaaggacctggagccacgggctgccaactgcactcggacagagtctcgctgtgtcacccaggctggagtgcagtagcgcaatcttggcttagcgcaagctccgcctcccgggttcacaccattctcctgcctcagcctcccaagtagctgggactacaggcacccgctaccacgcccggctaatttttttgtgtttttagtagtgacgggg

SEQ ID NO: 106912 - DNA, 948 bp, Artificial Sequence
  derived and/or modified sequence
atgaagctgaagctgaagaacgtgttcctggcctacttcctggtgagcatcgccggcctgctgtacgccctggtgcagctgggccagccctgcgactgcctgccccccctgagagccgccgccgagcagctgagacagaaggacctgagaatcagccagctgcaggccgagctgagaagacccccccccgcccccgcccagccccccgagcccgaggccctgcccaccatctacgtggtgacccccacctacgccagactggtgcagaaggccgagctggtgagactgagccagaccctgagcctggtgcccagactgcactggctgctggtggaggacgccgagggccccacccccctggtgagcggcctgctggccgccagcggcctgctgttcacccacctggtggtgctgacccccaaggcccagagactgagagagggcgagcccggctgggtgcaccccagaggcgtggagcagagaaacaaggccctggactggctgagaggcagaggcggcgccgtgggcggcgagaaggacccccccccccccggcacccagggcgtggtgtacttcgccgacgacgacaacacctacagcagagagctgttcgaggagatgagatggaccagaggcgtgagcgtgtggcccgtgggcctggtgggcggcctgagattcgagggcccccaggtgcaggacggcagagtggtgggcttccacaccgcctgggagcccagcagacccttccccgtggacatggccggcttcgccgtggccctgcccctgctgctggacaagcccaacgcccagttcgacagcaccgcccccagaggccacctggagagcagcctgctgagccacctggtggaccccaaggacctggagcccagagccgccaactgcaccagaaccgagagcagatgcgtgacccaggccggcgtgcagtag

SEQ ID NO: 106913 - protein, 476 aa, Artificial Sequence
  derived and/or modified sequence
MAAVATCGSVAASTGSAVATASKSNVTSFQRRGPRASVTNDSGPRLVSIAGTRPSVRNGQLLVSTGLPALDQLLGGGLAVGTVLLIEEDKYNIYSPLLFKYFLAEGIVNGHTLLVASAKEDPANILQELPAPLLDDKCKKEFDEDVYNHKTPESNIKMKIAWRYQLLPKMEQIGPVSSSRFGHYYDASKRMPQELIEASNWHGFFLPEKISSTLKVEPCSLTPGYTKLLQFIQNIIYEEGFDGSNPQKKQRNILRIGIQNLGSPLWGDDICCAENGGNSHSLTKFLYVLRGLLRTSLSACIITMPTHLIQNKAIIARVTTLSDVVVGLESFIGSERETNPLYKDYHGLIHIRQIPRLNNLICDESDVKDLAFKLKRKLFTIEWVQDNYLRQERNIYPPGFSYLLKQKDSAWGEGSLQHSTFLMSFLAKATAFASRLVRHSEPLKQNGSGRIRQAAGPRLWHDGRRQEAPGLLGIPP

SEQ ID NO: 106914 - DNA, 1431 bp, Artificial Sequence
  derived and/or modified sequence
atggcagccgtggctacttgcgggagcgtggctgcaagtaccggctccgcggtggctacagcatccaaatcaaatgtgacatcgtttcagcgcagaggcccaagggcatcagtcactaatgactcaggacccagattggtatcaatcgcgggaacacgcccttcggttcgcaacggccagctgttggtgagcactggtcttcccgccttagaccagctgctcggcggcggcctggctgttgggacagtgctgctgatcgaggaggacaagtacaatatctattcgcctttattgttcaagtactttcttgcagagggcattgtcaacgggcacacgctgctggtagcatccgctaaggaagatccggcaaatatattgcaggaactgcctgctcctctcctggacgataagtgtaaaaaggagtttgatgaagatgtctacaatcacaagactcctgagtcaaacataaaaatgaagattgcatggagataccagctcctgcccaagatggaacagattggccccgtgtcctcttcaagatttgggcactactacgacgctagtaagcgcatgcctcaggagttgatcgaagcgtctaactggcacggatttttcttacctgaaaaaattagctctaccctaaaggtggaaccttgcagtcttacacctgggtatacaaaactgcttcagtttattcaaaacatcatttacgaagaggggttcgacgggagcaatcctcaaaaaaaacagcgcaacattcttagaattggcatccagaacttggggagcccattgtggggggacgatatttgttgtgcagaaaacggagggaactctcattcacttactaagttcttgtatgtgctgagaggactcctaagaacctccctgagcgcctgtataataacaatgcctactcatctgattcaaaataaagcaatcatcgccagagtgactaccctgtctgacgtggtggtaggtcttgagagctttatcggctcagaacgagagacaaatcctctgtacaaggactaccacgggctgatccatattcggcagatcccccggctgaacaacctgatatgtgatgaatccgacgtcaaggatctagcctttaagctgaagcggaagctgtttacgatcgagtgggttcaagataactatctccgacaggaacgaaatatctatccccccgggttttcctaccttctgaaacagaaagattctgcatggggagaaggctctttgcagcatagtacctttctcatgtccttcctagcaaaagcaactgctttcgcaagccgcctggttagacattccgaacccttaaaacaaaatgggtctgggaggattcggcaggcggctggaccccgactatggcatgacggccggcggcaggaagcccccgggctcttaggaattccaccctag

SEQ ID NO: 106915 - DNA, 1431 bp, Artificial Sequence
  derived and/or modified sequence
atggctgctgtggccacctgtggctctgtggccgccagcacaggcagcgctgtggccacagccagcaagagcaatgtgaccagcttccagaggcggggcccccgggcctctgtgaccaatgacagcggcccccggctggtgtccattgctggcacccggcccagcgtgagaaatggccagctgctggtgtccacaggcctgcctgccctggaccagctgctgggcggcggcctggccgtgggcaccgtgctgctgattgaggaggacaagtacaacatctacagccccctgctcttcaagtacttcctggccgagggcatcgtgaatggccacaccctgctggtggccagcgccaaggaggaccctgccaacatcctgcaggagctgcctgcccccctgctggatgacaagtgcaagaaggagtttgatgaagatgtgtacaaccacaagaccccagagagcaacatcaagatgaagatcgcctggagataccagctgctgcccaagatggagcagatcggccctgtgagcagcagcagatttggccactactatgatgccagcaagaggatgccccaggagctgattgaggccagcaactggcacggcttcttcctgcctgagaagatcagcagcaccctgaaggtggagccctgcagcctgaccccaggctacaccaagctgctgcagttcatccagaacatcatctatgaggagggctttgatggcagcaacccccagaagaagcagaggaacatcctgcgcatcggcatccagaacctgggcagccccctgtggggagatgacatctgctgtgccgagaatggaggcaacagccacagcctgaccaagttcctgtatgtgctgcggggcctgctgcggaccagcctgagcgcctgcatcatcaccatgcccacccacctgatccagaacaaggccatcatcgcccgggtgaccaccctgagtgatgtggtggtgggcctggagagcttcatcggcagcgagcgggagaccaaccccctgtacaaggactaccacggcctcatccacatccggcagatcccccggctgaacaacctgatctgtgatgaaagtgatgtgaaggacctggccttcaagctgaagaggaagctgttcaccatcgagtgggtgcaggacaactacctgcggcaggagaggaacatctacccacctggcttctcctacctgctgaagcagaaggacagcgcctggggcgagggcagcctgcagcacagcaccttcctgatgtccttcctggccaaggccacagcctttgccagccggctggtgcgccacagcgagcccctgaagcagaatggcagcggccgcatccggcaggccgccggcccccggctgtggcatgatggccggcggcaggaggcccctggcctgctgggcatccccccatag

SEQ ID NO: 106916 - DNA, 1431 bp, Artificial Sequence
  derived and/or modified sequence
atggccgccgtggccacctgcggcagcgtggccgccagcaccggctctgccgttgctaccgcttctaagtctaatgtgaccagttttcagcgccggggccctagagcttctgtgacaaacgattccggcccgcggctcgtttccattgcaggtacccgtccctcagtgaggaatggccagttgctggtgtctaccggactgccagccctggaccagcttctgggggggggactagccgtgggcacggtgctgctgatcgaagaagacaagtacaatatatacagccctctcttgtttaaatactttttagcagaaggcatcgtaaatgggcacactttgttagtggcttccgctaaggaggatccagccaacatcctccaggaactccccgctcctttgcttgacgataagtgtaagaaggagtttgacgaagacgtttacaaccacaaaactcctgagtctaacatcaaaatgaagatagcatggcgctatcagctgctgcctaaaatggagcagataggacccgtttcctcaagtcggttcggacattactacgatgcaagcaaaagaatgccacaagaactgatcgaagcttcaaattggcacgggttttttctccctgagaagatatcctcgacgttgaaagtcgaaccatgctcgctcactccgggctatacgaagctgctgcagttcatccaaaacatcatttatgaggaaggcttcgacggctccaatccccagaagaagcagcgcaacatcttgaggattggcattcaaaacttagggtctccactttggggagacgacatttgttgtgctgagaacggcggcaacagccactctctgacaaaattcctctatgtgttgcgaggcctccttaggacttcattgtctgcatgcattattactatgcctactcacttgatacaaaacaaagccattattgcccgcgtgaccacgctgtcagatgtcgttgttggcctggaatcattcataggctccgaacgcgagaccaatcctttatataaagactaccacgggctcatccacatccgacaaatcccaaggctgaacaatctgatctgtgacgaatccgatgtaaaagacctagctttcaaactgaagcgaaagctgtttacaattgagtgggttcaggacaactacctgaggcaggaacggaacatctatcctcccgggttctcctaccttttaaagcaaaaggacagtgcctggggcgagggctcccttcagcattcaactttcctgatgtcttttctggctaaagcaaccgcttttgctagcaggctcgtcagacactcagaacctctcaaacagaacggcagcggaagaatccgtcaggctgctggaccacgcctctggcacgacggacgccgtcaagaagctccagggctgctgggtattcctccctag

SEQ ID NO: 106917 - DNA, 1431 bp, Artificial Sequence
  derived and/or modified sequence
atggctgctgtggccacatgtgggagcgtggccgctagcacaggctccgccgtggcaaccgccagcaaaagcaatgtgacttcattccagcgccgaggccctcgagcatcagtcaccaacgatagtggtccacggcttgtgtctattgccggtactcggccatctgtcaggaatgggcagctgctggtttctaccggactgccagcacttgatcaactgcttgggggagggcttgccgtcggcaccgtactgctaattgaggaagacaaatacaacatttattcaccgctcttatttaagtacttcctcgcagagggcatagtgaatggtcacacgctgctggtggcctcagctaaagaggatcctgcaaatattctccaggagctccctgcgcctctgctggacgacaagtgtaagaaggagtttgacgaagatgtctacaaccacaaaaccccggagtcaaacattaagatgaaaatcgcatggcgctatcagttacttcccaagatggaacagattggtcctgtgtcgagcagcagattcggccattattacgatgcttcaaaacgaatgccacaggaactgatcgaggccagtaattggcacggtttcttccttccagagaaaatctcttccacactgaaggtggaaccctgctcattgacacctggctataccaagctcttacagttcatccagaatattatttacgaggagggctttgacgggagcaacccccagaaaaagcagcgtaacattctgaggatcgggatacagaacctaggctcacctttatggggggacgatatttgctgcgctgagaatggagggaactctcactctttaaccaagttcctgtacgtacttaggggcctgttgcgtaccagtttatctgcctgtattatcacaatgccaactcacctaatccagaacaaagcaatcattgcacgagtgactaccctgtcggacgtggttgtcggtcttgaaagctttattgggtcggagagggagacgaacccactgtataaggattaccatggcctcattcatatccggcagattccaagacttaataatctgatctgcgatgagagtgatgttaaggacctagcctttaagctaaagcgcaagctgttcaccatcgaatgggttcaggacaactatctgcggcaggagagaaatatctatcccccagggttctcctatttgctcaaacaaaaggatagcgcttggggggagggatccttacaacactctacctttttaatgtcattccttgcaaaggccaccgctttcgccagtcgactggtgcggcattcagagcctctcaagcagaacggcagcgggagaatcaggcaggccgctggccctcgtctgtggcacgacggtaggaggcaagaggctcccggactgctcgggattccgccttag

SEQ ID NO: 106918 - DNA, 1431 bp, Artificial Sequence
  derived and/or modified sequence
atggccgccgtggccacctgcggcagcgtggccgccagcaccggcagcgccgtggccaccgccagcaagagcaacgtgaccagcttccagagaagaggccccagagccagcgtgaccaacgacagcggccccagactggtgagcatcgccggcaccagacccagcgtgagaaacggccagctgctggtgagcaccggcctgcccgccctggaccagctgctgggcggcggcctggccgtgggcaccgtgctgctgatcgaggaggacaagtacaacatctacagccccctgctgttcaagtacttcctggccgagggcatcgtgaacggccacaccctgctggtggccagcgccaaggaggaccccgccaacatcctgcaggagctgcccgcccccctgctggacgacaagtgcaagaaggagttcgacgaggacgtgtacaaccacaagacccccgagagcaacatcaagatgaagatcgcctggagataccagctgctgcccaagatggagcagatcggccccgtgagcagcagcagattcggccactactacgacgccagcaagagaatgccccaggagctgatcgaggccagcaactggcacggcttcttcctgcccgagaagatcagcagcaccctgaaggtggagccctgcagcctgacccccggctacaccaagctgctgcagttcatccagaacatcatctacgaggagggcttcgacggcagcaacccccagaagaagcagagaaacatcctgagaatcggcatccagaacctgggcagccccctgtggggcgacgacatctgctgcgccgagaacggcggcaacagccacagcctgaccaagttcctgtacgtgctgagaggcctgctgagaaccagcctgagcgcctgcatcatcaccatgcccacccacctgatccagaacaaggccatcatcgccagagtgaccaccctgagcgacgtggtggtgggcctggagagcttcatcggcagcgagagagagaccaaccccctgtacaaggactaccacggcctgatccacatcagacagatccccagactgaacaacctgatctgcgacgagagcgacgtgaaggacctggccttcaagctgaagagaaagctgttcaccatcgagtgggtgcaggacaactacctgagacaggagagaaacatctacccccccggcttcagctacctgctgaagcagaaggacagcgcctggggcgagggcagcctgcagcacagcaccttcctgatgagcttcctggccaaggccaccgccttcgccagcagactggtgagacacagcgagcccctgaagcagaacggcagcggcagaatcagacaggccgccggccccagactgtggcacgacggcagaagacaggaggcccccggcctgctgggcatccccccctag

SEQ ID NO: 106919 - DNA, 1679 bp, Artificial Sequence
  derived and/or modified sequence
actggaggctctaagatggcggcagtggcaacctgcggtagtgttgccgcgagtactgggtctgcagtggcgacagccagcaagagcaacgtcaccagtttccagaggaggggtcctagagccagcgtgaccaacgacagcggccctcgactggtgtccattgcgggcacgcgaccgtcggtgcggaatggacagctgctggtatcaaccgggctcccagccctagaccagctcttaggtggaggtttagccgttggaacagttcttctaattgaggaggataaatataatatttactcacctttgctcttcaagtatttcctggcagaaggaattgtcaatgggcatactttgttggttgcatctgctaaagaggatcctgccaacattttacaggaacttccagcaccattacttgatgataaatgtaaaaaggaatttgatgaagatgtatacaatcataaaacaccagaatctaatattaagatgaaaatagcttggcgttaccagttattacccaagatggagcagattggaccagtatcatcttcaagatttggtcactattatgatgcatcaaaaagaatgccacaagaactaattgaggcttcaaattggcatggattttttcttccagagaaaatatcttcaactctcaaagtagaaccctgttctttgacccctggctacacaaagctgcttcagtttatccagaacatcatttatgaggaaggatttgatggatccaatcctcagaaaaaacagagaaacattttaagaataggaattcagaatcttggctcacctttatggggagacgatatttgctgtgcagaaaatggtggcaacagtcacagccttaccaagttcctctatgttctccgtggtcttctgagaacctctctttcagcctgcatcatcacaatgccaacacatctgatccagaataaagccattattgcccgtgtcacaaccttgtcagatgtagtagttggtctggaatcatttattggttctgagagagaaactaacccattgtataaggattatcatggattgattcatatacggcagattcctcggcttaataacttgatctgtgatgaatcagatgtcaaagacttagcttttaaattaaaaaggaagctattcaccattgagtgggtgcaagacaactacttgagacaagagaggaacatttatcctccaggcttctcatacttactcaagcagaaagactctgcatggggagaaggttctttacagcattccacatttttaatgagcttccttgcaaaggcgactgcatttgcctccagacttgtcagacacagtgagccgctcaagcaaaatggatctggcagaatccgccaagcggctgggcccaggctgtggcatgatggccggaggcaagaagcacctggacttctagggattcctccttagtcgctgcatgcagaattctatgacactctaattatgattgctaatagcttatgtaaatatttttcttaacaatttgaccctccactccttgaaaaacacaggattataaaatggtgccgccatttctcattttttaactttttacagaactagcacagcagaaatacttttaaatttttccttcatgctctagagaaaataattttatttttaaataaacgccaaaaaatgtc

SEQ ID NO: 106920 - protein, 183 aa, Artificial Sequence
  derived and/or modified sequence
MCATTLGTTSWATSMSSSGGRRMESGPWLNSVTAGSTGRLCTGMYPRWLLQLHASAAHFPEPPEAALWAGTQAQVPQDQPAMSPHVLRPLYPQMSLTLSPSNHVPKNFFFFFFFEMEPHSVAQAGVHWHHLGSWQLPPPGFKQFSASASQIAGITGTCHHARLIFVFLVEMGFHHLGQAGLNS

SEQ ID NO: 106921 - protein, 535 aa, Artificial Sequence
  derived and/or modified sequence
MAAVATCGSVAASTGSAVATASKSNVTSFQRRGPRASVTNDSGPRLVSIAGTRPSVRNGQLLVSTGLPALDQLLGGGLAVGTVLLIEEDKYNIYSPLLFKYFLAEGIVNGHTLLVASAKEDPANILQELPAPLLDDKCKKEFDEDVYNHKTPESNIKMKIAWRYQLLPKMEIGPVSSSRFGHYYDASKRMPQELIEASNWHGFFLPEKISSTLKVEPCSLTPGYTKLLQFIQNIIYEEGFDGSNPQKKQRNILRIGIQNLGSPLWGDDICCAENGGNSHSLTKFLYVLRGLLRTSLSACIITMPTHLIQNKAIIARVTTLSDVVVGLESFIGSERETNPLYKDYHGLIHIRQIPRLNNLICDESDVKDLAFKLKRKLFTIEAGVQWHDLGSRQPRLLGSSNSPASASLVAGITGAHHHTQLIFVFLVEMGFHHVGQAGLELLTSGDSSASASQSAGITGMSYRARPRALYFKENKSKVGARQLLETREEHLSSRLLILTQAERLCMGRRFFTAFHIFNELPCKGDCICLQTCQTQ

SEQ ID NO: 106922 - DNA, 552 bp, Artificial Sequence
  derived and/or modified sequence
atgtgcgccaccaccctgggcaccaccagctgggccaccagcatgagcagcagcggcggcagaagaatggagagcggcccctggctgaacagcgtgaccgccggcagcaccggcagactgtgcaccggcatgtaccccagatggctgctgcagctgcacgccagcgccgcccacttccccgagccccccgaggccgccctgtgggccggcacccaggcccaggtgccccaggaccagcccgccatgagcccccacgtgctgagacccctgtacccccagatgagcctgaccctgagccccagcaaccacgtgcccaagaacttcttcttcttcttcttcttcgagatggagccccacagcgtggcccaggccggcgtgcactggcaccacctgggcagctggcagctgcccccccccggcttcaagcagttcagcgccagcgccagccagatcgccggcatcaccggcacctgccaccacgccagactgatcttcgtgttcctggtggagatgggcttccaccacctgggccaggccggcctgaacagctag

SEQ ID NO: 106923 - DNA, 552 bp, Artificial Sequence
  derived and/or modified sequence
atgtgcgccactaccctgggcactacctcttgggctacctccatgtcgtcttccggcggccgcaggatggagtcgggcccttggctgaattctgtgacggccggaagcaccggtcggttatgcaccggtatgtatcccagatggcttttgcaattgcatgcctccgccgcccattttcctgaacccccagaggcagcactatgggctggaacgcaggctcaggttcctcaagaccagccagctatgtctccgcatgttctgaggcccctgtaccctcagatgtcgctgactctgagcccgtcaaaccacgtgcccaagaactttttcttttttttcttttttgaaatggaaccgcactctgtcgctcaagcaggggtgcactggcaccacctgggatcttggcagctcccgcctcctggcttcaaacagttctcagccagcgcgtcgcaaatcgccggcataaccggaacgtgccaccacgcccggctgattttcgtgttcctcgtggaaatgggctttcatcacctgggacaggcaggcctcaattcttag

SEQ ID NO: 106924 - DNA, 552 bp, Artificial Sequence
  derived and/or modified sequence
atgtgtgccaccaccctgggcaccacctcctgggccacctccatgagcagcagcggcggccgcaggatggagagcggcccctggctgaacagcgtgacagctggcagcacaggccgcctgtgcaccggcatgtacccccgctggctgctgcagctgcacgccagcgctgcccacttccctgagcccccagaggccgccctgtgggccggcacccaggcccaggtgccccaggaccagcctgccatgagcccccacgtgctgcggcccctgtacccccagatgagcctgaccctgagccccagcaaccacgtgcccaagaacttcttcttcttcttcttctttgagatggagccccacagcgtggcccaggccggcgtgcactggcaccacctgggctcctggcagctgcccccacctggcttcaagcagttcagcgccagcgccagccagattgctggcatcaccggcacctgccaccacgcccggctcatctttgtgttcctggtggagatgggcttccaccacctgggccaggccggcctgaacagctag

SEQ ID NO: 106925 - DNA, 552 bp, Artificial Sequence
  derived and/or modified sequence
atgtgcgccaccaccctgggcaccaccagctgggccaccagcatgtccagttctggcgggcgtaggatggaaagcggcccctggttaaattctgttaccgccgggtccactggacgactgtgtaccgggatgtatccaagatggctgttgcagctgcacgcgagcgccgcccacttccctgagcccccagaggctgccctctgggccggcacacaggcccaggtgccacaggatcaacccgcaatgtccccccacgtgctgagacccctctacccgcagatgtcacttacattgagcccaagcaatcacgtacccaaaaacttcttctttttcttctttttcgagatggagccccactcagtggcacaggccggggtgcattggcaccacctgggaagctggcagctgccccctccaggatttaagcagttcagcgcatccgcatctcaaatcgcaggaatcactggcacttgccatcacgcgagacttattttcgtattcctggtggaaatgggctttcaccacctggggcaggccggcttaaactcctag

SEQ ID NO: 106926 - DNA, 552 bp, Artificial Sequence
  derived and/or modified sequence
atgtgtgcgactactcttggtacaactagttgggcaacgtctatgtcttcctcgggaggcagaaggatggagtcaggaccctggcttaattcagtcaccgccggtagtactgggaggctgtgtaccggaatgtatccgagatggttattgcaactccacgcgtctgcagcccatttccctgaaccacccgaggccgcattgtgggcagggactcaagcacaggtgccacaggatcagcctgccatgtcaccgcacgtgctgaggcccctatacccccagatgtcactcacactgagtccctctaaccatgtgcctaaaaactttttctttttcttcttcttcgagatggaacctcacagtgtcgcacaagccggagtgcactggcatcacctaggaagttggcagctgccaccgccaggatttaaacagttctctgcctccgcatcacagatcgccggaatcaccggcacctgccaccatgctagattgatcttcgtgttcctggttgagatgggttttcatcacctcggccaagcaggtctgaatagttag

SEQ ID NO: 106927 - DNA, 420 bp, Artificial Sequence
  derived and/or modified sequence
atctgccaccacacccagctgatcttcgtgttcctgggcttctacctgttcatctacctgttcatcgacggcgtgctgctgtgctgccccggctggagcgccgtggtgcagagctggctgaccgccaccagcgccagccaggtggccggcatcaccggcatgcaccaccacgcccagctgatcttcgtgttcctggtggagatgggcttccaccacgtgggccaggccggcctggagctgctgaccagcggcgacccccccgccagcgccagccagagcaccggcatcaccggcgtgagccactgcaccagacccaacttctgcatcttcagcagagacggcgtgagcccctgctggcccggctggagcagaacccccgacctggtgatcagcgcccacctgggcctgcccaagtgctag

SEQ ID NO: 106928 - DNA, 354 bp, Artificial Sequence
  derived and/or modified sequence
gacagagtgctgctgtgccaccccggctggagcgccatgaccagaagcagactgaccgccaccagcgccagccagctggccggcatcaccggcacccaccaccacgtgtggctgagcttcgtgttcctggtggagatgggcatccaccacgtgggccagaccggcctggagctgcccaccagcggcgacctgcccaccagcgccacccagagcgccggcatcaccggcgtgggccactgcagcagacccgaggaggtgctgttcttcagagacggcgtgagcccctgctggagcggctggagccagacccccggcctgaagcccagcagccacctgggcctgcccaagtgctag

SEQ ID NO: 106929 - DNA, 693 bp, Artificial Sequence
  derived and/or modified sequence
atggagaaaccccgattatatcagaaatataaaatttccagggtatggtggcggctgccagttatacctgcgactggggaggccgaagataacaggctgaaccccgaggggcgggggtgcggtgagcctaggtcacgtcactgtactccagcgtggacaaccactgccaagctccatctgaaaacaatcatttctctccagcctcttaacatgtaccaaatggagccaggcgtgggctctattcggacatccccagcccttcaatcacctccagctctgacccgcggcccgagcgcctgggatacagcaatccgcaaagccctaagcttcggcgtgggtctgggagtcctcgtgctcgtctgcctgttttatcacttcgtgacactggcgcctatcctgcagtttgcttcattgccctgcctgctggaagcaggcgctcagatgagcaggcaccccgttacgacgcaggtttgtgtgatgccggctcggctgtccttaggatcgggtatatctcgaaatctgctcagactgagcgtctgtcacttcaccctacttcttcctttcagatctctgcgcccttgtcccctaagctcacgtgacatggtcctgagctatgagctctggttgctgtgcgacttttacatcgcaccccccgatagtagtgggtcaggcatctgtaaaaaggcaatctag

SEQ ID NO: 106930 - DNA, 420 bp, Artificial Sequence
  derived and/or modified sequence
atctgccatcacacgcaattgatcttcgtattcctggggttctacctcttcatctatctcttcatcgatggagtgttgctctgctgtcctgggtggtcggctgtcgtgcaatcatggctgactgcaaccagtgccagtcaggtggccggtattacggggatgcaccaccacgcgcagctgatttttgtctttctggtagagatgggctttcatcatgttggccaggccggtctcgagctcctgacgtccggcgatccacccgcgtctgctagccagtccacggggatcactggggtttcacactgcacacgtcccaatttctgcattttctcgagggatggggtgtccccctgctggccaggctggtccaggaccccggacctggtgatatccgcgcacttagggttgcccaagtgttag

SEQ ID NO: 106931 - DNA, 420 bp, Artificial Sequence
  derived and/or modified sequence
atttgccaccacactcagctaatttttgttttcctagggttctatctcttcatctacctgtttattgacggcgtgctgctgtgctgcccaggttggtccgcagtggtccaatcttggctgaccgcaacttctgccagtcaggtggctggaatcacaggtatgcaccaccacgcacaactgatcttcgtatttcttgtggaaatgggcttccatcacgtcggacaggccgggctggagctccttaccagcggagacccacccgccagtgcaagccagtccactgggatcactggtgtaagtcactgcacccggcctaacttctgtatcttttcccgcgatggcgtgagtccgtgttggccagggtggtcgaggacaccagacttggtgatatcagcccacttggggctaccaaagtgttag

SEQ ID NO: 106932 - DNA, 420 bp, Artificial Sequence
  derived and/or modified sequence
atatgccaccacactcagctgatttttgtgtttcttggcttttacttgttcatttatctgtttatcgatggggtgctgttgtgctgccccgggtggtccgctgtggtccagtcatggttaaccgccactagcgcttcacaggtcgccggaataaccgggatgcatcatcacgcacaattgatcttcgtgttcctcgtcgagatgggattccatcacgttgggcaggcagggcttgagctgctgacatctggcgacccacccgcttccgcttctcagtccaccggcattaccggggtgtcacattgcaccagacctaatttttgcatattttctcgcgatggcgtatccccgtgctggccgggctggagccggactcccgacctggtcatcagtgctcatctaggcttaccaaagtgctag

SEQ ID NO: 106933 - DNA, 354 bp, Artificial Sequence
  derived and/or modified sequence
gaccgcgtcttattgtgtcatcctggatggagcgccatgactagaagccgactgactgcaaccagcgcttctcagctggcaggaatcactggtacgcatcaccacgtgtggctgagttttgtgttcctggtggagatgggaattcatcacgtagggcaaactggactagagctgccaacgtctggcgatctgccaactagcgccacgcagtcagccggaataaccggagtcgggcactgttctcgaccagaagaggtgctgttctttcgggacggggtgtccccttgctggagtggctggagccagacaccagggctgaaaccctcgagtcacctgggattaccaaagtgctag

SEQ ID NO: 106934 - DNA, 693 bp, Artificial Sequence
  derived and/or modified sequence
atggagaagccccggctgtaccagaagtacaagatcagccgggtgtggtggaggctgcccgtcatcccagccactggagaggccgaggacaaccggctgaaccctgagggccggggctgtggggagcccaggagccgccactgcaccccagcctggaccaccacagccaagctgcacctgaagaccatcatcagcctgcagcccctgaacatgtaccagatggagcccggggtgggcagcatccgcaccagccctgccctgcagagccccccagccctgacccggggccccagcgcctgggacacagccatcaggaaggccctgagctttggagtgggcctgggcgtgctggtgctggtgtgcctcttctaccactttgtgaccctggcccccatcctgcagtttgccagcctgccctgcctgctggaggccggggcccagatgagccgccaccctgtgaccacccaggtgtgtgtgatgcctgcccggctgagcctgggcagcggcatcagcaggaacctgctgcggctgtctgtgtgccacttcaccctgctgctgcccttccgcagcctgcggccctgccccctgagcagccgggacatggtgctgtcctatgagctgtggctgctgtgtgacttctacatcgcccccccagacagcagcggcagcggcatctgcaagaaggccatctag

SEQ ID NO: 106935 - DNA, 420 bp, Artificial Sequence
  derived and/or modified sequence
atctgccaccacacccagctgatctttgtgttcctgggcttctacctgttcatctacctgttcattgatggagtgctgctgtgctgccccggctggagcgctgtggtgcagagctggctgacagccaccagcgccagccaggtggccggcatcaccggcatgcaccaccacgcccagctgatctttgtgttcctggtggagatgggcttccaccacgtgggccaggccggcctggagctgctgaccagcggggaccccccagccagcgccagccagagcacaggcatcactggagtgagccactgcacccggcccaacttctgcatcttcagcagagatggagtgagcccctgctggccaggctggagcaggaccccagacctggtgatcagcgcccacctgggcctgcccaagtgctag

SEQ ID NO: 106936 - DNA, 354 bp, Artificial Sequence
  derived and/or modified sequence
gacagagtgctgctgtgccaccctggctggagcgccatgaccaggagccggctgacagccaccagcgccagccagctggccggcatcaccggcacccaccaccacgtgtggctgagctttgtgttcctggtggagatgggcatccaccacgtgggccagacaggcctggagctgcccaccagcggggacctgcccaccagcgccacccagagcgctggcatcactggagtgggccactgcagcaggcctgaggaggtgctcttcttcagagatggagtgagcccctgctggagcggctggagccagaccccaggcctgaagcccagcagccacctgggcctgcccaagtgctag

SEQ ID NO: 106937 - DNA, 420 bp, Artificial Sequence
  derived and/or modified sequence
atctgccaccacacccagctgatcttcgtgttcctgggcttctacctgtttatatatttgtttatcgacggtgtcctgctctgctgtccagggtggagtgccgtcgtccagtcttggttgaccgcaacctcggcgtctcaggtggccgggatcaccgggatgcaccaccacgcgcaactcattttcgtctttctcgtcgagatgggtttccaccatgtgggccaagctgggttagagctgctgacatctggtgacccacctgcatccgcttcccaatccaccggaataactggggtctcccattgcacaagacccaatttctgtatcttctcccgcgacggcgtgagcccttgttggcccgggtggtctcggacacccgacctggtcatttcggctcatctgggcctgcctaaatgctag

SEQ ID NO: 106938 - DNA, 420 bp, Artificial Sequence
  derived and/or modified sequence
atctgccaccacacccagctgatcttcgtgttcctgggcttctacttgtttatttacttgttcatcgacggagtgcttctgtgctgtccagggtggtctgcggtcgtgcaatcttggcttacagcgacctcagcttcccaggtggcaggaatcactggtatgcaccaccacgcccagttgatattcgtgtttcttgttgaaatgggcttccatcatgttgggcaggccggactagaacttttaacctctggggatccccctgcatccgccagccaatcgactggcatcaccggagtgagccattgtacgcgtccgaacttctgcatcttcagtagagatggtgtgagtccatgctggccagggtggagtagaacaccagaccttgtgatcagtgcccatctcggcctgcccaaatgctag

SEQ ID NO: 106939 - DNA, 420 bp, Artificial Sequence
  derived and/or modified sequence
atctgccaccacacccagctgatcttcgtgttcctgggcttctacctgtttatttacctcttcattgatggcgtgcttttgtgttgtcccgggtggtccgcagttgtccaaagctggttgactgccacttcggcttctcaagtggccgggatcaccggtatgcaccaccatgcccagctgatcttcgtatttctggtggaaatgggatttcatcatgtaggtcaagcaggactggagttattgacttccggcgaccctcccgccagtgcatctcagtcgaccggaataactggcgtgtcccactgcacccggccaaatttctgcattttttctagagatggtgttagcccctgctggcccgggtggtcacggacacctgatttggttattagcgctcaccttggccttcctaagtgttag

SEQ ID NO: 106940 - DNA, 354 bp, Artificial Sequence
  derived and/or modified sequence
gaccgggtgctgctgtgccaccccggctggagcgccatgacccggagtcggctgacagcaacatctgcctcccaactggccggcataaccggaacgcatcaccacgtttggctcagtttcgtgttcttggtggagatgggcattcaccacgtgggccagactggactggagctacctacttctggtgatctccctacatcggcaacccagtctgcagggattactggcgtcgggcactgttccagacccgaggaggtgctgtttttcagagatggagtctccccctgttggagtgggtggtctcagaccccaggcttgaaaccaagcagccacctcgggctacccaaatgttag

SEQ ID NO: 106941 - DNA, 420 bp, Artificial Sequence
  derived and/or modified sequence
atctgccaccatacacaactgattttcgtgtttctgggcttttatttgttcatatacctgttcattgatggcgtgctgttatgttgccctggttggtctgcagtggtgcagtcctggctcacagctacttctgcctcacaagtcgcgggaattaccggaatgcaccatcacgcccagctcatcttcgtgttccttgtcgaaatgggcttccaccacgtgggccaagccggactggagctgctcacgtccggagaccccccagcttcagcgagccagagcaccggcattacaggggtgtcgcactgcacaagacccaacttttgcatcttttcccgtgatggggtctctccttgctggccgggttggagccgcacaccggatctggtgatctcagctcatctcggtctccctaagtgctag

SEQ ID NO: 106942 - DNA, 420 bp, Artificial Sequence
  derived and/or modified sequence
atctgccatcatacccagcttatctttgtattcctgggcttttatcttttcatctacctcttcatcgatggagtgctcctctgctgccccggttggtccgcagtcgtgcagagctggctcactgctacgagcgccagccaggtggctggaattacagggatgcatcaccacgcgcaactgattttcgtctttcttgttgaaatgggcttccaccatgtggggcaggctggcttagagctcctcacctccggcgaccctccagctagtgcgagtcaaagtaccggcattacaggggtgtcccattgcacccggcctaacttttgcatcttcagcagggacggcgtgagtccctgctggcctggctggtccaggacgcctgatttagtcatctccgctcacctggggcttcccaaatgctag

SEQ ID NO: 106943 - DNA, 420 bp, Artificial Sequence
  derived and/or modified sequence
atctgtcaccatacccagttgatatttgtattcctcggcttctacttatttatctacctgttcattgatggcgtgctgctgtgttgtcccggatggagcgcagtggtccagtcgtggttaactgccaccagtgcatctcaggtggctggcattacaggtatgcaccatcacgctcagctgatatttgtgttcctggttgaaatgggatttcaccacgtgggacaggcaggcctggagctcctgacctcaggcgaccccccagcttctgccagccaaagcacaggaatcaccggtgtgagccactgcactcggccaaacttttgcattttctccagagatggagtctccccatgctggcccggatggagtcgaacaccagacctggtgatctcggcacatcttgggctacccaaatgctag

SEQ ID NO: 106944 - DNA, 354 bp, Artificial Sequence
  derived and/or modified sequence
gatagagttctcttatgtcacccagggtggagtgctatgacgaggtctagactcacagctaccagtgctagtcaactggcaggaattacgggcacacatcaccatgtgtggctgagcttcgtgttcctcgttgagatgggcattcatcacgtcggccaaacaggcctcgagctccctacctctggcgacctcccaacgagtgccacacaatccgccggaattaccggggtgggccactgcagccgtccagaagaggtattgttcttccgcgatggggtgtctccatgctggtctggctggtcccaaacaccaggacttaagccctcctcacatctgggtctgcctaaatgttag

SEQ ID NO: 106945 - DNA, 2314 bp, Artificial Sequence
  derived and/or modified sequence
ctccaagcagatctcttcaactacctgtgaaaactgatgtgatgaaaaggggaatttgaaggagccattccagaagacagggcgaaaactgaagtgcaatcagggccaagaaaaacagaaatagcaggacctggagttggcagccttggcatggtcaggttggcacctctggaggtgcccaggcttccctggcagcattgtgagcagtggatggtgttgaagggcagccagaggaggaatggaacacatgctccttgctaaccacacggacaaggccacgttcacaggtacacaaaggcaacgcagttgctcaggtgcttcggtatcacagccaagaccccttcgggggaagctagtcggatactgggacccacattccagactactgagccgcggtcgcgccctcggctccgtttctgctccctccaccccacgaggacgggggtggaaggccaccttcgatgggtgcatcctccacgatgacctgctaacaaaggtgcatggatttcagagtctgattggcctacaacagcatttggcttgtggagacagtggttccctgatgaaaaactgccatgatgtaaggaagagcctgtcagagcgaggctggggtgctgcgtgttggggaggtggaggtgtggcttcccgggagaagctccacccgctggctgagtctggcacataaaccagtctgtgaggggatggatgtgggtgtaatgggggcaattacagtaggaaggagcccacgtggagcctgcattctctgggacagggcattactgcattctctgggacaggctaaggcccagatcctaccttcccaggtggctggatgggtcatagatgtatgaaccggtcccctcattttctgattgccctgtgcttaacgtttctgtacctttactgaggctctttcctccaactccagtgcccagaccccccttctcctgaacatgaatgcctgtccatggaaattcgagtctctctctctcacccaggctggagtgcagtgatgcaatctcaactcactgcaacctctgcctcccaggttcaagtgattcttgtgcctcagcctctggagtatctaggatcacaggtgcgtgccaccatgtctggctaatgttttgtatttatagtagagatgggtttcgacatattggccaggctggtcttgatctcctggcctcaaagtgatctacccacctgggcctcccaaattgctgggattacagttgtgagccaccacacccagcctgtccctgaaattctaatgaaatgtgcgataaagttgttttgtttttctttttgttttcccttcttggcaaagcctggtgtttctattttagtggatttgcctggcactgaggactgctatggtggtcttcagaggctcctggtattgactgcttgtgaaaccgcttttgcaaaattatgactgagacagtgaaagagatctaacttaaccgacccaatcttgcttctaacctccaaattgtccttattcattcctgagcatagcctgaactaactttgggagaagcttagtttatattttattttatagtttaaaacaaagatgttaacagccctttcccaaggcagacttccttcttgcctggggactaggttgcctttggaggactaacattagccacgagattagaaattatgggctgggcctcgtggctcacccctgtaatcccagcactttgggaggccacggcaggtagatcacctgaggtcaggagttcaagaccagcctggccaacgtggtgaaaccccatctctactaaagaatacaaaaattagccggttatggtggcacatgcctatactgccagctacttgggaagctgaggtgggaggatcgcttgaacctgggaggcggcgtggaggttgcagtgagccaggatcttgccactgcactccagcttgggcgacagagtgagactctgtctcaaaaaaaaaaagtttagaaattatgctttaggagtcatgcagctggaggctacaagattctgaccctccctaaactgctcctaagatcagtgcttgagatattttgcagaccctgcacttgatggatcagctggcaccacccagactgattaactggctcatgtgatcttgtggtccccacccaggaacttaatcagcacaaggagacagcttcaactccctatgatttcatccctgaccaatcagcactcctgggctcactggcttccccctacccaccaagttgtccttaaaaagtctgctccccaaatgctcgggtagactgatttgggtaataataaaactccggtctccc

SEQ ID NO: 106946 - DNA, 351 bp, Artificial Sequence
  derived and/or modified sequence
gacagagtcttgctctgtcacccgggctggagtgcaatgacgcgatctcggctcactgcaacctctgcctcccagctggctgggattacaggcacgcaccaccacgtctggctaagttttgtatttttagtagagatggggattcaccatgttggccagactggtctcgaactcccgacctcaggtgatctgcccacctcggccacccaaagtgctgggattacaggcgtgggccactgctcccggccggaagaagttttgttctttagagacggggtttctccatgttggtcaggctggtctcaaacccctggcctcaagccgtcctctcaccttggcctcccaaagtgc

SEQ ID NO: 106947 - DNA, 1608 bp, Artificial Sequence
  derived and/or modified sequence
atggccgccgtggcaacctgcggtagtgtggctgcctctacagggtctgcagtagcaaccgcaagcaaatctaacgttacgtcttttcagcggcgcggaccacgagccagtgtgacaaatgattccggcccccggcttgtctcgatcgctggaaccagaccatccgtgaggaacggccagctgctggtgtctacaggactcccagctctggaccaactccttggcggcggcttagccgtgggcaccgtgctcctcattgaggaagacaaatacaatatttacagccctctactctttaagtatttcttggccgagggtatcgttaatggccacacactgctggtggcaagcgctaaggaagatcccgctaacatcctccaagaactgccagcgcctctgctggatgacaaatgcaaaaaggaattcgacgaagatgtatacaatcacaaaacgccagaatcaaatataaaaatgaagatagcgtggcgttaccaactgttgccgaagatggagattggaccagtgagttcttcacgcttcgggcactactacgatgctagtaaacggatgcctcaggaactgattgaggcttctaattggcatgggtttttcctgccagagaaaatcagctccacgcttaaggtcgagccctgcagtctaactcccggctatactaagctgcttcagtttatccaaaacataatctacgaggagggatttgacggaagtaaccctcagaaaaaacaaagaaatattctgaggatcgggatacagaacctgggaagtcccttgtggggagacgacatttgttgcgcggagaacgggggtaactcacacagtctaaccaagttcctgtacgtactgcgtgggctgctgaggacatctctgtccgcctgtattatcaccatgcccacacacctaatccaaaacaaggccattatcgcaagagttacaaccctctccgacgtggtcgtgggcctcgagtcctttataggtagtgagagggagactaacccactctataaggactaccacggactaatccatatacggcagattccgcggctgaataacttgatctgtgacgaaagcgacgtcaaagatctggctttcaaactaaagagaaaactgtttactatcgaggccggggtacaatggcacgatctggggtcccggcaacctcggctgttgggttcctcgaacagccccgccagtgctagcctggtggcggggatcactggtgctcaccaccatacccagctgatcttcgtgtttctggtcgagatgggatttcaccacgtagggcaggccggcctcgagctgttgacatcgggggacagcagtgcatcggcctcccagagcgccggaataaccgggatgtcctacagagcacggccacgcgcactgtatttcaaagaaaataagtccaaggtgggcgctcgtcagctgctggaaacacgtgaggagcacctttcatcgcggctcctcatcctgacacaagctgaaaggctgtgcatgggacgcagattctttaccgcttttcacattttcaacgagctcccttgtaaaggcgattgcatatgcctgcagacatgccagacacagtag

SEQ ID NO: 106948 - DNA, 1608 bp, Artificial Sequence
  derived and/or modified sequence
atggctgctgtggccacctgtggctctgtggccgccagcacaggcagcgctgtggccacagccagcaagagcaatgtgaccagcttccagaggcggggcccccgggcctctgtgaccaatgacagcggcccccggctggtgtccattgctggcacccggcccagcgtgagaaatggccagctgctggtgtccacaggcctgcctgccctggaccagctgctgggcggcggcctggccgtgggcaccgtgctgctgattgaggaggacaagtacaacatctacagccccctgctcttcaagtacttcctggccgagggcatcgtgaatggccacaccctgctggtggccagcgccaaggaggaccctgccaacatcctgcaggagctgcctgcccccctgctggatgacaagtgcaagaaggagtttgatgaagatgtgtacaaccacaagaccccagagagcaacatcaagatgaagatcgcctggagataccagctgctgcccaagatggagatcggccctgtgagcagcagccgcttcggccactactatgatgccagcaagaggatgccccaggagctgattgaggccagcaactggcacggcttcttcctgcctgagaagatcagcagcaccctgaaggtggagccctgcagcctgaccccaggctacaccaagctgctgcagttcatccagaacatcatctatgaggagggctttgatggcagcaacccccagaagaagcagaggaacatcctgagaattggcatccagaacctgggcagccccctgtggggagatgacatctgctgtgctgaaaatggaggcaacagccacagcctgaccaagttcctgtatgtgctgcggggcctgctgcggaccagcctgagcgcctgcatcatcaccatgcccacccacctgatccagaacaaggccatcatcgcccgggtgaccaccctgagtgatgtggtggtgggcctggagagcttcatcggcagcgagcgggagaccaaccccctgtacaaggactaccacggcctcatccacatccggcagatcccccggctgaacaacctgatctgtgatgaaagtgatgtgaaggacctggccttcaagctgaagaggaagctgttcaccatcgaggccggcgtgcagtggcatgacctgggcagccggcagccccggctgctgggcagcagcaacagccctgccagcgccagcctggtggccggcatcactggagcccaccaccacacccagctgatctttgtgttcctggtggagatgggcttccaccacgtgggccaggccggcctggagctgctgaccagcggggacagcagcgccagcgccagccagagcgctggcatcaccggcatgagctaccgggcccggccccgggccctgtacttcaaggagaacaagagcaaggtgggcgcccggcagctgctggagacccgggaggagcacctgagcagccggctgctgatcctgacccaggccgagcggctgtgcatgggccgccgcttcttcaccgccttccacatcttcaatgagctgccctgcaagggggactgcatctgcctgcagacctgccagacccagtag

SEQ ID NO: 106949 - DNA, 1608 bp, Artificial Sequence
  derived and/or modified sequence
atggccgccgtggccacctgcggcagcgtggccgccagcaccggcagtgctgtcgccactgcttctaaatcaaatgtcacttcatttcagaggagaggccccagagcgagcgtgacaaatgattccggtccacggttggtgtccattgccggcacgagaccttccgttcgaaacggtcagctcctagtctcaacgggtctgcccgcattggaccagcttctcgggggcgggctggccgttggaacagtgctgttaatcgaggaggataaatataacatttatagccccctcctttttaaatactttctggccgaaggcatcgttaacggacataccctcctggtcgcgtcagcaaaagaagatccagcaaacatactgcaggagctgcctgctcctttgctagatgataagtgcaaaaaggaattcgatgaggatgtgtataaccacaagactccggaatcaaatatcaagatgaagattgcttggaggtatcaactcctgcccaagatggagattggacccgtgtcctcctctcggtttggtcactactacgatgcatccaagcgcatgccgcaggaactgatagaagcatccaactggcatggcttttttctccctgagaaaatctcaagtacattgaaagtagagccctgctcgctgactcccgggtacaccaaactgcttcaatttattcaaaacatcatatacgaggaagggttcgacgggtccaatccccagaaaaaacaaaggaatattctgcgcataggaatccagaatctggggtctcctctctggggggacgacatctgctgcgccgaaaacgggggtaatagtcacagtctaaccaagtttctgtacgtacttcggggcttgctacgaacgtctctgtctgcttgcattatcaccatgccaacgcatctaatccaaaacaaagcaattatcgctagagtaaccaccctgtctgatgttgtggtaggactcgagtcctttattggctcagaaagagagacaaatcccctttataaggactaccacggactgatccacataaggcagatcccccgactcaataatctgatttgcgacgagtcagatgttaaggacctcgctttcaagttaaaacgcaaactgttcaccatagaggcaggggtgcagtggcatgatctgggatcacggcagccccggctgctgggctcttctaattcccccgcatctgctagcttggtcgccggaattaccggagctcaccatcacacccagctaatctttgtattcttggtggagatggggttccatcacgtgggacaagccggcctggagctgttaacgtcaggcgacagttccgcgagcgctagccaatccgccgggatcacaggaatgtcatatcgagcaaggcctagggcattatacttcaaggagaacaagagcaaggttggggcacgccagctgctggaaaccagggaagaacacctgtcaagtcggttacttattcttacccaggccgaaaggctttgcatgggccggcgattctttaccgcctttcacatctttaatgagctgccgtgcaagggcgactgtatttgcctacagacctgtcagacccagtag

SEQ ID NO: 106950 - DNA, 1608 bp, Artificial Sequence
  derived and/or modified sequence
atggcagcggtggcaacctgcggtagcgtggccgcaagcaccggaagcgccgtcgctacagcgtcgaaatccaacgtgacctcatttcaacggcgtgggccaagggcgtcagtaaccaacgattctgggcctagactggtgagcattgccggaactcggccaagtgtccggaacggacagttacttgtgtcaactggactgcctgcactggatcagctgctggggggaggcctggcagttggtacagtgttacttattgaggaggataagtataacatttactccccactgctgttcaagtactttttagccgaagggattgttaatggtcacactttactggtggctagtgccaaagaagatccagccaacattctccaggagcttccagctcctcttctagacgacaagtgtaaaaaagaatttgacgaagacgtttacaaccacaaaactccagagtccaacattaagatgaagatcgcctggaggtaccagcttctgcccaagatggagattggcccagttagctcttcacgattcgggcattactatgacgcctcgaaacgaatgccacaggagttgattgaggcctcgaattggcacgggtttttcctgccagagaaaatctcatccaccctgaaggtggaaccttgttcacttacccctggctataccaagctgctacagttcatccagaacataatctacgaagagggcttcgacggatctaatccacaaaagaaacagaggaacatcctcaggataggtatccagaacttgggaagtcccttgtggggcgacgatatctgttgtgcagagaatggaggcaattcccacagcttaacaaagtttttgtatgtactgagaggactgttacggacttctctgagtgcctgtattattacgatgccaacgcacctcattcaaaataaagccataatagcacgagtaactacattatctgacgtagtggtagggttggagagcttcatcggaagcgagcgcgaaaccaatccgctgtataaagactatcatgggcttatccacatccgacaaatcccgagactcaacaatctcatctgtgacgaatcagacgtcaaggacctggctttcaaactgaaacgcaaactgttcacgatcgaggcgggagtgcagtggcatgacctgggatcccgacaaccacgactgctgggttcttctaacagccccgctagtgcctctctggtggcaggtatcaccggtgcccaccaccacacccaattaattttcgtgttccttgttgagatgggcttccaccatgtgggtcaagccggacttgagctgcttacctctggcgacagttccgcgagcgctagtcagtcagctggcatcaccggcatgtcctatcgggctcgcccacgggctctctactttaaagagaataaatctaaggtgggcgctagacagctgctggaaactagagaagaacacctctcgagccggctgctgatcctgacccaggccgagagattatgtatgggcagacgctttttcacagcatttcacatctttaatgagctgccttgcaaaggtgactgcatctgcctgcagacgtgccaaacacagtag

SEQ ID NO: 106951 - DNA, 1608 bp, Artificial Sequence
  derived and/or modified sequence
atggccgccgtggccacctgcggcagcgtggccgccagcaccggcagcgccgtggccaccgccagcaagagcaacgtgaccagcttccagagaagaggccccagagccagcgtgaccaacgacagcggccccagactggtgagcatcgccggcaccagacccagcgtgagaaacggccagctgctggtgagcaccggcctgcccgccctggaccagctgctgggcggcggcctggccgtgggcaccgtgctgctgatcgaggaggacaagtacaacatctacagccccctgctgttcaagtacttcctggccgagggcatcgtgaacggccacaccctgctggtggccagcgccaaggaggaccccgccaacatcctgcaggagctgcccgcccccctgctggacgacaagtgcaagaaggagttcgacgaggacgtgtacaaccacaagacccccgagagcaacatcaagatgaagatcgcctggagataccagctgctgcccaagatggagatcggccccgtgagcagcagcagattcggccactactacgacgccagcaagagaatgccccaggagctgatcgaggccagcaactggcacggcttcttcctgcccgagaagatcagcagcaccctgaaggtggagccctgcagcctgacccccggctacaccaagctgctgcagttcatccagaacatcatctacgaggagggcttcgacggcagcaacccccagaagaagcagagaaacatcctgagaatcggcatccagaacctgggcagccccctgtggggcgacgacatctgctgcgccgagaacggcggcaacagccacagcctgaccaagttcctgtacgtgctgagaggcctgctgagaaccagcctgagcgcctgcatcatcaccatgcccacccacctgatccagaacaaggccatcatcgccagagtgaccaccctgagcgacgtggtggtgggcctggagagcttcatcggcagcgagagagagaccaaccccctgtacaaggactaccacggcctgatccacatcagacagatccccagactgaacaacctgatctgcgacgagagcgacgtgaaggacctggccttcaagctgaagagaaagctgttcaccatcgaggccggcgtgcagtggcacgacctgggcagcagacagcccagactgctgggcagcagcaacagccccgccagcgccagcctggtggccggcatcaccggcgcccaccaccacacccagctgatcttcgtgttcctggtggagatgggcttccaccacgtgggccaggccggcctggagctgctgaccagcggcgacagcagcgccagcgccagccagagcgccggcatcaccggcatgagctacagagccagacccagagccctgtacttcaaggagaacaagagcaaggtgggcgccagacagctgctggagaccagagaggagcacctgagcagcagactgctgatcctgacccaggccgagagactgtgcatgggcagaagattcttcaccgccttccacatcttcaacgagctgccctgcaagggcgactgcatctgcctgcagacctgccagacccagtag

SEQ ID NO: 106952 - DNA, 1961 bp, Artificial Sequence
  derived and/or modified sequence
ctctaagatggcggcagtggcaacctgcggtagtgttgccgcgagtactgggtctgcagtggcgacagccagcaagagcaacgtcaccagtttccagaggaggggtcctagagccagcgtgaccaacgacagcggccctcgactggtgtccattgcgggcacgcgaccgtcggtgcggaatggacagctgctggtatcaaccgggctcccagccctagaccagctcttaggtggaggtttagccgttggaacagttcttctaattgaggaggataaatataatatttactcacctttgctcttcaagtatttcctggcagaaggaattgtcaatgggcatactttgttggttgcatctgctaaagaggatcctgccaacattttacaggaacttccagcaccattacttgatgataaatgtaaaaaggaatttgatgaagatgtatacaatcataaaacaccagaatctaatattaagatgaaaatagcttggcgttaccagttattacccaagatggagattggaccagtatcatcttcaagatttggtcactattatgatgcatcaaaaagaatgccacaagaactaattgaggcttcaaattggcatggattttttcttccagagaaaatatcttcaactctcaaagtagaaccctgttctttgacccctggctacacaaagctgcttcagtttatccagaacatcatttatgaggaaggatttgatggatccaatcctcagaaaaaacagagaaacattttaagaataggaattcagaatcttggctcacctttatggggagacgatatttgctgtgcagaaaatggtggcaacagtcacagccttaccaagttcctctatgttctccgtggtcttctgagaacctctctttcagcctgcatcatcacaatgccaacacatctgatccagaataaagccattattgcccgtgtcacaaccttgtcagatgtagtagttggtctggaatcatttattggttctgagagagaaactaacccattgtataaggattatcatggattgattcatatacggcagattcctcggcttaataacttgatctgtgatgaatcagatgtcaaagacttagcttttaaattaaaaaggaagctattcaccattgaggctggagtgcagtggcacgatctcggctcacggcaacctcgcctcctgggttcaagcaattctcccgcctcagcctccctagtagctgggattacaggcgcccaccaccacacccagctaatttttgtatttttagtagagatggggttccaccatgttggccaggctggtctcgaactcctgacctcaggtgattcatccgcctcagcctcccaaagtgctggaattacaggcatgagctaccgcgcccggcctagggctttgtatttcaaagagaacaagtctaaagtgggtgcaagacaactacttgagacaagagaggaacatttatcctccaggcttctcatacttactcaagcagaaagactctgcatggggagaaggttctttacagcattccacatttttaatgagcttccttgcaaaggcgactgcatttgcctccagacttgtcagacacagtgagccgctcaagcaaaatggatctggcagaatccgccaagcggctgggcccaggctgtggcatgatggccggaggcaagaagcacctggacttctagggattcctccttagtcgctgcatgcagaattctatgacactctaattatgattgctaatagcttatgtaaatatttttcttaacaatttgaccctccactccttgaaaaacacaggattataaaatggtgccgccatttctcattttttaactttttacagaactagcacagcagaaatacttttaaatttttccttcatgctctagagaaaataattttatttttaaataaacgccaaaaaatgtcaaaa

SEQ ID NO: 106953 - protein, 1400 aa, Artificial Sequence
  derived and/or modified sequence
MAARRGRRDGVAPPPSGGPGPDPGGGARGSGWGSRSQAPYGTLGAVSGGEQVLLHEEAGDSGFVSLSRLGPSLRDKDLEMEELMLQDETLLGTMQSYMDASLISLIEDFGSLGESRLSLEDQNEVSLLTALTEILDNADSENLSPFDSIPDSELLVSPREGSSLHKLLTLSRTPPERDLITPVDPLGPSTGSSRGSGVEMSLPDPSWDFSPPSFLETSSPKLPSWRPPRSRPRWGQSPPPQQRSDGEEEEEVASFSGQILAGELDNCVSSIPDFPMHLACPEEEDKATAAEMAVPAAGDESISSLSELVRAMHPYCLPNLTHLASLEDELQEQPDDLTLPEGCVVLEIVGQAATAGDDLEIPVVVRQVSPGPRPVLLDDSLETSSALQLLMPTLESETEAAVPKVTLCSEKEGLSLNSEEKLDSACLLKPREVVEPVVPKEPQNPPANAAPGSQRARKGRKKKSKEQPAACVEGYARRLRSSSRGQSTVGTEVTSQVDNLQKQPQEELQKESGPLQGKGKPRAWARAWAAALENSSPKNLERSAGQSSPAKEGPLDLYPKLADTIQTNPIPTHLSLVDSAQASPMPVDSVEADPTAVGPVLAGPVPVDPGLVDLASTSSELVEPLPAEPVLINPVLADSAAVDPAVVPISDNLPPVDAVPSGPAPVDLALVDPVPNDLTPVDPVLVKSRPTDPRRGAVSSALGGSAPQLLVESESLDPPKTIIPEVKEVVDSLKIESGTSATTHEARPRPLSLSEYRRRRQQRQAETEERSPQPPTGKWPSLPETPTGLADIPCLVIPPAPAKKTALQRSPETPLEICLVPVGPSPASPSPEPPVSKPVASSPTEQVPSQEMPLLARPSPPVQSVSPAVPTPPSMSAALPFPAGGLGMPPSLPPPPLQPPSLPLSMGPVLPDPFTHYAPLPSWPCYPHVSPSGYPCLPPPPTVPLVSGTPGAYAVPPTCSVPWAPPPAPVSPYSSTCTYGPLGWGPGPQHAPFWSTVPPPPLPPASIGRAVPQPKMESRGTPAGPPENVLPLSMAPPLSLGLPGHGAPQTEPTKVEVKPVPASPHPKHKVSALVQSPQMKALACVSAEGVTVEEPASERLKPETQETRPREKPPLPATKAVPTPRQSTVPKLPAVHPARLRKLSFLPTPRTQGSEDVVQAFISEIGIEASDLSSLLEQFEKSEAKKECPPPAPADSLAVGNSGSSCSSSGRSRRCSSSSSSSSSSSSSSSSSSSSRSRSRSPSPRRRSDRRRRYSSYRSHDHYQRQRVLQKERAIEERRVVFIGKIPGRMTRSELKQRFSVFGEIEECTIHFRVQGDNYGFVTYRYAEEAFAAIESGHKLRQADEQPFDLCFGGRRQFCKRSYSDLDSNREDFDPAPVKSKFDSLDFDTLLKQAQKNLRR

SEQ ID NO: 106954 - DNA, 4203 bp, Artificial Sequence
  derived and/or modified sequence
atggccgccaggagaggtagaagagacggcgttgcacccccaccttcagggggtcctggccctgaccctggcggaggtgctcgtgggtcgggctggggaagccggtcccaggccccttacggtaccctgggagccgtgagtggcggggaacaggtacttttgcatgaggaggctggcgactctggttttgtgagcctgagtaggctcggtcctagtctacgagataaggatctggagatggaagaattgatgctgcaggacgagacactgctgggtacaatgcaaagctatatggacgcttcactaatttctctgattgaagactttggtagcttgggcgagtctcggctgtccctggaggaccagaatgaggtgtctctcctaacagccctgactgaaattctcgacaatgcagactccgagaacctttccccttttgactcaattccagactccgagctgctggtgtcccctcgggagggctcttctctgcacaaactcctaaccctatcaagaacaccacccgaaagggacctgattactcctgtagaccctttaggcccttctacgggaagctcacggggctctggggttgagatgagcctgccagacccatcatgggacttcagccccccctcctttctggagacatcaagccctaagttgccctcgtggcggccacctaggagtcgtcccagatgggggcagtcccctcccccccaacagcggtcagacggggaggaagaggaggaggtcgccagcttttctggccaaattctggccggcgagctggacaactgcgtgtcttctattcctgactttcccatgcatctcgcctgccccgaggaggaagacaaggccaccgcggctgagatggctgtgcccgctgccggagacgagagtatttcttccttgagtgagctagtgagagccatgcatccatactgcctgcctaatctcacgcatctggcttctttagaagacgagcttcaggaacaacccgacgatctgacattaccagaggggtgtgtggttctagaaatcgtaggtcaggctgccacggccggagatgatctcgagatccccgtggtcgtgagacaggtaagccctggacccaggcctgtgctgcttgacgattccctggagacaagttcagctctgcagctgctcatgcctacattagaaagcgaaacggaggctgcagtgcccaaggttaccctgtgctccgagaaagagggacttagcctcaactcagaagaaaagctggatagtgcctgcttactgaagccgcgagaggtggtcgagcctgtggtacccaaagaacctcagaatcctcccgcaaatgctgccccgggaagtcaaagagctcgcaaaggacggaagaaaaagtccaaggaacagccagcagcatgcgtagaaggttacgcacgccgactccgaagctcctctcgagggcaatcaaccgtcgggacagaagtgacctcccaagtggacaatctccagaaacagcctcaggaagaactgcagaaagagagcggtcctctgcagggcaagggcaagcctagagcttgggctagggcttgggcggcggctttagagaatagttctcccaaaaaccttgaacggtcagccggacagtccagtcctgccaaagagggtcctctggacttgtatcctaaattagcagatactatacaaacgaatcctattccgacccacctgagtctggtggatagtgcccaggcctcacccatgcccgtcgactctgtggaggctgatcccacggctgtgggacccgttttggccggacccgtacccgtggatcctggcctggtggacctggcgtcaacttcaagcgaactagtggaaccactgccagccgaacctgtactgattaatcctgttctggccgactccgccgctgtggacccagccgtggtccccatctcagataatttgccacccgtggacgccgtgccatccggccccgcacctgttgatctcgctttggttgacccagtgccaaacgatctgaccccggttgatcctgtgctcgtaaagtctagaccaactgatcctagaaggggagcagtttcaagtgctctcggtggatctgctccccagctgctggtcgaaagcgaatccctagatccaccgaagacgatcatcccagaagtcaaggaggtcgtggatagcctcaagattgagtccgggacatccgcaaccacgcatgaagcaagaccacggccactgtcactgagcgaataccggcggcggaggcagcagcgccaggcagagaccgaggagaggagcccacaacccccaacagggaagtggccctcactgcccgaaacgcctacaggccttgccgacattccctgtctggttatcccccccgcccccgccaaaaaaaccgcactgcagcggagtcccgagacccctctagagatctgcctggtgcccgtgggcccgagccctgcctctcccagccctgagccccccgtttctaagcccgtggcttcctcacccaccgaacaggtcccctcgcaggagatgccactacttgcgagaccgagcccacccgtgcagagcgtgtcacccgctgtcccgacgcccccttccatgagcgccgccttacccttccctgcgggcggcctgggaatgcccccatcattgccacctccgccgctgcagccacccagtcttccactgtctatgggcccagttttgcccgacccgtttactcattatgctcctctcccgtcctggccctgctacccacatgtttctccttctggatatccctgtctgcctcccccacctacggtaccgctggtttctggcactccgggagcatacgccgtgccacctacatgttccgtgccatgggccccccctccggctcctgtgtcaccgtactctagcacatgcacctacggcccgctgggttggggccccggaccccaacacgcccccttctggtccaccgtgccccccccccccctgcccccagccagtatcggacgtgccgtccctcaacccaagatggagtcacgcggaacacccgcaggaccgccagagaatgtcctccccctttctatggcacccccactcagcctgggactgcctgggcacggcgccccgcaaaccgaacctacaaaggtggaggtgaagcccgttccggcctcaccccacccaaagcacaaggtgagcgcattggtccaatccccacagatgaaagctctggcctgcgtgagcgctgaaggggtgaccgtagaggagccggcatcagaacggcttaagccagaaactcaggaaaccaggccgcgagagaagccccccctccccgccaccaaggcagtaccaacccccagacagagcacggtccctaagctgcccgccgtccatcccgccaggctgagaaagctgagtttccttcccacacctcggactcagggttcagaggatgtcgtccaggcctttatcagcgaaattggcattgaggcctcggacctctctagtctgctcgaacagtttgagaagagcgaagcgaaaaaggaatgtcctcctccagcccccgcagatagcctggcggtggggaactctggctccagttgctcgtctagcggaagaagccggagatgctcttcgtcctcctccagctcctcctccagctccagcagctcctcttcaagttctagcagccgcagtagatctcgaagcccctcacctcgaagacgcagtgacaggagaaggcgttatagttcgtaccggagccacgatcactaccagagacagcgagtgcttcagaaggagcgggccatcgaggaacgccgtgtagtgttcatcggtaaaatcccaggaagaatgacacggagcgagctgaagcagagattttccgtgttcggggagatcgaagagtgcacaattcacttcagggtgcaaggcgataattatggtttcgttacttacagatatgccgaggaggccttcgcggccatcgagagtggccataagctccgccaggcagatgagcagcccttcgacctctgttttggagggcggagacagttctgcaaacggtcgtacagtgaccttgactccaatcgcgaggattttgatcccgctcccgtgaaatctaagtttgactctctggactttgacactctgttaaagcaagcccagaaaaacttgaggcgttag

SEQ ID NO: 106955 - DNA, 4423 bp, Artificial Sequence
  derived and/or modified sequence
agagcagcgctgggtgttcaggggccaagatggcggcgcgccggggacggagagacggagtcgcgccgcccccgagtgggggccccggtccggaccctggcgggggagcccgcggcagtggttggggaagtcgaagccaagcgccgtatgggactttgggcgctgtgagcggcggcgagcaggtgctgctgcatgaggaggcgggtgattctggctttgtcagtctctctcggctgggcccatctctgagggacaaggacctggaaatggaggagctaatgctgcaggatgagacactgctggggaccatgcagagctacatggatgcctcccttatctccctcattgaggattttgggagccttggagagagcaggttatctctggaggaccagaatgaagtgtcgctgctcacggctctgacggagatcttggacaatgcagattctgagaacctttctccatttgacagcattcctgattcggagctgcttgtgtcaccccgggagggctcctctctgcacaagctgcttactctctctcggacacccccagaacgtgacctcatcaccccagttgacccactggggcccagtacaggcagcagtagagggagtggggttgaaatgtctcttccagatccctcttgggacttctccccaccctctttcttagagacctcttcccccaagcttcctagctggagacccccaagatcaagaccacgctggggccaatccccacctccccagcagcgcagtgatggagaagaagaggaggaggtggccagcttcagtggccagattcttgccggggagcttgacaactgtgtgagcagtatcccggacttccccatgcatttggcctgccctgaggaggaagataaagcaacagcagcagagatggcagtgccagcagctggtgatgagagcatctcctccctgagtgagctggtgcgggccatgcacccatactgcctgcccaacctcacccacctggcatcacttgaggatgagcttcaggagcagccagatgatttgacactgcctgagggctgcgtagtgctggagattgtggggcaggcagccacagctggcgatgacctggagatcccagttgtggtgcgacaggtctctcctggaccccggcctgtgctcctggatgactcgctagagactagttctgccttgcagctgcttatgcctacactggagtcagagacagaggctgctgtgcccaaggtaaccctctgctctgagaaagaggggttgtcattgaactcagaggagaagctggactcagcctgcttattgaagcccagggaggtcgtggagccggtggtgcccaaggagcctcagaacccacctgccaatgcagcaccaggttcccagagagctcgaaagggcaggaagaagaagagcaaggagcagccagcagcctgtgtggaaggctatgccaggaggctgaggtcatcttctcgcgggcagtctactgtaggtacagaagtgacctctcaggtagacaacttgcagaaacagcctcaggaagaacttcaaaaagagtctgggcctctccagggtaaggggaagccccgggcttgggctcgggcctgggcagctgccttggagaattctagccctaagaacttggagagaagtgctggacaaagtagtcctgctaaagaaggccctctagacctctacccaaagctggctgacactatccaaaccaatcctataccaacccatctctcattggtcgactctgcccaagccagccccatgccagttgactctgttgaagctgatcccactgcagttggccctgttctagctggccctgtacctgttgaccctgggttggttgaccttgcttcaaccagctcagaactggttgagcctctcccggctgagccagtgctgatcaacccagtcctggctgactcagcagcagttgaccctgcagtggttcccatctcagataacttgccaccagttgatgctgtcccgtctggcccagcaccagttgatctagcactggttgaccctgttcctaatgacctgactccagttgacccagtgctagttaagtccagaccaactgatcccagacgtggtgcagtgtcatcagccctggggggttcagcaccccagctcctcgtggagtcagagtccttggacccaccaaagaccatcatccctgaagtcaaagaggttgtggattctctgaaaattgaaagtggtaccagtgctacaacccatgaagccagacctcggcctctcagcttatctgagtaccggcgacgaaggcagcaacgccaagcagaaacagaagagagaagtccacagcccccaactgggaagtggcctagccttccagagactcccacagggctggcagacatcccttgtcttgtcatcccaccagccccagccaagaagacagctctgcagagaagccctgaaacaccccttgagatttgccttgtgcctgtaggtcccagccctgcttctcctagtcctgagccacctgtaagcaaacctgtggcctcatctcccactgagcaggtgccatcccaggagatgccactgttggcgagaccttcccctcctgtgcagtctgtgtcccctgctgtgcccacacctccctcgatgtctgctgccctgcctttccctgcaggtgggcttggcatgccccccagtctgcccccacctcccttgcagcctcctagtcttccattgtctatggggccagtactacctgatccgtttactcactatgcccccttgccatcctggccttgttatcctcatgtgtccccttctggctatccttgcctgccccccccaccaacggtgcccctagtgtctggtactcctggtgcctatgccgtgcctcccacttgcagtgtgccttgggcaccccctcctgccccagtctcaccttacagttccacatgtacctatgggcccttgggatggggcccagggcctcaacatgctccattctggtctactgttcccccacctcctttgcctccagcctccattgggagagctgttccccaacctaaaatggagtctaggggcactccagctggccctcctgaaaatgtacttcccttgtcgatggctcctcccctcagtcttgggctacctggccatggagctcctcagacagagcctaccaaggtggaggtcaagccagtgcctgcatctccccatccgaaacacaaggtgtctgccctggtgcaaagtccccagatgaaggctctagcatgtgtgtctgctgaaggtgtgactgttgaggagcctgcatcagagaggctaaagcctgagacccaagagaccaggcccagggagaagccccccttgcctgctaccaaggctgttcccacaccaaggcagagcactgtccccaagctgcctgctgtccacccagcccgtctaaggaagctgtccttcctgcctaccccacgtactcagggttctgaagatgtggtacaggctttcatcagtgagattggaattgaggcatcggacctgtccagtctgctggagcagtttgagaaatcagaagccaaaaaggagtgtcctcctccggctcctgctgacagcttggctgtaggaaactcagggtccagctgtagttcctctggacgttctcgaagatgctcttcctcttcttcgtcatcatcttcctcttcgtcttcctcatcctcatcatccagttctcgaagccgctcacgatccccatccccccgccggagaagtgacaggaggcggcggtacagctcttatcgttcacatgaccattaccaaaggcaaagagtgctacaaaaggagcgtgcaatagaagaaagaagggtggtcttcattggaaagatacctggccgcatgactcgatcagagctgaaacagaggttctccgtttttggagagattgaggagtgcaccatccacttccgtgtccaaggggacaactacggcttcgtcacttatcgctatgctgaggaggcatttgcagccattgagagtggccacaagctgcggcaggcagatgagcagccctttgatctctgctttgggggccgaaggcagttctgcaagaggagctattctgatcttgactccaaccgggaagactttgacccagcacctgtaaagagcaaatttgattctcttgactttgacacattgttgaaacaggcccagaagaacctcaggaggtaaccttgggcccttccctgctatcctttttctcctttggaggtgcccaacctcctccacccccttcccctactctaggggagagagctgctagtgagatgactgttttataaagaaatggaaaaaagtgaaataaaaaatatgttgaatcagattttttaaaaggggtatttgtttttttataacaggtattg

SEQ ID NO: 106956 - DNA, 4203 bp, Artificial Sequence
  derived and/or modified sequence
atggccgcccggcggggcagaagagatggagtggcccccccacccagcggcggccctggccctgaccccggcggcggggcccggggcagcggctggggcagccgcagccaggccccctacggcaccctgggcgctgtgtctggaggagagcaggtgctgctgcacgaggaggccggggacagcggctttgtgtccctgagccggctgggccccagcctgcgggacaaggacctggagatggaggagctgatgctgcaggatgagaccctgctgggcaccatgcagagctacatggatgccagcctcatcagcctgattgaagattttggcagcctgggggagagccggctgagcctggaggaccagaatgaggtgtccctgctgacagccctgacagagatcctggacaatgctgacagcgagaacctgagcccctttgacagcatcccagacagcgagctgctggtgagcccccgggagggcagcagcctgcacaagctgctgaccctgagcaggaccccacctgagcgggacctgatcacccctgtggaccccctgggccccagcacaggcagcagccggggcagcggcgtggagatgagcctgcctgaccccagctgggacttcagccccccatccttcctggagaccagcagccccaagctgcccagctggaggcctcccaggagccggccccgctggggccagagccccccaccccagcagaggagtgatggagaggaggaggaggaggtggccagcttcagcggccagatcctggccggggagctggacaactgtgtgagcagcatcccagacttccccatgcacctggcctgcccagaggaggaggacaaggccacagctgctgagatggctgtgcctgctgctggagatgagagcatcagcagcctgtctgagctggtgcgggccatgcacccctactgcctgcccaacctgacccacctggccagcctggaggatgagctgcaggagcagccagatgacctgaccctgcctgagggctgtgtggtgctggagatcgtgggccaggccgccacagctggagatgacctggagatccctgtggtggtgcggcaggtgtccccaggccccaggcctgtgctgctggatgacagcctggagaccagcagcgccctgcagctgctgatgcccaccctggagagcgagacagaggccgctgtgcccaaggtgaccctgtgcagcgagaaggagggcctgagcctgaacagcgaggagaagctggacagcgcctgcctgctgaagccccgggaggtggtggagcctgtggtgcccaaggagccccagaaccccccagccaatgctgcccctggcagccagagggccaggaagggcaggaagaagaagagcaaggagcagcctgctgcctgtgtggagggctacgcccggcggctgcggagcagcagccggggccagagcacagtgggcacagaggtgaccagccaggtggacaacctgcagaagcagccccaggaggagctgcagaaggagagcggccccctgcagggcaagggcaagccccgggcctgggcccgggcctgggccgccgccctggagaacagcagccccaagaacctggagaggtctgctggccagagcagccctgccaaggagggccccctggacctgtaccccaagctggccgacaccatccagaccaaccccatccccacccacctgagcctggtggacagcgcccaggccagccccatgcctgtggacagcgtggaggccgaccccacagctgtgggccctgtgctggccggccctgtgcctgtggaccccggcctggtggacctggccagcaccagcagcgagctggtggagcccctgcctgctgagcctgtgctgatcaaccctgtgctggccgacagcgctgctgtggaccctgctgtggtgcccatcagtgacaacctgccccctgtggatgctgtgcccagcggccctgcccctgtggacctggccctggtggaccctgtgcccaatgacctgacccctgtggaccctgtgctggtgaagagccggcccacagaccccaggagaggagctgtgagcagcgccctgggcggcagcgccccccagctgctggtggagagcgagagcctggacccccccaagaccatcatccctgaggtgaaggaggtggtggacagcctgaagattgaaagtggcaccagcgccaccacccatgaggcccggccccggcccctgagcctgtctgagtacagaagaagacggcagcagaggcaggccgagacagaggagaggagcccccagccccccaccgggaagtggcccagcctgcctgagacccccaccggcctggccgacatcccctgcctggtgatccccccagccccagccaagaagacagccctgcagaggagccctgagacccccctggagatctgcctggtgcctgtgggccccagccctgccagccccagccctgagccccctgtgtccaagcctgtggccagcagccccacagagcaggtgcccagccaggagatgcccctgctggcccggcccagcccccctgtgcagagcgtgtccccagctgtgcccaccccacccagcatgtctgctgccctgcccttccctgctgggggcctgggcatgccacccagcctgcccccaccacccctgcagccccccagcctgcccctgtccatgggccctgtgctgcctgaccccttcacccactacgcccccctgcccagctggccctgctacccccacgtgagccccagcggctacccctgcctgcccccaccacccaccgtgcccctggtgtctggcacccctggggcctatgctgtgccccccacctgcagcgtgccctgggcccctcctccagcccctgtgagcccctacagcagcacctgcacctacggccccctgggctggggccctggcccccagcacgcccccttctggagcacagtgcccccaccacccctgcccccagccagcatcggccgggctgtgccccagcccaagatggagagccggggcaccccagctggccccccagaaaatgtgctgcccctgtccatggccccacccctgagcctgggcctgcccggccatggagccccccagacagagcccaccaaggtggaggtgaagcctgtgcctgccagcccccaccccaagcacaaggtgtctgccctggtgcagagcccccagatgaaggccctggcctgtgtgtctgctgagggcgtgacagtggaggagcccgccagcgagcggctgaagccagagacccaggagacccggccccgggagaagccacccctgcctgccaccaaggctgtgcccaccccccggcagagcacagtgcccaagctgcctgctgtgcacccagcccggctgaggaagctgtccttcctgcccacccccaggacccagggctctgaagatgtggtgcaggccttcatcagcgagattggaattgaggccagtgacctgagcagcctgctggagcagtttgagaagtctgaggccaagaaggaatgtcctcctccagccccagctgacagcctggccgtgggcaacagcggcagcagctgcagcagcagcggccgcagccgccgctgcagcagcagcagcagcagcagcagcagcagcagcagcagcagcagcagcagcagcagcagccgcagccgcagccgcagccccagcccccggcggcggagtgacagaagaagacgctacagcagctaccgcagccatgaccactaccagaggcagagggtgctgcagaaggagcgggccatcgaggagcggcgggtggtgttcatcggcaagatccctggccgcatgaccaggtctgagctgaagcagcgcttctctgtgtttggagaaattgaagaatgtaccatccacttccgggtgcagggcgacaactacggctttgtgacctaccgctatgcagaggaggcctttgctgccatcgagagcggccacaagctgcggcaggctgatgagcagccctttgacctgtgcttcggcggccggcggcagttctgcaagaggagctacagcgacctggacagcaacagagaagattttgatcctgcccctgtgaagagcaagtttgacagcctggactttgacaccctgctgaagcaggcccagaagaacctgcggaggtag

SEQ ID NO: 106957 - DNA, 4203 bp, Artificial Sequence
  derived and/or modified sequence
atggccgcccggcggggccggcgggacggcgtggcccccccccccagcggggggcccggacctgaccctggcggcggagcacgggggtccggctgggggtctagatctcaggcgccatacggcacgttgggggccgtgtccggaggcgagcaagtgctcctccatgaagaggctggtgattccggcttcgtaagcctgtccagactcggaccttccctcagggataaggacctcgagatggaagaactcatgctgcaagatgaaacccttctaggcacaatgcagtcctatatggacgccagtctgatcagtctcatcgaagacttcgggagcctcggcgaatctagactgagcctcgaagatcagaacgaggtcagtctgctgacagcattgacggaaattctggacaatgccgactcagagaacctgtcaccttttgattcaatccctgattcagagctgctggtttcaccccgcgaggggtcaagcctgcacaaattactgactctctctcggactccgccagaacgcgaccttatcacgccagtcgatcccttaggcccctcaaccgggtctagtagaggatcaggtgtggaaatgagcctcccggacccctcctgggatttttccccaccttcattcctcgaaacatctagtcctaaacttccttcgtggcgaccccctagaagccgcccaagatggggacagagccctcctccccaacagaggtctgacggcgaggaggaagaggaggttgcctctttcagtggccaaatattggctggcgagttagataattgcgtgtccagtatccccgatttccccatgcaccttgcttgtccagaagaagaggataaagcaaccgcagccgaaatggccgtccctgcagccggtgatgagagtatctcctccctcagcgaactggtgcgcgccatgcacccttattgcctgccaaacctgacacatctggcttctctcgaagatgagctgcaggagcagcccgatgacctgaccctgcccgagggctgtgtggtgcttgaaattgttggtcaggctgctaccgccggcgacgatctggagatccccgtggttgtaagacaggtttcccccgggcctcggcctgtcctcctcgatgactctctggaaacatcatctgctttacagctgctgatgcctaccttggaatccgagaccgaggctgcagtgcccaaagtcaccttgtgttccgagaaggagggcctctctctgaactccgaagaaaagctcgacagcgcttgtttgctcaaacctcgcgaggtggttgagcctgtggttcctaaagagcctcagaatcctcctgctaacgccgctccagggtctcagagagcccgtaaagggaggaagaagaaatcaaaagagcagcctgccgcatgtgtagaagggtacgcccgtcgcttgagatctagcagtaggggccagtctaccgtgggtacagaggtgacgtcacaggtggacaatctgcaaaagcagccacaagaggaactgcagaaagagagtggccctctgcaagggaaaggtaaaccccgagcgtgggcccgcgcctgggcagctgctttggagaactcaagtcccaagaatctagagaggtctgcgggacaatcctccccagcaaaggaagggcctctcgacttgtacccaaaactggccgacaccatccagaccaatcctattcccacgcacttatccctggttgattcagcccaggcttctcctatgccagtggattccgtggaagccgatccaactgcagtgggccctgttctcgccggacccgtccccgtcgatcctggactcgtggacctggcaagcacaagtagtgagctagtcgagcctctccccgccgagcctgtgctgatcaatcctgtgctcgcggactcagcggccgttgaccccgcagtcgtaccaatcagcgataatctgcccccggttgatgccgtgccctctggtcccgctcctgtcgatctggctcttgtggatcctgtccccaacgatcttacaccggttgacccggtactagtgaagagcaggcccactgacccacgcagaggggcagtgtcttctgctctgggagggagtgcaccccagctcctggtcgagagtgagtctctggatccgcccaaaacaattattccagaggtgaaagaagtcgtggattccctgaaaatcgagagcgggacttctgcaactacccacgaggctcgtccacgcccccttagtctgagcgaatatcggcgccggagacagcagcgacaggccgaaaccgaagagcgttcgccacaacctcccactggaaagtggccgagcttgcctgagactccaacagggctggcagacataccatgtctggtgattcccccggcccccgcgaaaaaaaccgctctgcagcgttctcctgagacccccctcgagatatgtttggtgcctgttggtccctcccccgcctcgccaagccctgaacctcctgtgtctaagcccgtggctagttcaccaacagaacaggtcccctcccaagagatgcccctgctcgcccggccctcacctccggtgcagtcagtctcccctgctgtgcccacccctccgtccatgtcagctgcccttccattcccagccggggggctcgggatgcccccttctctaccgccaccccctctgcagcccccaagtttgcctctgtccatgggaccagtcctgcccgatccgtttactcactatgcccccttaccgtcttggccatgctacccacatgtcagcccaagtgggtatccgtgtcttcctccccctcccaccgttccattagtgtccggaaccccgggcgcctatgccgtgcctccaacatgctccgtgccttgggccccacctcctgcccctgtctccccttattcctctacctgtacatatggtcctctgggctggggccccggaccgcagcacgcccccttttggagcaccgtgcccccaccacctttgcccccagcatcaattggaagagccgtgcctcagccaaagatggagtctagagggacaccagctgggccgcccgagaacgtgcttccactgtccatggcgccaccgctgtccttggggctgcccggacatggagcccctcagaccgaacctacgaaggttgaagtgaaaccagtgccagcaagccctcacccgaaacataaggtctcagcgctagtgcagagtccccaaatgaaggccctcgcctgtgtttccgcagaaggtgtcactgtggaggaaccggctagcgaacggctgaagccggagacccaagaaacaaggccgagagaaaaacccccattgcctgcaacaaaggccgtccctactccaagacagtccactgtgcctaagctccccgctgtgcacccagcacggttaaggaagctgagttttttgccaaccccccgcacccaaggcagtgaggacgtcgtgcaggcctttattagcgaaattggcatagaggctagcgaccttagcagtcttcttgagcagttcgaaaaaagcgaggcgaagaaagagtgtcctccccccgcaccagccgattcattggcagtaggcaacagcggctctagttgctcgtcgtcgggcagatcacgcagatgcagtagttcctcctcatcatcctcaagttcttctagctcgtcgtctagttcctctagtagccgctcgagaagccgcagtccaagcccacggagaagaagcgacagacggcgtcgatatagctcatacagatcccacgaccactaccaaaggcagcgggtgctgcagaaggagcgcgctatagaggagaggcgcgtggtgttcatcggcaagattcctggacgcatgacaaggagtgagttgaaacagcgattctctgtgttcggggagatcgaggagtgcaccattcactttagggttcaaggggataattatggcttcgtgacatatcgctatgctgaagaggcatttgcagccattgaaagcggacataagctacggcaggcggatgagcagcctttcgatctgtgttttggcggccgccgccagttctgcaagagatcctattcagatctcgactccaaccgagaggacttcgacccagcccctgtgaagtcaaaattcgacagccttgatttcgatacattactgaaacaggctcagaagaacttaagaagatag

SEQ ID NO: 106958 - DNA, 4203 bp, Artificial Sequence
  derived and/or modified sequence
atggcagccagacgcggacggcgagacggtgtggcccctccccctagcgggggacccggaccagatcccggagggggagctcgaggaagcgggtggggcagtcgctcacaggctccctacggaacacttggagcagtgagtggaggggagcaggtcttgcttcatgaggaggccggagacagtggattcgtgtctttgtctaggctgggcccttcactacgcgacaaagacctggagatggaagaactcatgcttcaggacgaaacgctgttaggtacaatgcaatcttatatggacgctagtttgatctccttgattgaggactttggctcactaggagaaagcagactgtcactcgaagaccagaacgaggtctcgttattaaccgcactcactgagatactggataacgccgacagcgagaatcttagtcctttcgatagtatacccgactccgaactgctcgtgagtccccgagaagggtcgagcctccacaagctgcttaccctgagcaggactcctccagaaagagatcttataacacccgtagacccgctgggcccttcaactggcagttcccggggtagtggagtagaaatgagtctgcccgacccatcgtgggacttctccccaccttcttttttggagacctcctcccctaaattgcccagctggcgccctcccagaagtcgtccacgttgggggcagtcgccccctccccaacagcgctctgatggtgaagaagaagaggaagtagctagctttagcggacaaattcttgccggagaactggacaactgcgtgtcctccattcctgatttcccgatgcatttggcatgccctgaggaagaggacaaggctaccgcagctgagatggctgtcccagctgcaggcgatgaaagcatttcgtctttgagtgaattggtgcgggcaatgcacccttattgcttaccaaatctgacccacctggcctctctggaggacgaactgcaagagcagcctgacgatctaaccttgcctgaaggctgcgtggtgctggaaatcgttggccaggctgccaccgccggagatgacctcgagatccctgtggtggtaagacaagtgagtccgggaccacgccctgtgctcctggatgacagtctggagacctcatccgctctgcagttgcttatgccaaccctcgaatccgaaacagaagcagctgttcccaaagtaaccttgtgctcggagaaggaaggtctgagtctgaacagcgaagagaaactagactccgcgtgcttgctgaaacctcgagaggtagtcgagccagtggttcccaaagagccccagaatccccctgcgaatgcggctccgggatctcagagggcaaggaaaggcagaaagaaaaaatccaaggagcaacccgcagcatgtgtagaaggctacgcgcgtcgcctccggtcctccagtagaggccagtcaaccgtcgggacagaggtcacctcacaggtggacaatctacaaaagcagccccaggaggaactgcagaaggaaagcgggcctctccagggcaaaggcaaaccgagggcttgggcacgcgcttgggccgcagccttggagaactctagccccaagaatttggagcggtccgccggacagtcttctcctgctaaagagggtcctctggatctgtaccctaaattggctgataccattcagacaaatccaataccaacccatctgtctttagttgacagcgcacaggcctccccaatgccagtggatagcgtggaggcggaccctaccgccgtcggaccagtcctggcaggcccagttccagttgaccctggcctggtcgaccttgcatcgacttcaagcgagttagtggagcccttgcccgcagaacctgtactcatcaaccccgtcctcgctgattctgccgcagtggaccctgctgtggtgcccatctccgacaatttaccacctgtcgacgccgtgccaagtggccctgcaccagtcgatttagcactcgtggaccccgtgcctaatgatctcactccagttgatcctgtcctggtgaaatcaaggcccaccgatcccaggcggggagccgtatcaagtgcgctcggagggagcgcccctcaattgctcgtggaaagcgagtctttggacccaccgaaaaccatcattcctgaagtgaaagaggtggttgattccctgaaaatcgaaagcgggacatccgcaacaacacatgaagccaggccacgccctctgagcctgagcgaatatcgtaggcgccgacagcagcgtcaggctgaaaccgaagaacgatctccccaaccccctactggaaaatggccaagcctgcctgagactccaacgggcttggctgatattccctgcttggtcatccctcccgcacctgccaagaaaacagccctacagaggtcccctgaaactcccctggagatctgtctggtgccagtgggtccctcaccagcctcgccatctcctgagcccccagtgagcaaacccgtcgcgtcctcacctacagaacaggtcccgagccaggagatgccccttttagccagacccagccccccagtccaatctgtgagtcctgcggtgcccacacccccatctatgtccgcagcactgccttttcctgccggaggactgggcatgcccccttccctgcctcctccccctctacaaccgccaagcctgcctctgtcaatgggccctgttctgccggatccttttacacactacgcacccctgcctagctggccttgctatcctcacgtatccccatctgggtatccgtgcctaccacccccacccaccgttcccttggtgtccggaacacccggtgcctacgctgtgccacccacttgtagcgttccctgggcccctcctcccgcacccgtgtctccatattcttcgacgtgcacgtacgggccattgggctggggacccggtccccaacacgccccattctggtcaaccgtcccccctccgcctctcccccctgcaagcattgggcgagctgtgccacagccaaagatggaatcacgcggtactcccgctggacctccagagaacgtcctccccctgtctatggcccctcccctcagcctaggactccctggacacggcgctccacagaccgagcctaccaaagtggaggttaagcctgtacccgctagccctcacccaaaacacaaggtgtcagccctcgtgcaaagccctcagatgaaggcattggcctgtgtgtcagcagaaggggtgactgtcgaggaaccggcttccgagaggcttaaacctgaaactcaggagactcgccctcgggaaaaaccccctctcccagcgactaaggctgtgcctacaccaagacagtccacggtaccaaaactgcccgcagtgcacccggctcgcctgcggaagctgagctttttacccacccccagaactcagggtagcgaggatgtggtgcaggcctttatctccgaaattggtattgaagcctccgacctgtcatcgctgttggagcagttcgaaaagagcgaagctaagaaagaatgccctcctcccgcaccagcggacagcctcgccgtggggaactccggcagcagctgttcctccagcggacggagcagaagatgtagctcgtcttcatcttcttcaagttctagtagtagcagctctagtagctcatccagctctaggtctcgctcacgctccccctcccccaggagacgctccgaccgaaggcgcagatactcctcatatcgctcccatgaccattaccagaggcagagagtgctgcagaaggagagggcaatcgaagaaaggcgagtggtgtttatcggtaaaatcccgggaagaatgacccgcagcgagctgaagcagcggttcagcgtgtttggagaaatagaagaatgtactattcatttccgggttcaaggagataactacgggtttgtgacctaccgctacgccgaggaggcctttgcagcgattgagagtggccacaaattaaggcaggcagacgagcagcccttcgacctgtgcttcgggggacgcagacagttctgtaaaaggagctactcagacttagactctaaccgcgaggacttcgatcctgcgccagtcaaatccaaattcgacagccttgactttgacaccctgctcaagcaagcccagaagaatttgcgcagatag

SEQ ID NO: 106959 - DNA, 4203 bp, Artificial Sequence
  derived and/or modified sequence
atggccgccagaagaggcagaagagacggcgtggcccccccccccagcggcggccccggccccgaccccggcggcggcgccagaggcagcggctggggcagcagaagccaggccccctacggcaccctgggcgccgtgagcggcggcgagcaggtgctgctgcacgaggaggccggcgacagcggcttcgtgagcctgagcagactgggccccagcctgagagacaaggacctggagatggaggagctgatgctgcaggacgagaccctgctgggcaccatgcagagctacatggacgccagcctgatcagcctgatcgaggacttcggcagcctgggcgagagcagactgagcctggaggaccagaacgaggtgagcctgctgaccgccctgaccgagatcctggacaacgccgacagcgagaacctgagccccttcgacagcatccccgacagcgagctgctggtgagccccagagagggcagcagcctgcacaagctgctgaccctgagcagaaccccccccgagagagacctgatcacccccgtggaccccctgggccccagcaccggcagcagcagaggcagcggcgtggagatgagcctgcccgaccccagctgggacttcagcccccccagcttcctggagaccagcagccccaagctgcccagctggagaccccccagaagcagacccagatggggccagagcccccccccccagcagagaagcgacggcgaggaggaggaggaggtggccagcttcagcggccagatcctggccggcgagctggacaactgcgtgagcagcatccccgacttccccatgcacctggcctgccccgaggaggaggacaaggccaccgccgccgagatggccgtgcccgccgccggcgacgagagcatcagcagcctgagcgagctggtgagagccatgcacccctactgcctgcccaacctgacccacctggccagcctggaggacgagctgcaggagcagcccgacgacctgaccctgcccgagggctgcgtggtgctggagatcgtgggccaggccgccaccgccggcgacgacctggagatccccgtggtggtgagacaggtgagccccggccccagacccgtgctgctggacgacagcctggagaccagcagcgccctgcagctgctgatgcccaccctggagagcgagaccgaggccgccgtgcccaaggtgaccctgtgcagcgagaaggagggcctgagcctgaacagcgaggagaagctggacagcgcctgcctgctgaagcccagagaggtggtggagcccgtggtgcccaaggagccccagaacccccccgccaacgccgcccccggcagccagagagccagaaagggcagaaagaagaagagcaaggagcagcccgccgcctgcgtggagggctacgccagaagactgagaagcagcagcagaggccagagcaccgtgggcaccgaggtgaccagccaggtggacaacctgcagaagcagccccaggaggagctgcagaaggagagcggccccctgcagggcaagggcaagcccagagcctgggccagagcctgggccgccgccctggagaacagcagccccaagaacctggagagaagcgccggccagagcagccccgccaaggagggccccctggacctgtaccccaagctggccgacaccatccagaccaaccccatccccacccacctgagcctggtggacagcgcccaggccagccccatgcccgtggacagcgtggaggccgaccccaccgccgtgggccccgtgctggccggccccgtgcccgtggaccccggcctggtggacctggccagcaccagcagcgagctggtggagcccctgcccgccgagcccgtgctgatcaaccccgtgctggccgacagcgccgccgtggaccccgccgtggtgcccatcagcgacaacctgccccccgtggacgccgtgcccagcggccccgcccccgtggacctggccctggtggaccccgtgcccaacgacctgacccccgtggaccccgtgctggtgaagagcagacccaccgaccccagaagaggcgccgtgagcagcgccctgggcggcagcgccccccagctgctggtggagagcgagagcctggacccccccaagaccatcatccccgaggtgaaggaggtggtggacagcctgaagatcgagagcggcaccagcgccaccacccacgaggccagacccagacccctgagcctgagcgagtacagaagaagaagacagcagagacaggccgagaccgaggagagaagcccccagccccccaccggcaagtggcccagcctgcccgagacccccaccggcctggccgacatcccctgcctggtgatcccccccgcccccgccaagaagaccgccctgcagagaagccccgagacccccctggagatctgcctggtgcccgtgggccccagccccgccagccccagccccgagccccccgtgagcaagcccgtggccagcagccccaccgagcaggtgcccagccaggagatgcccctgctggccagacccagcccccccgtgcagagcgtgagccccgccgtgcccaccccccccagcatgagcgccgccctgcccttccccgccggcggcctgggcatgccccccagcctgccccccccccccctgcagccccccagcctgcccctgagcatgggccccgtgctgcccgaccccttcacccactacgcccccctgcccagctggccctgctacccccacgtgagccccagcggctacccctgcctgccccccccccccaccgtgcccctggtgagcggcacccccggcgcctacgccgtgccccccacctgcagcgtgccctgggcccccccccccgcccccgtgagcccctacagcagcacctgcacctacggccccctgggctggggccccggcccccagcacgcccccttctggagcaccgtgccccccccccccctgccccccgccagcatcggcagagccgtgccccagcccaagatggagagcagaggcacccccgccggcccccccgagaacgtgctgcccctgagcatggccccccccctgagcctgggcctgcccggccacggcgccccccagaccgagcccaccaaggtggaggtgaagcccgtgcccgccagcccccaccccaagcacaaggtgagcgccctggtgcagagcccccagatgaaggccctggcctgcgtgagcgccgagggcgtgaccgtggaggagcccgccagcgagagactgaagcccgagacccaggagaccagacccagagagaagccccccctgcccgccaccaaggccgtgcccacccccagacagagcaccgtgcccaagctgcccgccgtgcaccccgccagactgagaaagctgagcttcctgcccacccccagaacccagggcagcgaggacgtggtgcaggccttcatcagcgagatcggcatcgaggccagcgacctgagcagcctgctggagcagttcgagaagagcgaggccaagaaggagtgccccccccccgcccccgccgacagcctggccgtgggcaacagcggcagcagctgcagcagcagcggcagaagcagaagatgcagcagcagcagcagcagcagcagcagcagcagcagcagcagcagcagcagcagcagcagcagaagcagaagcagaagccccagccccagaagaagaagcgacagaagaagaagatacagcagctacagaagccacgaccactaccagagacagagagtgctgcagaaggagagagccatcgaggagagaagagtggtgttcatcggcaagatccccggcagaatgaccagaagcgagctgaagcagagattcagcgtgttcggcgagatcgaggagtgcaccatccacttcagagtgcagggcgacaactacggcttcgtgacctacagatacgccgaggaggccttcgccgccatcgagagcggccacaagctgagacaggccgacgagcagcccttcgacctgtgcttcggcggcagaagacagttctgcaagagaagctacagcgacctggacagcaacagagaggacttcgaccccgcccccgtgaagagcaagttcgacagcctggacttcgacaccctgctgaagcaggcccagaagaacctgagaagatag

SEQ ID NO: 106960 - DNA, 513 bp, Artificial Sequence
  derived and/or modified sequence
atgggctgctgcggctgcagcggcggctgcggcagcggctgcggcgggtgcggttcaggctgtggaggatgtgggagcggatgcggtgggtacggcagcggctgcggaggttgtggaagttcctgttgcgtgccagtttgctgctgtaagccggtgtgctgttgtgttcctgcttgctcctgtagcagctgtgggtcttgcggaggaagcaagggcgactgcggctgcggcagctgtggcggatcgaaagggggttgtggaagttgtggctgcagtcaatgcaactgctgcaagccatgctgttgcagctccggctgtggcagctgttgccagtcttcatgctgcaacccctgctgttgccagtcgtcttgctgtgtgcccgtgtgctgtcaaagttcgtgctgcaagccttgttgctgccaaagctcctgctgcgtgccatcttcctgctgccgttcttgctgttcgaagagctcttgttgcgtgcctatctgttgccaatataaaatttag

SEQ ID NO: 106961 - protein, 219 aa, Artificial Sequence
  derived and/or modified sequence
MVIHKNPPDTPTESQFTRFLCSSPLEAETPPNGPDCGYGSFHQQYWLDGKIIAVGVIDILPNCVSSVYLYYDPDYSFLSLGVYSALREIAFTRQLHEKTSQLSYYYMGFYIHSCPKMKYKGQYRPSDLLCPETYVWVPIEQCLPSLENSKYCRFNQDPEAVDEDRSTEPDRLQVFHKRAIMPYGVYKKQQKDPSEEAAVLQYASLVGQKCSERMLLFRN

SEQ ID NO: 106962 - protein, 403 aa, Artificial Sequence
  derived and/or modified sequence
MDSTMDDAVAGDFALINKLDIQCDLKTLSDDIKESLESEGKNSKKEEPQELLQSQDFVGEKLGSGEPSHSVKVHTVPKPGKGADLSKPPCRKAKEIRKERKRLKLMQQNPAGELEGFQAQGHPPSLFPPKAKSNQPKSLEDLIFESLPENASHKLEVRVVRSSPPSSQFKATLLESYQVYKRYQMVIHKNPPDTPTESQFTRFLCSSPLEAETPPNGPDCGYGSFHQQYWLDGKIIAVGVIDILPNCVSSVYLYYDPDYSFLSLGVYSALREIAFTRQLHEKTSQLSYYYMGFYIHSCPKMKYKGQYRPSDLLCPETYVWVPIEQCLPSLENSKYCRFNQDPEAVDEDRSTEPDRLQVFHKRAIMPYGVYKKQQKDPSEEAAVLQYASLVGQKCSERMLLFRN

SEQ ID NO: 106963 - DNA, 660 bp, Artificial Sequence
  derived and/or modified sequence
atggtgatccacaagaacccccccgacacccccaccgagagccagttcaccagattcctgtgcagcagccccctggaggccgagaccccccccaacggccccgactgcggctacggcagcttccaccagcagtactggctggacggcaagatcatcgccgtgggcgtgatcgacatcctgcccaactgcgtgagcagcgtgtacctgtactacgaccccgactacagcttcctgagcctgggcgtgtacagcgccctgagagagatcgccttcaccagacagctgcacgagaagaccagccagctgagctactactacatgggcttctacatccacagctgccccaagatgaagtacaagggccagtacagacccagcgacctgctgtgccccgagacctacgtgtgggtgcccatcgagcagtgcctgcccagcctggagaacagcaagtactgcagattcaaccaggaccccgaggccgtggacgaggacagaagcaccgagcccgacagactgcaggtgttccacaagagagccatcatgccctacggcgtgtacaagaagcagcagaaggaccccagcgaggaggccgccgtgctgcagtacgccagcctggtgggccagaagtgcagcgagagaatgctgctgttcagaaactag

SEQ ID NO: 106964 - DNA, 1212 bp, Artificial Sequence
  derived and/or modified sequence
atggacagcaccatggacgacgccgtggccggcgacttcgccctgatcaacaagctggacatccagtgcgacctgaagaccctgagcgacgacatcaaggagagcctggagagcgagggcaagaacagcaagaaggaggagccccaggagctgctgcagagccaggacttcgtgggcgagaagctgggcagcggcgagcccagccacagcgtgaaggtgcacaccgtgcccaagcccggcaagggcgccgacctgagcaagcccccctgcagaaaggccaaggagatcagaaaggagagaaagagactgaagctgatgcagcagaaccccgccggcgagctggagggcttccaggcccagggccacccccccagcctgttcccccccaaggccaagagcaaccagcccaagagcctggaggacctgatcttcgagagcctgcccgagaacgccagccacaagctggaggtgagagtggtgagaagcagcccccccagcagccagttcaaggccaccctgctggagagctaccaggtgtacaagagataccagatggtgatccacaagaacccccccgacacccccaccgagagccagttcaccagattcctgtgcagcagccccctggaggccgagaccccccccaacggccccgactgcggctacggcagcttccaccagcagtactggctggacggcaagatcatcgccgtgggcgtgatcgacatcctgcccaactgcgtgagcagcgtgtacctgtactacgaccccgactacagcttcctgagcctgggcgtgtacagcgccctgagagagatcgccttcaccagacagctgcacgagaagaccagccagctgagctactactacatgggcttctacatccacagctgccccaagatgaagtacaagggccagtacagacccagcgacctgctgtgccccgagacctacgtgtgggtgcccatcgagcagtgcctgcccagcctggagaacagcaagtactgcagattcaaccaggaccccgaggccgtggacgaggacagaagcaccgagcccgacagactgcaggtgttccacaagagagccatcatgccctacggcgtgtacaagaagcagcagaaggaccccagcgaggaggccgccgtgctgcagtacgccagcctggtgggccagaagtgcagcgagagaatgctgctgttcagaaactag

SEQ ID NO: 106965 - DNA, 660 bp, Artificial Sequence
  derived and/or modified sequence
atggtgattcacaagaaccctccggatactcctactgaaagccagtttacgaggttcctgtgtagttcacctttagaagccgagacccctcctaatggtcccgattgcggctatggctcatttcatcagcagtactggctcgatggcaagatcatcgcggtgggcgttattgacattctgccaaactgtgtgtcaagtgtgtatctgtactacgaccctgattatagctttttgagcttgggcgtctactccgcactgcgcgaaatcgccttcactagacagctccacgaaaagacctcacaattgtcatattattacatgggattttatattcactcctgccccaaaatgaaatataaagggcagtaccggcccagcgacctgctctgcccagaaacttatgtgtgggtgcctatagaacagtgcctgccttctctggagaactccaagtattgcaggtttaatcaggaccctgaggccgtggatgaggatcgaagtacagaaccagacagactgcaagtgttccataaacgggctattatgccttatggggtttataagaagcagcagaaagacccctcagaagaggctgctgtacttcagtatgcgtcacttgtgggccaaaagtgtagtgagcggatgctcctcttcaggaattag

SEQ ID NO: 106966 - DNA, 1212 bp, Artificial Sequence
  derived and/or modified sequence
atggacagcaccatggacgatgcagtggcgggtgactttgcactgatcaataaactggatattcagtgcgacctaaaaacactctccgatgatatcaaggaatccttggagtctgaaggaaaaaactctaagaaagaggagccgcaggaattgcttcagagccaagattttgtgggcgagaagttgggctctggggaaccgagccattcggtgaaggtgcatacagtgcccaagccggggaaaggcgccgacttgagtaagcccccttgcaggaaggctaaagaaattcggaaggagagaaagagactcaagttgatgcagcaaaaccctgccggagagctggagggcttccaggcacagggacaccccccctctctgtttcctccgaaagctaagtcgaaccagccaaagagtctagaagatctgatctttgagtcattaccagaaaacgccagccacaaattggaagttcgggtggtgcgcagtagtccaccttcctctcagtttaaagcaaccctgctggaaagttaccaagtgtacaagcgttaccagatggttattcacaaaaatccccccgacacacctaccgaatctcagttcacacgcttcctgtgtagttcacccttggaggccgagaccccgcctaatggccctgattgcggatacggatcctttcaccaacaatactggctggacggaaagatcattgcagtcggcgtgatcgacattctgcctaattgcgtgtcctcagtctacctctactacgatcctgattatagctttttgtcactgggcgtatattctgctcttagagagatcgcgttcactcgccagttgcatgaaaaaacctctcagctgtcttattattacatggggttttatatacacagttgtcccaagatgaaatacaagggtcaatatcgcccttcggacctgttatgccctgaaacctacgtatgggtcccaatagagcagtgcctaccaagcctggaaaactccaagtattgtagattcaaccaggaccccgaggccgtggacgaagacagatctactgaacctgatcgattgcaggtgtttcacaaacgcgcaatcatgccatacggggtgtacaaaaagcaacagaaggacccgtccgaagaggccgcagttcttcagtatgcctctctggttggacagaagtgcagtgaacgcatgctgctgtttagaaactag

SEQ ID NO: 106967 - DNA, 660 bp, Artificial Sequence
  derived and/or modified sequence
atggtgatccacaagaaccccccagacacccccacagagagccagttcacccgcttcctgtgcagcagccccctggaggccgagaccccacccaacggccctgactgtggctacggcagcttccaccagcagtactggctggatggcaagatcatcgctgtgggcgtgattgacatcctgcccaactgtgtgtcctctgtgtacctgtactatgaccctgactacagcttcctgagcctgggcgtgtacagcgccctgcgggagatcgccttcacccggcagctgcacgagaagaccagccagctgagctactactacatgggcttctacatccacagctgccccaagatgaagtacaagggccagtaccggcccagcgacctgctgtgcccagagacctacgtgtgggtgcccatcgagcagtgcctgcccagcctggagaacagcaagtactgccgcttcaaccaggaccctgaggccgtggatgaagatagaagcacagagccagaccggctgcaggtgttccacaagagggccatcatgccctatggagtgtacaagaagcagcagaaggaccccagcgaggaggccgctgtgctgcagtatgccagcctggtgggccagaagtgcagcgagaggatgctgctcttcaggaactag

SEQ ID NO: 106968 - DNA, 1212 bp, Artificial Sequence
  derived and/or modified sequence
atggacagcaccatggatgatgctgtggccggggactttgccctgatcaacaagctggacatccagtgtgacctgaagaccctgagtgatgacatcaaggagagcctggagagcgagggcaagaacagcaagaaggaggagccccaggagctgctgcagagccaggactttgtgggggagaagctgggcagcggggagcccagccacagcgtgaaggtgcacacagtgcccaagccaggaaaaggagctgacctgagcaagccaccctgcaggaaggccaaggagatcaggaaggagaggaagaggctgaagctgatgcagcagaacccagctggggagctggagggcttccaggcccagggccacccccccagcctcttcccccccaaggccaagagcaaccagcccaagagcctggaggacctgatctttgagagcctgcctgaaaatgccagccacaagctggaggtgcgggtggtgcgcagcagcccccccagcagccagttcaaggccaccctgctggagagctaccaggtgtacaagcgctaccagatggtgatccacaagaaccccccagacacccccacagagagccagttcacccgcttcctgtgcagcagccccctggaggccgagaccccacccaacggccctgactgtggctacggcagcttccaccagcagtactggctggatggcaagatcatcgctgtgggcgtgattgacatcctgcccaactgtgtgtcctctgtgtacctgtactatgaccctgactacagcttcctgagcctgggcgtgtacagcgccctgcgggagatcgccttcacccggcagctgcacgagaagaccagccagctgagctactactacatgggcttctacatccacagctgccccaagatgaagtacaagggccagtaccggcccagcgacctgctgtgcccagagacctacgtgtgggtgcccatcgagcagtgcctgcccagcctggagaacagcaagtactgccgcttcaaccaggaccctgaggccgtggatgaagatagaagcacagagccagaccggctgcaggtgttccacaagagggccatcatgccctatggagtgtacaagaagcagcagaaggaccccagcgaggaggccgctgtgctgcagtatgccagcctggtgggccagaagtgcagcgagaggatgctgctcttcaggaactag

SEQ ID NO: 106969 - DNA, 660 bp, Artificial Sequence
  derived and/or modified sequence
atggtgatccacaagaacccccccgacacccccaccgagagccagttcacccgtttcctgtgtagcagtcccttagaggctgagacaccccctaacggtcccgattgcggctatggcagttttcatcagcagtactggttggatggcaagatcatcgctgtgggggtcattgatattctgccgaactgtgtttcatctgtatacctctactacgacccggactattcttttttgagtttgggcgtctattctgcgttgcgtgagattgcatttactcggcagttacacgagaaaacgtcgcagctctcttactactatatgggtttttatatacatagctgccctaagatgaaatacaaaggccagtacaggccctcagacctcttgtgtccggaaacgtacgtgtgggtcccaattgagcagtgcttgccctcactcgaaaattctaagtactgtagattcaatcaggaccctgaggcagttgacgaagatcgcagcaccgagcctgatcggctacaagtattccacaagcgggcaatcatgccttacggcgtctacaaaaaacaacagaaagacccatctgaggaggcggccgtgcttcaatatgcatctttggtgggccagaagtgcagcgagcgaatgctgttgttccggaattag

SEQ ID NO: 106970 - DNA, 1212 bp, Artificial Sequence
  derived and/or modified sequence
atggacagcaccatggacgacgccgtggccggcgacttcgccctgatcaataaactggatattcagtgcgatttaaagactttatcggacgacattaaggaatcacttgaatctgaggggaaaaatagtaaaaaggaagagccgcaggaactccttcagtcacaggattttgtcggcgagaagttaggttcaggggagccatctcacagtgtcaaggttcatacggtcccgaagcctggaaagggggctgatctgtcaaaaccaccctgtaggaaagccaaggaaataaggaaggaacggaagcggctgaagctcatgcagcagaaccctgccggcgagcttgagggctttcaggctcaaggccatccacccagcctttttcctccaaaagcaaagtctaatcagccaaaatcgttggaggacctcatttttgagtcacttcccgaaaacgcttcacataaactagaagtgcgggtcgttaggtcgagtccaccctcctcccaattcaaggccacactgttggaatcctaccaggtctacaaacgataccaaatggtgatacataaaaacccgccggacacgccaacagagtctcagtttacacgctttctctgttccagccccctagaggctgagacacccccgaacggccccgattgcgggtatgggagctttcatcagcagtattggttggatggcaaaatcatcgctgtgggcgtgattgatatcctgcccaactgcgtgagcagtgtgtacctctactacgacccagactattcattcctaagcctcggggtttacagcgccctgagggaaattgcttttaccaggcagctccatgaaaagacctcccagctcagttactactacatgggtttttacattcacagttgccctaagatgaaatacaagggccagtatcgtccatccgacctgctttgcccagaaacctacgtgtgggtgccaatagaacagtgcttgccatctttggaaaactcgaagtactgccggtttaaccaggacccagaggcagtggacgaggacagaagtaccgaacctgaccggctccaggtgttccacaagagggcaatcatgccctacggagtctacaagaagcagcagaaagatccctctgaagaagccgcagtgctgcagtatgcctcgttggttggacagaaatgcagcgagcgcatgctgttgtttcggaactag

SEQ ID NO: 106971 - DNA, 660 bp, Artificial Sequence
  derived and/or modified sequence
atggtgattcataaaaatccacctgatacccctacggagtcccagttcactagatttctgtgcagttcaccgctcgaggctgaaaccccccctaatggcccagattgtggttatggctcatttcaccagcagtattggttagatgggaagatcatcgccgtgggtgtcattgatatcctgcccaactgtgtttcatccgtatacctgtactacgacccagattattcttttctttccctgggggtgtattcagctctgagggaaatcgcttttacgcgccaattacacgagaaaacatcacagctctcctactactacatgggcttctacattcacagctgccctaaaatgaaatataagggacaataccgtccatccgacctactgtgtcccgagacctatgtgtgggtccccattgagcaatgtttgccttctctggagaattctaagtactgcagatttaaccaggacccagaagctgtggatgaagataggtccacagagccagatcgactgcaggtctttcacaagcgcgcaattatgccttacggagtgtacaagaagcagcaaaaggacccctctgaggaggctgccgtccttcagtatgcatccctagtcggtcagaaatgcagtgagaggatgcttttgtttcggaattag

SEQ ID NO: 106972 - DNA, 1212 bp, Artificial Sequence
  derived and/or modified sequence
atggactcaacaatggacgatgccgtggctggagattttgctctgattaataagctggacatacagtgtgacctgaagacactttcagatgatatcaaggagagcctggagtccgaaggcaaaaattcaaagaaagaggaaccccaagagctgctccaatcacaagattttgtcggagagaaattgggctcgggtgaacctagtcatagtgtgaaagttcacacggtccccaagcccggaaagggcgcagatctgtcaaagcccccttgtaggaaagcaaaagaaattcgtaaggaaaggaaaagactcaagctaatgcagcaaaatcctgctggcgagctggagggattccaggcccaaggacaccccccatctctttttccgcctaaggccaaatccaatcagcctaagagccttgaggatctcatattcgagtcactgcctgaaaatgctagccacaaacttgaggtgcgcgtggtacgaagctctcctccctcttctcagtttaaagcgaccctactggaatcctaccaggtatacaaacggtaccagatggtgatccataaaaacccccctgacacacccactgaatcccagtttacgcgcttcttgtgctcttccccactcgaggccgagacacctcctaatggcccagactgtggttacggatcctttcatcagcaatattggctggatgggaagattatcgctgtaggcgtgattgacattctgccgaactgtgtttcatctgtttatctatattacgacccggattactcctttctgagtctcggcgtgtatagtgcgttgcgggagatagccttcactaggcagctgcatgaaaagacttcccagctttcttattattacatggggttctatatacacagttgtcctaaaatgaaatacaaaggccagtaccgcccatcagatttactgtgtcccgagacctacgtgtgggtgcctatagagcaatgcttacccagccttgaaaactccaaatactgtcgatttaatcaggatcctgaagcagtggatgaggacaggagcacagaacctgataggctccaggtgtttcacaagcgggctatcatgccttatggcgtatacaagaagcagcagaaagatcccagtgaggaagctgcagtgctgcaatacgccagtctggtggggcaaaagtgctctgaacgtatgctactcttccgcaactag

SEQ ID NO: 106973 - DNA, 2352 bp, Artificial Sequence
  derived and/or modified sequence
acctgcttgtgttcttgtattcagggcactggagtgcgtgccagctggtctggaagcagctccagcaagtcacttacacggtggccaggggcggcctgactttcaatccgagacccgccgggaatgactttgggataatcacaacctccggtcctcagtttccttacctgtgaaatggggctgataacgcacagctgtgggaagcaccggcccaaacgcagggcttggggacacgaccaccatccccgcccacgggtccccgcgccaggcttcgctctccacccctcccgccgcgggccccagcgcttcgccgaggtcggccccgggcgccaagaggcgtggtcggcccgagcggaccctcgcggcggccatggcgtcggtggtggaatacaagggcctcagggccggctaccactgcggctactgcgattccaaggagggcaaagcgtcctgcggcatgtgggcacattccatgacagtacaggattatcaggatctcatagaccgaggatggcgaaggtgccgacctttacaatttcagccttcaaaatctcacaagaaggttttgaaaaaaatgttgaaatttctagctaaaggggaggttcccaaaggaagttgtgaggatgagcccatggattccacaatggatgatgctgttgcgggtgactttgcattgataaataaactggatatacagtgtgatcttaaaacactcagtgatgacatcaaagagagtttagagagtgaaggaaaaaattcaaagaaagaagaacctcaggaattacttcagtcacaagatttcgtaggagagaagttgggctctggtgaaccgtcacattcagttaaagttcacacagttcctaagccaggtgagggtggtgagatcatctccaccaagttcgcagttcaaagccacacttctggagtcttaccaggtctataaacgttaccagatggttattcacaagaacccacctgatacgccaaccgaaagccagttcacaagattcctttgcagttcacccttggaggcagagactccccctaatgggccagattgtggctatggctcctttcaccagcagtactggcttgacggaaagatcattgctgtgggggtgattgacatcctcccaaactgtgtatcatctgtgtatttgtactacgatcctgattattcgtttttgtctttgggcgtctactctgcactacgagaaattgcttttactaggcagcttcatgagaaaacttctcaactcagctattattatatgggtttctacattcattcatgtcccaagatgaaatataagggtcagtatagaccttctgatttgctgtgccctgagacatatgtttgggtacccattgagcaatgcctgccttcacttgaaaactccaagtactgccgtttcaaccaggacccagaagcagtggatgaggatcgcagtacggaacctgaccgattgcaggtgtttcacaagagagccatcatgccttacggtgtttataagaaacagcagaaagacccaagtgaggaggctgctgttctgcagtacgccagcctggtggggcagaagtgctccgagcggatgctgctgttcagaaactgacctgttcacctctgccgggaagttcctgtgttgtgctgatgatttgtgccaggatacatattcagtacctgtggggaaataactgtcaccacccacaaattagacattttttattttgactatctatggcttttaaaaaatattttgtggcaatgtatctgtgagaatctcatagttaatataaagattttaaaactgcattatgacctagcccccataattgggatttatcattttggaggattctttctagagcaagatacgctcaaattctcctgtttgtattttgtaaaatgaagaagtgaatctaagtaacttaatcacagttgtgcattttttttggttctgttagagaaattaaaacagactgtttcctcaggcccattttaaactgaacttatgctaggaaaccttaagtatggggaaggtagaaagttcatttcatcacttagaaaatatgtcttctcaagaacaaaactgtgctgttacaactcagtgttcaatgtgaaattgctgccaaatgttatgtagtttaatagagaacttgaaaaaataaaacattaaaatggagcttgtgttagcatcaggtatccatttgttcaggacagtcctgttcatgtctgttgtcttggcatagttttttcccctagaatatagtactcccttttactctaaaaaatatcccagtttggacaataaaatacataattactctagttatattatttgctttacttct

SEQ ID NO: 106974 - protein, 422 aa, Artificial Sequence
  derived and/or modified sequence
MLKFLAKGEVPKGSCEDEPMDSTMDDAVAGDFALINKLDIQCDLKTLSDDIKESLESEGKNSKKEEPQELLQSQDFVGEKLGSGEPSHSVKVHTVPKPGKGADLSKPPCRKAKEIRKERKRLKLMQQNPAGELEGFQAQGHPPSLFPPKAKSNQPKSLEDLIFESLPENASHKLEVRLVPVSFEDPEFKSSFSQSFSLYVKYQVAIHQDPPDECGKTEFTRFLCSSPLEAETPPNGPDCGYGSFHQQYWLDGKIIAVGVIDILPNCVSSVYLYYDPDYSFLSLGVYSALREIAFTRQLHEKTSQLSYYYMGFYIHSCPKMKYKGQYRPSDLLCPETYVWVPIEQCLPSLENSKYCRFNQDPEAVDEDRSTEPDRLQVFHKRAIMPYGVYKKQQKDPSEEAAVLQYASLVGQKCSERMLLFRN

SEQ ID NO: 106975 - DNA, 1269 bp, Artificial Sequence
  derived and/or modified sequence
atgctgaagttcctggccaagggcgaggtgcccaagggcagctgcgaggacgagcccatggacagcaccatggacgacgccgtggccggcgacttcgccctgatcaacaagctggacatccagtgcgacctgaagaccctgagcgacgacatcaaggagagcctggagagcgagggcaagaacagcaagaaggaggagccccaggagctgctgcagagccaggacttcgtgggcgagaagctgggcagcggcgagcccagccacagcgtgaaggtgcacaccgtgcccaagcccggcaagggcgccgacctgagcaagcccccctgcagaaaggccaaggagatcagaaaggagagaaagagactgaagctgatgcagcagaaccccgccggcgagctggagggcttccaggcccagggccacccccccagcctgttcccccccaaggccaagagcaaccagcccaagagcctggaggacctgatcttcgagagcctgcccgagaacgccagccacaagctggaggtgagactggtgcccgtgagcttcgaggaccccgagttcaagagcagcttcagccagagcttcagcctgtacgtgaagtaccaggtggccatccaccaggacccccccgacgagtgcggcaagaccgagttcaccagattcctgtgcagcagccccctggaggccgagaccccccccaacggccccgactgcggctacggcagcttccaccagcagtactggctggacggcaagatcatcgccgtgggcgtgatcgacatcctgcccaactgcgtgagcagcgtgtacctgtactacgaccccgactacagcttcctgagcctgggcgtgtacagcgccctgagagagatcgccttcaccagacagctgcacgagaagaccagccagctgagctactactacatgggcttctacatccacagctgccccaagatgaagtacaagggccagtacagacccagcgacctgctgtgccccgagacctacgtgtgggtgcccatcgagcagtgcctgcccagcctggagaacagcaagtactgcagattcaaccaggaccccgaggccgtggacgaggacagaagcaccgagcccgacagactgcaggtgttccacaagagagccatcatgccctacggcgtgtacaagaagcagcagaaggaccccagcgaggaggccgccgtgctgcagtacgccagcctggtgggccagaagtgcagcgagagaatgctgctgttcagaaactag

SEQ ID NO: 106976 - DNA, 1269 bp, Artificial Sequence
  derived and/or modified sequence
atgctgaagttcctcgcgaaaggcgaagttccgaagggatcttgtgaggatgagcctatggattccacaatggacgatgcagtcgctggggacttcgccctaatcaataaactggatatccaatgcgatctcaagactctctctgatgatattaaagaaagtcttgagagtgaaggcaaaaatagcaagaaagaagagccgcaagagctgctgcagtcacaggatttcgttggcgaaaaactgggctctggtgagcctagccacagtgttaaagtgcacaccgtgcccaagcccggcaagggggcggatctaagcaagcctccatgtcgtaaagcaaaggagattcgaaaggaaaggaaacggctgaaattaatgcagcaaaacccggcgggcgagcttgaaggctttcaggcacaggggcacccaccatccctgtttcctcccaaggctaagagtaaccagcctaagtctttagaggacttaatctttgaatcactcccagaaaacgcaagtcacaaattagaagtgcgactcgtccctgtcagttttgaggatcccgaattcaagtcttccttttcccaatcattttccttgtacgttaagtaccaggttgcaattcatcaggacccgcccgacgaatgtggaaaaaccgagtttacaaggttcttgtgttcttcgcccctagaggccgaaaccccccccaacgggcccgattgtggatacgggtcttttcaccaacagtattggttggatggcaagattatcgctgttggcgtgattgatattcttcctaactgcgtctcctccgtctacctctactacgacccggactattcgttcttgagtttgggggtttactcagcgctacgagagatagccttcacacgccagctccacgaaaagacatctcagctctcttattattacatggggttttatatacatagttgcccgaagatgaagtacaaaggccagtacagaccgtccgatttactgtgccccgaaacatatgtatgggtcccaattgagcagtgcctcccgtctctcgagaatagcaagtattgtcggttcaatcaggacccagaagccgtagatgaggatcggtctaccgagcccgaccgcctgcaggtgttccacaagcgagctatcatgccttatggggtctataaaaagcagcagaaagacccttcagaggaagccgcagtgcttcaatatgcctcgctggtgggccagaagtgtagtgaaaggatgctgctgtttcggaattag

SEQ ID NO: 106977 - DNA, 1269 bp, Artificial Sequence
  derived and/or modified sequence
atgctgaagttcctggccaagggggaggtgcccaagggcagctgtgaagatgagcccatggacagcaccatggatgatgctgtggccggggactttgccctgatcaacaagctggacatccagtgtgacctgaagaccctgagtgatgacatcaaggagagcctggagagcgagggcaagaacagcaagaaggaggagccccaggagctgctgcagagccaggactttgtgggggagaagctgggcagcggggagcccagccacagcgtgaaggtgcacacagtgcccaagccaggaaaaggagctgacctgagcaagccaccctgcaggaaggccaaggagatcaggaaggagaggaagaggctgaagctgatgcagcagaacccagctggggagctggagggcttccaggcccagggccacccccccagcctcttcccccccaaggccaagagcaaccagcccaagagcctggaggacctgatctttgagagcctgcctgaaaatgccagccacaagctggaggtgcggctggtgcctgtgtcctttgaggaccctgagttcaagagcagcttcagccagagcttcagcctgtatgtgaagtaccaggtggccatccaccaggaccccccagatgaatgtgggaagacagagttcacccgcttcctgtgcagcagccccctggaggccgagaccccaccaaatggaccagactgtggctacggcagcttccaccagcagtactggctggatggcaagatcatcgctgtgggcgtcatcgacatcctgcccaactgtgtgtcctctgtgtacctgtactatgaccctgactacagcttcctgagcctgggcgtgtacagcgccctgcgggagatcgccttcacccggcagctgcacgagaagaccagccagctgagctactactacatgggcttctacatccacagctgccccaagatgaagtacaagggccagtaccggcccagcgacctgctgtgcccagagacctacgtgtgggtgcccatcgagcagtgcctgcccagcctggagaacagcaagtactgccgcttcaaccaggaccctgaggccgtggatgaggacaggagcacagagccagaccggctgcaggtgttccacaagagggccatcatgccctacggcgtgtacaagaagcagcagaaggaccccagcgaggaggccgctgtgctgcagtatgccagcctggtgggccagaagtgcagcgagaggatgctgctcttcagaaattag

SEQ ID NO: 106978 - DNA, 1269 bp, Artificial Sequence
  derived and/or modified sequence
atgctgaagttcctggccaagggcgaggtgcccaagggcagctgcgaagacgagccgatggacagcacaatggatgacgccgttgctggtgacttcgctctcataaacaagctggacatccaatgcgaccttaaaaccctctctgatgatattaaggagagtctggagtccgaggggaaaaacagcaagaaagaagagccacaggaactcctgcagtcgcaggacttcgttggcgaaaagctaggctccggcgaacccagccattctgtcaaggtgcatacggtgcctaagcccggcaaaggagctgacctgtctaagcccccttgtaggaaggctaaggagattcgcaaggagcgaaaacgtctgaaactgatgcaacaaaaccctgcaggagaactcgagggcttccaggcccagggccatcctcctagtctgttccctccgaaggccaaaagtaatcagccaaaatctcttgaggacctgattttcgagtctttaccagaaaatgcctcccataagttggaagtccgacttgtacctgtgtcattcgaggaccccgagttcaaatcctccttctctcagtctttctcactctacgttaagtaccaagtggcgatccatcaggatccacccgatgaatgtggcaaaactgaattcactagattcttgtgtagttcacctcttgaggccgagacacctcctaacggccccgattgcggctacggtagtttccaccagcagtattggcttgacggaaagattattgccgtgggagtcattgacatcctgcctaactgcgtgtctagcgtctatctgtactatgatcccgattatagtttcctgagccttggtgtgtatagtgccctcagggagattgcattcactaggcagcttcacgagaaaacctctcagttgtcgtattactacatggggttctatattcacagttgccctaaaatgaaatacaaaggtcagtacagacccagcgatctgctttgtccagaaacttacgtctgggtcccaatcgagcaatgtttgccaagtctggagaatagcaaatattgccgctttaaccaagatcctgaggctgtcgacgaggatcggtcgacagagccagataggttgcaggtgttccacaagcgggcaattatgccttatggcgtctataaaaagcagcagaaagacccatccgaggaggctgccgtattacagtacgcttctttggtaggccagaagtgttccgaaagaatgttgttgttccgtaactag

SEQ ID NO: 106979 - DNA, 1269 bp, Artificial Sequence
  derived and/or modified sequence
atgcttaagttcctcgcaaagggcgaggttccaaaaggctcatgcgaggacgagccgatggactctaccatggatgacgctgtggccggagattttgccctcatcaataaattagatatacagtgcgacctcaagactctgagcgacgacataaaggaatctctagagagcgaaggtaaaaacagtaagaaggaggagcctcaggaacttttgcagagtcaagactttgtaggcgagaagctcggatccggcgagccttcacactcagtcaaggtgcacacagtgccaaaacctggcaaaggagccgatttaagcaagcccccttgtcggaaggctaaggagattcgcaaggagaggaaaaggctcaagctgatgcagcagaaccctgccggagaacttgaaggttttcaggcccagggccatcccccttcccttttccctcctaaagctaagagcaaccagccgaagtctctggaggacctgatttttgagtctctgccagaaaatgcaagtcacaagctcgaggttcgcctggtgccagtgtcctttgaggaccccgagttcaaatcctctttctcccagtcttttagcctgtatgttaagtatcaggtggctatccatcaggatccacctgatgagtgtggtaaaaccgaatttaccagattcctatgttcatctccactggaagccgagactcctcctaacggccctgattgcgggtatggcagctttcaccagcagtactggctcgatggcaagatcatcgccgttggagtgattgatatccttcccaactgtgttagctcagtatatttgtattacgatcccgactactcgttcctgtcactgggtgtttattctgcactgcgggagatcgccttcaccagacagttgcacgaaaagacgagccaactttcttattactatatgggcttctacatccatagctgtcccaaaatgaagtacaagggccagtatcgacccagcgatctgctgtgccctgagacatacgtgtgggtgccgatcgagcaatgtttacctagcctggagaatagcaagtattgtcggttcaaccaggaccccgaggccgtggatgaggatcgcagcaccgagcccgataggctgcaagtgttccataaacgggcaatcatgccttatggcgtatataaaaaacaacagaaggatccctccgaggaggcagctgtgctgcaatatgcctcattggtgggccagaagtgctctgaaagaatgctgttgtttcggaattag

SEQ ID NO: 106980 - protein, 511 aa, Artificial Sequence
  derived and/or modified sequence
MASVVEYKGLRAGYHCGYCDSKEGKASCGMWAHSMTVQDYQDLIDRGWRRSGKYVYKPVMNQTCCPQYTIRCRPLQFQPSKSHKKVLKKMLKFLAKGEVPKGSCEDEPMDSTMDDAVAGDFALINKLDIQCDLKTLSDDIKESLESEGKNSKKEEPQELLQSQDFVGEKLGSGEPSHSVKVHTVPKPGKGADLSKPPCRKAKEIRKERKRLKLMQQNPAGELEGFQAQGHPPSLFPPKAKSNQPKSLEDLIFESLPENASHKLEVRLVPVSFEDPEFKSSFSQSFSLYVKYQVAIHQDPPDECGKTEFTRFLCSSPLEAETPPNGPDCGYGSFHQQYWLDGKIIAVGVIDILPNCVSSVYLYYDPDYSFLSLGVYSALREIAFTRQLHEKTSQLSYYYMGFYIHSCPKMKYKGQYRPSDLLCPETYVWVPIEQCLPSLENSKYCRFNQDPEAVDEDRSTEPDRLQVFHKRAIMPYGVYKKQQKDPSEEAAVLQYASLVGQKCSERMLLFRN

SEQ ID NO: 106981 - DNA, 669 bp, Artificial Sequence
  derived and/or modified sequence
atggccagcgtggtggagtacaagggcctgagagccggctaccactgcggctactgcgacagcaaggagggcaaggccagctgcggcatgtgggcccacagcatgaccgtgcaggactaccaggacctgatcgacagaggctggagaagaagcggcaagtacgtgtacaagcccgtgatgaaccagacctgctgcccccagtacaccatcagatgcagacccctgcagttccagcccagcaagagccacaagaaggtgctgaagaagatgctgaagttcctggccaagggcgaggtgcccaagggcagctgcgaggacgagcccatggacagcaccatggacgacgccgtggccggcgacttcgccctgatcaacaagctggacatccagtgcgacctgaagaccctgagcgacgacatcaaggagagcctggagagcgagggcaagaacagcaagaaggaggagccccaggagctgctgcagagccaggacttcgtgggcgagaagctgggcagcggcgagcccagccacagcgtgaaggtgcacaccgtgcccaagcccggcaagggcgccgacctgagcaagcccccctgcagaaaggccaaggagatcagaaaggagagaaagagactgaagctgatgcagcagaaccccgccggcgagctgtag

SEQ ID NO: 106982 - DNA, 1536 bp, Artificial Sequence
  derived and/or modified sequence
atggccagcgtggtggagtacaagggcctgagagccggctaccactgcggctactgcgacagcaaggagggcaaggccagctgcggcatgtgggcccacagcatgaccgtgcaggactaccaggacctgatcgacagaggctggagaagaagcggcaagtacgtgtacaagcccgtgatgaaccagacctgctgcccccagtacaccatcagatgcagacccctgcagttccagcccagcaagagccacaagaaggtgctgaagaagatgctgaagttcctggccaagggcgaggtgcccaagggcagctgcgaggacgagcccatggacagcaccatggacgacgccgtggccggcgacttcgccctgatcaacaagctggacatccagtgcgacctgaagaccctgagcgacgacatcaaggagagcctggagagcgagggcaagaacagcaagaaggaggagccccaggagctgctgcagagccaggacttcgtgggcgagaagctgggcagcggcgagcccagccacagcgtgaaggtgcacaccgtgcccaagcccggcaagggcgccgacctgagcaagcccccctgcagaaaggccaaggagatcagaaaggagagaaagagactgaagctgatgcagcagaaccccgccggcgagctggagggcttccaggcccagggccacccccccagcctgttcccccccaaggccaagagcaaccagcccaagagcctggaggacctgatcttcgagagcctgcccgagaacgccagccacaagctggaggtgagactggtgcccgtgagcttcgaggaccccgagttcaagagcagcttcagccagagcttcagcctgtacgtgaagtaccaggtggccatccaccaggacccccccgacgagtgcggcaagaccgagttcaccagattcctgtgcagcagccccctggaggccgagaccccccccaacggccccgactgcggctacggcagcttccaccagcagtactggctggacggcaagatcatcgccgtgggcgtgatcgacatcctgcccaactgcgtgagcagcgtgtacctgtactacgaccccgactacagcttcctgagcctgggcgtgtacagcgccctgagagagatcgccttcaccagacagctgcacgagaagaccagccagctgagctactactacatgggcttctacatccacagctgccccaagatgaagtacaagggccagtacagacccagcgacctgctgtgccccgagacctacgtgtgggtgcccatcgagcagtgcctgcccagcctggagaacagcaagtactgcagattcaaccaggaccccgaggccgtggacgaggacagaagcaccgagcccgacagactgcaggtgttccacaagagagccatcatgccctacggcgtgtacaagaagcagcagaaggaccccagcgaggaggccgccgtgctgcagtacgccagcctggtgggccagaagtgcagcgagagaatgctgctgttcagaaactag

SEQ ID NO: 106983 - DNA, 1998 bp, Artificial Sequence
  derived and/or modified sequence
attgtggggtggcggcggcggccgcgctagcgacgcggggccgggcggctgagcgttcgcggggccgaggccatggctttctgggcggggggttcgcccagcgtcgtggactatttccctagcgaggacttctaccgctgcggctactgcaagaacgagtcgggcagccgctccaatggtgccgacctttacaatttcagccttcaaaatctcacaagaaggttttgaaaaaaatgttgaaatttctagctaaaggggaggttcccaaaggaagttgtgaggatgagcccatggattccacaatggatgatgctgttgcgggtgactttgcattgataaataaactggatatacagtgtgatcttaaaacactcagtgatgacatcaaagagagtttagagagtgaaggaaaaaattcaaagaaagaagaacctcaggaattacttcagtcacaagatttcgtaggagagaagttgggctctggtgaaccgtcacattcagttaaagttcacacagttcctaagccaggcaaaggggctgatttgagtaagcctccatgtcgaaaagcaaaggaaatccggaaagaaaggaaaaggttaaaactaatgcagcagaacccagctggagaacttgagggtttccaggctcaaggtcacccaccatctttgtttccaccaaaggctaaatccaaccagccaaaatcactcgaagatttaatttttgagtctttaccagagaatgcatcacacaagttagaggtgaggttagtacctgtctcctttgaggacccagagttcaagtcgtctttcagccagtccttttctttgtatgtcaagtatcaagtggccatacaccaggatccacccgatgaatgtgggaagactgagttcacaagattcctttgcagttcacccttggaggcagagactccccctaatgggccagattgtggctatggctcctttcaccagcagtactggcttgacggaaagatcattgctgtgggggtgattgacatcctcccaaactgtgtatcatctgtgtatttgtactacgatcctgattattcgtttttgtctttgggcgtctactctgcactacgagaaattgcttttactaggcagcttcatgagaaaacttctcaactcagctattattatatgggtttctacattcattcatgtcccaagatgaaatataagggtcagtatagaccttctgatttgctgtgccctgagacatatgtttgggtacccattgagcaatgcctgccttcacttgaaaactccaagtactgccgtttcaaccaggacccagaagcagtggatgaggatcgcagtacggaacctgaccgattgcaggtgtttcacaagagagccatcatgccttacggtgtttataagaaacagcagaaagacccaagtgaggaggctgctgttctgcagtacgccagcctggtggggcagaagtgctccgagcggatgctgctgttcagaaactgacctgttcacctctgccgggaagttcctgtgttgtgctgatgatttgtgccaggatacatattcagtacctgtggggaaataactgtcaccacccacaaattagacattttttattttgactatctatggcttttaaaaaatattttgtggcaatgtatctgtgagaatctcatagttaatataaagattttaaaactgcattatgacctagcccccataattgggatttatcattttggaggattctttctagagcaagatacgctcaaattctcctgtttgtattttgtaaaatgaagaagtgaatctaagtaacttaatcacagttgtgcattttttttggttctgttagagaaattaaaacagactgtttcctcaggcccattttaaactgaacttatgctaggaaaccttaagtatggggaaggtagaaagttcatttcatcacttagaaaatatgtcttctcaagaacaaaactgtgctgttacaactcag

SEQ ID NO: 106984 - DNA, 669 bp, Artificial Sequence
  derived and/or modified sequence
atggcatccgtggttgagtataaaggcttgcgtgccggctaccattgcgggtattgcgatagcaaggagggcaaagcatcatgtggaatgtgggcccactccatgaccgtgcaggactaccaggatctgatcgatcgtgggtggaggagatcaggtaaatacgtatataagccagtcatgaatcaaacttgttgccctcagtacacaatcaggtgccggcccctccagttccagccttctaagagccacaagaaggtgcttaagaaaatgctgaaatttctagccaaaggcgaggtgcctaagggatcctgcgaggatgagcccatggacagcactatggatgatgcggtggctggtgattttgccctgataaacaagctggacatacagtgtgacttgaaaacactgtccgacgacattaaggagagtctggaatccgagggaaagaatagcaaaaaggaagagccccaggaactgctgcagtctcaggattttgtgggtgaaaaactgggctccggggagcccagtcacagtgtgaaggtgcacacagtgcctaaaccaggcaaaggcgccgatctctccaagccgccatgccgcaaggctaaggaaataaggaaggagcggaagcgcctgaaactgatgcaacaaaacccggctggcgagctgtag

SEQ ID NO: 106985 - DNA, 1536 bp, Artificial Sequence
  derived and/or modified sequence
atggcctccgtcgttgagtataaggggctgagggccggttatcactgcggctactgtgatagcaaagagggaaaggcatcttgcggcatgtgggcccatagcatgacagttcaggactatcaagacttgattgatcgggggtggagacgttccggtaagtacgtgtataaacccgtgatgaaccagacatgttgtccgcaatataccattagatgtcgaccgttacagttccagcccagtaagagccacaaaaaggttctgaaaaaaatgctaaaatttttagccaagggagaggtcccgaagggcagttgtgaggatgagccaatggattcaacgatggacgacgcagtggccggcgacttcgcattgatcaataaacttgatatccagtgtgatctcaaaactttaagtgacgatataaaagagtctctcgagtccgagggtaaaaacagcaagaaggaggaaccgcaagagttgttgcaatcccaggactttgtaggggaaaaactgggctcaggcgaaccttctcattccgtgaaggtgcatacagtacccaaacccggtaaaggcgcagatctgagtaagcctccatgtagaaaagctaaggaaatccgcaaagagcgcaaacggctcaagttgatgcagcagaaccctgcaggtgagttagaggggtttcaggcacaaggtcatcctccttcgctcttccccccgaaggccaaatccaaccaacccaagtcactggaagatttaattttcgaaagccttccagaaaatgcttctcataaattagaggtccgactcgtgcctgtgtctttcgaagacccagagtttaaaagttcattctcccagagcttctccttgtacgtcaagtatcaggtcgctatacatcaagacccccccgatgagtgcggcaagactgaatttacaagattcctctgctctagcccacttgaagcggagacccctccaaacggccccgattgcggctacgggtccttccaccagcagtattggttggacgggaaaatcatcgcggtgggcgttatcgacattctcccgaactgtgtttcttcagtgtacctctattacgaccccgattactccttcttgtccctcggggtttacagcgcactaagggagattgcttttacaagacagttacacgagaagacctctcagctatcctattattatatgggcttctatatccatagctgtccaaagatgaaatacaaggggcagtatcggccttctgacctcctctgcccagaaacatatgtgtgggtgccgatcgagcagtgtctgccgtctctggaaaacagcaaatactgtcggttcaatcaggatcctgaggcagtggacgaagatcggtccactgaacccgacagacttcaggtattccacaaaagagctatcatgccgtatggggtctataagaagcagcagaaagatccaagcgaagaggccgcagttctccagtatgcctcccttgtgggccagaaatgtagtgaaaggatgctattgttcagaaactag

SEQ ID NO: 106986 - DNA, 669 bp, Artificial Sequence
  derived and/or modified sequence
atggcctctgtggtggagtacaagggcctgcgggccggctaccactgcggctactgtgacagcaaggagggcaaggccagctgtggcatgtgggcccacagcatgacagtgcaggactaccaggacctgattgaccggggctggaggagaagtggcaagtatgtgtacaagcctgtgatgaaccagacctgctgcccccagtacaccatccgctgccggcccctgcagttccagcccagcaagagccacaagaaggtgctgaagaagatgctgaagttcctggccaagggggaggtgcccaagggcagctgtgaagatgagcccatggacagcaccatggatgatgctgtggccggggactttgccctgatcaacaagctggacatccagtgtgacctgaagaccctgagtgatgacatcaaggagagcctggagagcgagggcaagaacagcaagaaggaggagccccaggagctgctgcagagccaggactttgtgggggagaagctgggcagcggggagcccagccacagcgtgaaggtgcacacagtgcccaagccaggaaaaggagctgacctgagcaagccaccctgcaggaaggccaaggagatcaggaaggagaggaagaggctgaagctgatgcagcagaacccagctggggagctgtag

SEQ ID NO: 106987 - DNA, 1536 bp, Artificial Sequence
  derived and/or modified sequence
atggcctctgtggtggagtacaagggcctgcgggccggctaccactgcggctactgtgacagcaaggagggcaaggccagctgtggcatgtgggcccacagcatgacagtgcaggactaccaggacctgattgaccggggctggaggagaagtggcaagtatgtgtacaagcctgtgatgaaccagacctgctgcccccagtacaccatccgctgccggcccctgcagttccagcccagcaagagccacaagaaggtgctgaagaagatgctgaagttcctggccaagggggaggtgcccaagggcagctgtgaagatgagcccatggacagcaccatggatgatgctgtggccggggactttgccctgatcaacaagctggacatccagtgtgacctgaagaccctgagtgatgacatcaaggagagcctggagagcgagggcaagaacagcaagaaggaggagccccaggagctgctgcagagccaggactttgtgggggagaagctgggcagcggggagcccagccacagcgtgaaggtgcacacagtgcccaagccaggaaaaggagctgacctgagcaagccaccctgcaggaaggccaaggagatcaggaaggagaggaagaggctgaagctgatgcagcagaacccagctggggagctggagggcttccaggcccagggccacccccccagcctcttcccccccaaggccaagagcaaccagcccaagagcctggaggacctgatctttgagagcctgcctgaaaatgccagccacaagctggaggtgcggctggtgcctgtgtcctttgaagatcctgagttcaagagcagcttcagccagagcttcagcctgtatgtgaagtaccaggtggccatccaccaggaccccccagatgaatgtgggaagacagagttcacccgcttcctgtgcagcagccccctggaggccgagaccccacccaacggccctgactgtggctacggcagcttccaccagcagtactggctggatggcaagatcatcgctgtgggcgtgattgacatcctgcccaactgtgtgtcctctgtgtacctgtactatgaccctgactacagcttcctgagcctgggcgtgtacagcgccctgcgggagatcgccttcacccggcagctgcacgagaagaccagccagctgagctactactacatgggcttctacatccacagctgccccaagatgaagtacaagggccagtaccggcccagcgacctgctgtgcccagagacctacgtgtgggtgcccatcgagcagtgcctgcccagcctggagaacagcaagtactgccgcttcaaccaggaccctgaggccgtggatgaagatagaagcacagagccagaccggctgcaggtgttccacaagagggccatcatgccctatggagtgtacaagaagcagcagaaggaccccagcgaggaggccgctgtgctgcagtatgccagcctggtgggccagaagtgcagcgagaggatgctgctcttcaggaactag

SEQ ID NO: 106988 - DNA, 669 bp, Artificial Sequence
  derived and/or modified sequence
atggccagcgtggtggagtacaagggcctgcgggccggctaccactgcggatactgcgattccaaggaaggaaaggcctcatgcggtatgtgggctcactcaatgacagttcaggactatcaagatctaattgatagaggctggagaaggtccgggaagtatgtgtacaaaccggttatgaatcagacttgttgcccacaatacaccatccggtgccgacctttacagtttcagccctccaagtcacacaagaaagtcctgaaaaagatgctgaagtttttggcaaagggtgaggtgcctaaaggcagctgtgaagacgagcccatggatagtaccatggatgacgctgtggcaggagactttgccctcatcaataaactggacattcaatgcgaccttaagactctctcagacgatatcaaagagtcactcgagagcgaaggtaagaactctaaaaaagaagagccccaagaactgctccagtctcaagattttgttggcgaaaagctggggagtggagagcctagccacagcgtgaaggtacacactgtccccaaacccgggaagggggctgacctttcaaaacctccctgccgcaaagcgaaggagatcaggaaggagaggaagcggctcaagcttatgcagcaaaaccctgccggcgagctgtag

SEQ ID NO: 106989 - DNA, 1536 bp, Artificial Sequence
  derived and/or modified sequence
atggccagcgtggtggagtacaagggcctgcgggccggctaccactgtggctactgcgatagtaaagaaggcaaggcatcttgcgggatgtgggctcacagcatgactgtgcaggattatcaggacctcatcgataggggttggcggaggagcggaaaatacgtgtacaagcctgtgatgaaccaaacctgttgtcctcaatacactatccggtgtaggccactgcagttccagccttcaaagagccataaaaaggtactcaagaaaatgcttaaatttctggccaagggcgaagttccaaaaggcagctgtgaagacgagccgatggatagtaccatggacgacgctgtggctggggacttcgccctgattaataagctggacatccagtgcgatctgaagactttatccgacgacatcaaggagagtttggaaagtgaggggaaaaacagcaagaaagaggagccgcaggagttgctccaatcacaggattttgtgggcgagaagctggggtctggtgagccttcccacagcgtgaaggttcacactgttccaaagccaggcaagggagccgatctgagcaaacctccttgtcgaaaagcaaaggaaatcaggaaggagaggaagaggctgaagcttatgcagcagaatcctgcaggtgagctcgaaggatttcaggcccagggccaccctccatcactcttcccaccaaaagccaaaagcaatcagccaaagagtctggaagatctcattttcgagtctctacctgagaacgcatctcacaaacttgaggtgcgcctcgtgcccgtttccttcgaggatcctgaatttaaatcaagcttctcccagtccttttctttgtacgttaagtatcaggtcgccattcaccaggacccacccgacgagtgcggaaaaaccgagttcacccggttcttgtgctcctcgcctctggaggccgagacaccccctaacggtcctgactgtgggtacggctcctttcatcagcagtactggctggatggcaagataatcgcggtaggggtgattgacattcttcccaattgtgtatcatctgtgtacttgtactacgatcccgactactctttcttgtccctgggcgtgtattccgctctgagagaaatagccttcacacgccagctgcatgaaaaaaccagccagctgagttactattacatgggattctatatccactcctgcccaaagatgaaatacaagggacagtatcggcctagtgatctgctgtgtcccgagacgtacgtgtgggtccctatcgagcagtgtttaccatcgttagaaaacagcaagtactgccggttcaatcaggaccccgaagctgtggatgaggatcgctctaccgaacctgacaggctgcaggtctttcacaagcgcgctatcatgccctacggcgtgtataagaaacaacagaaggacccttccgaagaggccgccgttctgcagtatgcgtcattggtgggacagaaatgcagtgagagaatgctgctcttccgcaactag

SEQ ID NO: 106990 - DNA, 669 bp, Artificial Sequence
  derived and/or modified sequence
atggccagcgtagttgaatataaaggtctgcgggctgggtaccactgcgggtattgcgattcaaaggaaggcaaggctagttgtggaatgtgggcccatagcatgactgttcaggactaccaggatctcatcgaccgaggctggcgtagaagcggtaagtatgtttataaaccagtgatgaaccagacatgttgtccgcagtataccattaggtgcagaccactccagtttcagccatccaagtctcacaaaaaggtcctgaagaagatgctgaagttccttgcgaaaggagaggtcccgaagggttcgtgcgaagacgaacccatggatagtacaatggatgatgctgtggccggtgatttcgcactcatcaataaactggatattcagtgcgatttgaaaacactgtccgatgacattaaagagagtcttgagtcggagggtaagaactcaaagaaggaggaaccacaggagctgctccagagtcaggatttcgttggagagaagctcggcagcggtgagccctcacatagtgtgaaggtacacacagtgcccaagcctggaaaaggagccgacctttcaaagcccccatgcaggaaggcgaaagagattagaaaagagcgcaagcgccttaaactgatgcagcaaaacccggctggagagctttag

SEQ ID NO: 106991 - DNA, 1536 bp, Artificial Sequence
  derived and/or modified sequence
atggcctcagttgtggagtacaagggcctgagggccggatatcactgtggctactgtgacagtaaagagggcaaagcttcgtgcgggatgtgggcccacagtatgactgtccaggactatcaggacctcatcgacagagggtggaggagaagcgggaaatatgtgtacaaacctgttatgaatcaaacgtgctgtccacaatacactatcaggtgtcggccattgcagttccagcctagcaagtctcataaaaaagtgctgaaaaaaatgctgaagttcctggctaaaggggaggttcccaaaggttcctgtgaggatgagccaatggacagtactatggacgatgccgtggccggtgactttgcccttattaataaattagacattcagtgtgacctgaaaacactgtccgatgacattaaggagtctttagaaagcgaggggaagaactccaagaaggaagaaccacaggagcttctgcaaagccaagacttcgtgggagagaagttgggcagcggagagccatcgcatagcgtgaaggtgcacaccgttcctaaacccggaaaaggcgcagacctttctaaacccccttgcaggaaggccaaagaaataaggaaggagaggaagcggctgaagttgatgcagcagaatcctgcgggagaactcgagggatttcaggcccagggccatcccccttccctcttcccacctaaagcaaagtccaatcagcctaagtcactggaagatctcatctttgaaagtctgcctgaaaatgcgtctcacaaattagaagttagacttgtgcctgtgtcttttgaggaccctgagtttaaaagctcattttctcagtccttctctctctatgtaaagtatcaggtggctatccaccaagacccgccagacgaatgcggaaagacagagtttacaaggttcttgtgttccagcccacttgaagccgaaacacctccgaatggacctgactgtggctacggctcgttccatcagcagtactggctagatggcaaaattattgctgtgggagtcatagacattctgcctaactgtgtgtcctctgtctacttgtattatgacccagactactcattcctgagtctgggcgtgtattcagccctgcgcgagattgcatttacacgacagcttcacgagaaaacctctcagctgagctactattacatgggcttttacattcattcgtgccctaagatgaagtacaaaggacagtaccggccttccgatctcctctgcccagagacttacgtatgggtgccaattgaacagtgtctgcctagcttggagaactccaagtattgtcgctttaaccaggatcccgaggctgttgacgaggatcgcagcaccgagccagaccggcttcaggtatttcataagcgagccataatgccatatggtgtttataaaaaacagcagaaagacccctcagaagaggctgccgtgttgcaatacgcctccctagtgggtcagaaatgtagcgagcggatgctactgtttcggaattag

SEQ ID NO: 106992 - DNA, 697 bp, Artificial Sequence
  derived and/or modified sequence
tggtcggcccgagcggaccctcgcggcggccatggcgtcggtggtggaatacaagggcctcagggccggctaccactgcggctactgcgattccaaggagggcaaagcgtcctgcggcatgtgggcacattccatgacagtacaggattatcaggatctcatagaccgaggatggcgaagaagtggaaaatatgtgtacaaacctgtcatgaatcaaacatgttgtcctcagtacacaataaggtgccgacctttacaatttcagccttcaaaatctcacaagaaggttttgaaaaaaatgttgaaatttctagctaaaggggaggttcccaaaggaagttgtgaggatgagcccatggattccacaatggatgatgctgttgcgggtgactttgcattgataaataaactggatatacagtgtgatcttaaaacactcagtgatgacatcaaagagagtttagagagtgaaggaaaaaattcaaagaaagaagaacctcaggaattacttcagtcacaagatttcgtaggagagaagttgggctctggtgaaccgtcacattcagttaaagttcacacagttcctaagccaggcaaaggggctgatttgagtaagcctccatgtcgaaaagcaaaggaaatccggaaagaaaggaaaaggttaaaactaatgcagcagaacccagctggagaactt

SEQ ID NO: 106993 - DNA, 1935 bp, Artificial Sequence
  derived and/or modified sequence
gagcggaccctcgcggcggccatggcgtcggtggtggaatacaagggcctcagggccggctaccactgcggctactgcgattccaaggagggcaaagcgtcctgcggcatgtgggcacattccatgacagtacaggattatcaggatctcatagaccgaggatggcgaagaagtggaaaatatgtgtacaaacctgtcatgaatcaaacatgttgtcctcagtacacaataaggtgccgacctttacaatttcagccttcaaaatctcacaagaaggttttgaaaaaaatgttgaaatttctagctaaaggggaggttcccaaaggaagttgtgaggatgagcccatggattccacaatggatgatgctgttgcgggtgactttgcattgataaataaactggatatacagtgtgatcttaaaacactcagtgatgacatcaaagagagtttagagagtgaaggaaaaaattcaaagaaagaagaacctcaggaattacttcagtcacaagatttcgtaggagagaagttgggctctggtgaaccgtcacattcagttaaagttcacacagttcctaagccaggcaaaggggctgatttgagtaagcctccatgtcgaaaagcaaaggaaatccggaaagaaaggaaaaggttaaaactaatgcagcagaacccagctggagaacttgagggtttccaggctcaaggtcacccaccatctttgtttccaccaaaggctaaatccaaccagccaaaatcactcgaagatttaatttttgagtctttaccagagaatgcatcacacaagttagaggtgaggttagtacctgtctcctttgaggacccagagttcaagtcgtctttcagccagtccttttctttgtatgtcaagtatcaagtggccatacaccaggatccacccgatgaatgtgggaagactgagttcacaagattcctttgcagttcacccttggaggcagagactccccctaatgggccagattgtggctatggctcctttcaccagcagtactggcttgacggaaagatcattgctgtgggggtgattgacatcctcccaaactgtgtatcatctgtgtatttgtactacgatcctgattattcgtttttgtctttgggcgtctactctgcactacgagaaattgcttttactaggcagcttcatgagaaaacttctcaactcagctattattatatgggtttctacattcattcatgtcccaagatgaaatataagggtcagtatagaccttctgatttgctgtgccctgagacatatgtttgggtacccattgagcaatgcctgccttcacttgaaaactccaagtactgccgtttcaaccaggacccagaagcagtggatgaggatcgcagtacggaacctgaccgattgcaggtgtttcacaagagagccatcatgccttacggtgtttataagaaacagcagaaagacccaagtgaggaggctgctgttctgcagtacgccagcctggtggggcagaagtgctccgagcggatgctgctgttcagaaactgacctgttcacctctgccgggaagttcctgtgttgtgctgatgatttgtgccaggatacatattcagtacctgtggggaaataactgtcaccacccacaaattagacattttttattttgactatctatggcttttaaaaaatattttgtggcaatgtatctgtgagaatctcatagttaatataaagattttaaaactgcattatgacctagcccccataattgggatttatcattttggaggattctttctagagcaagatacgctcaaattctcctgtttgtattttgtaaaatgaagaagtgaatctaagtaacttaatcacagttgtgcattttttttggttctgttagagaaattaaaacagactgtttcctca

SEQ ID NO: 106994 - protein, 851 aa, Artificial Sequence
  derived and/or modified sequence
MGNRGMEDLIPLVNRLQDAFSAIGQNADLDLPQIAVVGGQSAGKSSVLENFVGRDFLPRGSGIVTRRPLVLQLVNATTEYAEFLHCKGKKFTDFEEVRLEIEAETDRVTGTNKGISPVPINLRVYSPHVLNLTLVDLPGMTKVPVGDQPPDIEFQIRDMLMQFVTKENCLILAVSPANSDLANSDALKVAKEVDPQGQRTIGVITKLDLMDEGTDARDVLENKLLPLRRGYIGVVNRSQKDIDGKKDITAALAAERKFFLSHPSYRHLADRMGTPYLQKVLNQQLTNHIRDTLPGLRNKLQSQLLSIEKEVEEYKNFRPDDPARKTKALLQMVQQFAVDFEKRIEGSGDQIDTYELSGGARINRIFHERFPFELVKMEFDEKELRREISYAIKNIHGIRTGLFTPDLAFEATVKKQVQKLKEPSIKCVDMVVSELTATIRKCSEKLQQYPRLREEMERIVTTHIREREGRTKEQVMLLIDIELAYMNTNHEDFIGFANAQQRSNQMNKKKTSGNQDEILVIRKGWLTINNIGIMKGGSKEYWFVLTAENLSWYKDDEEKEKKYMLSVDNLKLRDVEKGFMSSKHIFALFNTEQRNVYKDYRQLELACETQEEVDSWKASFLRAGVYPERVGDKEKASETEENGSDSFMHSMDPQLERQVETIRNLVDSYMAIVNKTVRDLMPKTIMHLMINNTKEFIFSELLANLYSCGDQNTLMEESAEQAQRRDEMLRMYHALKEALSIIGDINTTTVSTPMPPPVDDSWLQVQSVPAGRRSPTSSPTPQRRAPAVPPARPGSRGPAPGPPPAGSALGGAPPVPSRPGASPDPFGPPPQVPSRPNRAPPGVPRITISDP

SEQ ID NO: 106995 - DNA, 2556 bp, Artificial Sequence
  derived and/or modified sequence
atggggaaccgcgggatggaggacctgatacctctagtcaatagacttcaggacgctttttctgcaatcggccaaaacgccgacctggatctccctcaaatcgcggttgtcggagggcagtccgccggtaagtcctctgtgctcgaaaacttcgtcggccgcgactttctccctcgcgggtccggaatcgtgacccgacgcccactggtgctgcagctggtaaacgcgactaccgaatatgctgagtttcttcactgcaaagggaaaaaattcaccgatttcgaggaagtgcgattggaaatcgaggcggagaccgatcgcgtcacaggcactaacaaaggcattagtcctgtgccaatcaatcttcgggtatactctccccacgtattgaacctgaccctggtggatcttcctggcatgacaaaagtccccgttggagatcaaccacctgacattgagttccaaatcagagacatgcttatgcagttcgttacaaaggaaaactgcttaatcctggccgtatccccagcaaactccgatttagccaattccgacgccctcaaagtagcaaaagaagtggacccgcaggggcagagaacaatcggagtgatcaccaagctagatctgatggacgaaggaaccgatgctagggacgttctagagaataaacttctgccccttcgaaggggctatattggcgtggtgaatagaagtcagaaagacatcgacggcaaaaaggacatcaccgctgcgcttgctgctgaaaggaaattctttctgagccatcccagctaccggcacctggctgaccgaatgggtacgccatatctccagaaagtgctaaaccagcagctaacaaatcatattagagacaccctgcccggactccggaacaaactgcagagccaactgttgagtattgagaaagaggtggaggaatataagaattttagaccagacgatccagctaggaagaccaaggcccttctgcagatggttcagcaatttgcagtggactttgagaaaaggatcgaaggttcaggggaccagatcgacacctacgagttgagcggcggggcccggatcaacagaatcttccatgaacgatttccattcgaactggtgaagatggagtttgatgaaaaggagctgcggagggagattagttatgcgataaagaacatccatggcattaggaccggcttatttacccccgatctggcttttgaagctaccgttaagaagcaagtgcagaagctgaaggagccatctatcaaatgtgtcgatatggtggtgtctgagctgacagcaaccatccgtaagtgctctgagaaacttcagcaatatccaagactgagagaagagatggagcgaatcgtcacaacccatatcagggaacgcgaggggcggaccaaagaacaggttatgttgctgattgatatcgagcttgcgtatatgaacaccaaccacgaagacttcatcggctttgccaacgctcagcagcggtcaaaccagatgaataagaaaaaaacctcggggaaccaggatgaaatccttgtcataagaaaaggctggctgaccattaataatatcggtatcatgaagggtgggtccaaggagtattggttcgttctcaccgcagaaaatttgtcgtggtacaaggatgatgaagaaaaggaaaaaaagtatatgctatcagtggataatttaaaactgcgtgacgtcgagaagggattcatgtctagtaagcatatattcgctttgttcaacactgagcagagaaatgtgtataaggattatcgacagcttgagctcgcctgtgagactcaagaagaagtagattcctggaaggcctcgttcctgagagcgggcgtttatcccgaacgggttggagacaaagagaaagcatcagagacagaagagaacggatccgactcttttatgcatagcatggacccccagctggagcgacaggtagaaactattcggaaccttgtagattcgtatatggccatcgttaacaagacagtcagggacctcatgcctaagacgatcatgcatctgatgattaataatacaaaggagtttatatttagcgagctgctggccaacctctattcttgtggcgaccagaacacactaatggaggaatccgccgaacaggcccagcgacgcgatgagatgcttcgaatgtaccatgctctgaaggaggctttatctatcataggggacattaataccactaccgtgagcacaccaatgccccctcctgtggatgattcttggctccaggtacagagtgtgcccgccggacggcgtagccccacatctagtccaacacctcagcgtcgggccccggccgttcccccggcacgcccaggcagccgcggcccagctccggggcctccacccgccggatccgctttggggggtgctcccccagtgcccagccggcccggcgccagtcctgatccatttggacctccccctcaagtgccttcacgccccaatcgcgcgccacctggagtaccccgcataaccatcagtgatccctag

SEQ ID NO: 106996 - DNA, 2556 bp, Artificial Sequence
  derived and/or modified sequence
atggggaacagaggcatggaggatttaattcctctggtcaacagattgcaagacgccttttcagctatcggccagaatgccgatcttgacctgccgcagatcgctgtagtaggcgggcagtctgccggaaagtcatcagtgttagagaatttcgtcggcagagatttcctccctcgtggttctggtatcgtaaccaggcgacccctggtcctgcaacttgtcaatgctactacagagtatgcggagtttttgcactgcaaagggaaaaaattcactgactttgaggaagttaggcttgaaattgaggccgaaacagaccgcgtgacaggtactaataagggcatcagtcctgtaccaattaaccttcgcgtgtatagtccgcacgtattgaacctgaccctggttgaccttcccggtatgacgaaggtgcctgtgggggaccagccaccggatatcgagttccagatacgcgatatgttgatgcagttcgtgaccaaggagaattgtttaatcctggcagtgtctcctgcaaactcagacctggctaactccgacgctcttaaagtcgctaaagaggttgatccccaggggcagcgtacaattggggtcatcactaagctggacttgatggacgaaggcaccgatgcccgggacgtactagaaaataaactactgcctctccgaagagggtatattggtgtggtcaacagaagccagaaggacatcgacgggaagaaagacatcactgctgcactggccgccgagcgcaaattttttctgtctcaccccagttacagacacctagcagataggatgggcacgccctatttacaaaaggtgctgaatcagcagttgaccaaccacataagagatacattgcctggtctgcgcaacaaacttcagtctcagctgttgtcgattgagaaagaggttgaggagtataaaaacttccgacctgatgatccagcacggaaaacaaaggccttattacagatggtgcagcagtttgctgtggactttgagaagagaatagaaggaagcggtgaccagatcgatacctatgaactatcaggcggcgcgcgcatcaaccgaatttttcacgagcgattcccctttgaactggttaagatggaattcgacgaaaaggagcttagacgtgagatttcctacgccatcaaaaacatacacgggatcaggaccggtctgtttaccccagatctggctttcgaggccaccgtgaagaaacaggtgcagaaactcaaggagccctcaatcaagtgtgtggatatggtggtgagcgaactgacagctaccatcaggaaatgtagcgagaaacttcagcagtatccgagattgcgggaggagatggaacggattgtcactacccacattagagagcgtgaaggtcgaactaaggagcaagtgatgctgctcatcgatatcgaactggcctacatgaacacgaatcatgaagattttattggattcgccaacgcacagcagaggagcaatcagatgaacaagaaaaagacaagtggaaatcaggacgagatcctagtcatcagaaaaggttggctcaccattaacaatatcggaataatgaaagggggtagcaaggaatactggttcgtgcttaccgcagagaatctgtcttggtataaggatgacgaagaaaaagagaagaaatatatgctcagcgtcgataatctgaaattacgcgacgtggaaaagggcttcatgtcttcgaagcacatcttcgcccttttcaatactgaacagaggaatgtttacaaggactatcgacaactcgaactcgcctgtgaaacacaggaggaggtagatagctggaaagctagtttcttgcgagcaggtgtctacccagaaagggtgggtgacaaggaaaaggcttccgaaacggaagaaaatggcagcgactcatttatgcacagtatggatcctcagctcgaacgtcaggtggaaacaatcaggaatttggtcgactcttatatggcgattgtgaataaaactgtgagagacctgatgccaaaaactataatgcaccttatgatcaacaacactaaagaattcatattttccgaactcctggctaacctctactcatgcggcgaccagaacacattgatggaagagagcgccgaacaggcacagcgacgggacgagatgctgcgcatgtatcatgcgctgaaggaggctctctcaattattggtgacattaatacgacaaccgtcagcacgcccatgccgccaccagtggacgactcttggctccaggtgcagagtgtccctgcaggccgccgaagccctacatcctctcccactcctcagcggcgagcaccagctgtaccaccagccaggccgggttccagaggtcctgccccagggcctcctcccgcagggtccgccttaggcggcgctccacccgtgcccagcagacccggtgcctccccggacccatttggacccccaccccaagtcccgtcacgacccaacagggcgccgcctggtgtccccaggataaccatctcagacccctag

SEQ ID NO: 106997 - DNA, 1191 bp, Artificial Sequence
  derived and/or modified sequence
atggagaggatcgtcaccactcacatacgcgaacgagaaggaagaactaaggagcaggtaatgttgctgattgacattgaactcgcctacatgaatacaaaccatgaggactttatagggtttgccaacgcccaacagcgaagcaaccagatgaacaaaaagaagacctccgggaaccaagatgaaattcttgtgattcgcaaagggtggctgactattaataatatcggcattatgaagggaggctccaaagagtactggttcgtgctgaccgccgaaaacctctcatggtataaggacgatgaggagaaggagaagaaatatatgctaagcgtggacaaccttaaacttcgagacgtggagaagggctttatgtcaagcaagcatatcttcgccctgtttaatactgaacagaggaatgtgtacaaagactatcggcaactggaactagcttgtgaaacccaggaggaggtcgactcttggaaagcctctttcctgcgggccggggtgtaccctgaaagggtgggagacaaagagaaggcctccgagaccgaagagaacggatccgacagttttatgcacagcatggacccacaactagagagacaggtggagaccatccgaaatctggtggactcttatatggcgattgtgaacaaaacagtcagagacctaatgcccaagacgattatgcacctaatgataaataacaccaaggagttcatctttagtgaattattggccaacctgtacagctgcggtgaccaaaacaccttgatggaagaaagcgccgaacaggcccagcgtagagatgaaatgctgaggatgtatcatgccttaaaggaggcccttagtatcatcggtgatattaatacaacaacagttagcacccctatgccaccacccgtagatgattcttggctacaggtgcagtctgttcctgccggccgcaggtcccccaccagctctcctactccacagcgtcgagcaccagctgtgcctccagctaggccagggtcccgaggccccgcgcctggcccccccccggcagggagcgctctaggtggagcccctcctgtgccttccaggcctggagcttcacccgacccatttggcccacctccccaagtgccgtccaggccaaacagggcccccccaggggtcccgcgaattactattagcgatccttag

SEQ ID NO: 106998 - DNA, 2556 bp, Artificial Sequence
  derived and/or modified sequence
atgggcaacagaggcatggaggacctgatccccctggtgaaccggctgcaggatgccttcagcgccatcggccagaatgctgacctggacctgccccagattgctgtggtgggcggccagagcgctgggaagagctctgtgctggagaactttgtgggccgggacttcctgccccggggcagcggcatcgtgacccggcggcccctggtgctgcagctggtgaatgccaccacagaatatgcagagttcctgcactgcaagggcaagaagttcacagactttgaggaggtgcggctggagattgaagctgagacagacagagtgacaggcaccaacaagggcatcagccctgtgcccatcaacctgcgggtgtacagcccccacgtgctgaacctgaccctggtggacctgcccggcatgaccaaggtgcctgtgggggaccagcccccagacatcgagttccagatccgggacatgctgatgcagtttgtgaccaaggagaactgcctgatcctggccgtgtccccagccaacagcgacctggccaacagtgatgccctgaaggtggccaaggaggtggacccccagggccagaggaccatcggggtcatcaccaagctggacctgatggatgagggcacagatgccagagatgtgctggagaacaagctgctgcccctgcggcggggctacatcggcgtggtgaacagaagccagaaggacattgatggcaagaaggacatcacagctgccctggccgctgagaggaagttcttcctgagccaccccagctaccgccacctggccgacaggatgggcaccccctacctgcagaaggtgctgaaccagcagctgaccaaccacatccgggacaccctgcccggcctgaggaacaagctgcagagccagctgctgagcattgagaaggaggtggaggagtacaagaacttccggccagatgatcctgccaggaagaccaaggccctgctgcagatggtgcagcagtttgctgtggactttgagaagagaattgagggcagcggggaccagattgacacctatgagctgtctggaggagcccgcatcaaccgcatcttccacgagcgcttcccctttgagctggtgaagatggagtttgatgagaaggagctgcggcgggagatctcctatgccatcaagaacatccacggcatcagaacaggcctcttcaccccagacctggcctttgaggccaccgtgaagaagcaggtgcagaagctgaaggagcccagcatcaagtgtgtggacatggtggtgtctgagctgacagccaccatcagaaaatgttctgagaagctgcagcagtacccccggctgcgggaggagatggagagaattgtgaccacccacatccgggagcgggagggccgcaccaaggagcaggtgatgctgctgattgatattgagctggcctacatgaacaccaaccacgaggacttcatcggctttgccaatgcccagcagaggagcaaccagatgaacaagaagaagaccagcggcaaccaggatgagatcctggtgatcaggaagggctggctgaccatcaacaacatcggcatcatgaagggcggcagcaaggagtactggtttgtgctgacagctgagaacctgtcctggtacaaggatgatgaggagaaggagaagaagtacatgctgtctgtggacaacctgaagctgagagatgtggagaagggcttcatgagcagcaagcacatctttgccctcttcaacacagagcagagaaatgtgtacaaggactaccggcagctggagctggcctgtgagacccaggaggaggtggacagctggaaggccagcttcctgcgggccggcgtgtacccagagcgggtgggggacaaggagaaggccagcgagacagaagaaaatggaagtgacagcttcatgcacagcatggacccccagctggagcggcaggtggagaccatccggaacctggtggacagctacatggccatcgtgaacaagacagtgcgggacctgatgcccaagaccatcatgcacctgatgatcaacaacaccaaggagttcatcttcagcgagctgctggccaacctgtacagctgtggggaccagaacaccctgatggaggagagcgctgagcaggcccagaggagagatgagatgctgaggatgtaccacgccctgaaggaggccctgagcatcatcggggacatcaacaccaccaccgtgtccacccccatgcctcctcctgtggatgacagctggctgcaggtgcagagcgtgcctgctggccgccgcagccccaccagcagccccaccccccagaggcgggccccagctgtgcccccagcccggcccggcagccggggccctgcccctggccccccacctgctggcagcgccctgggcggggcccctcctgtgcccagcaggcctggggccagcccagaccccttcggccccccaccccaggtgcccagccggcccaacagagcccctcctggggtgccccgcatcaccatcagtgacccctag

SEQ ID NO: 106999 - DNA, 1191 bp, Artificial Sequence
  derived and/or modified sequence
atggagcgcatcgtgaccacccacatccgggagcgggagggccgcaccaaggagcaggtgatgctgctgattgacatcgagctggcctacatgaacaccaaccacgaggacttcatcggctttgccaatgcccagcagaggagcaaccagatgaacaagaagaagaccagcggcaaccaggatgagatcctggtgatcaggaagggctggctgaccatcaacaacatcggcatcatgaagggcggcagcaaggagtactggtttgtgctgacagctgagaacctgtcctggtacaaggatgatgaggagaaggagaagaagtacatgctgtctgtggacaacctgaagctgagagatgtggagaagggcttcatgagcagcaagcacatctttgccctcttcaacacagagcagagaaatgtgtacaaggactaccggcagctggagctggcctgtgagacccaggaggaggtggacagctggaaggccagcttcctgcgggccggcgtgtacccagagcgggtgggggacaaggagaaggccagcgagacagaggagaatggaagtgacagcttcatgcacagcatggacccccagctggagcggcaggtggagaccatccggaacctggtggacagctacatggccatcgtgaacaagacagtgcgggacctgatgcccaagaccatcatgcacctgatgatcaacaacaccaaggagttcatcttcagcgagctgctggccaacctgtacagctgtggggaccagaacaccctgatggaggagagcgctgagcaggcccagaggagagatgagatgctgaggatgtaccacgccctgaaggaggccctgagcatcattggagacatcaacaccaccaccgtgtccacccccatgcctcctcctgtggatgacagctggctgcaggtgcagagcgtgcctgctggaagaagaagccccaccagcagccccaccccccagaggcgggccccagctgtgcccccagcccggcccggcagccggggccctgcccctggccccccacctgctggcagcgccctgggcggggcccctcctgtgcccagcaggcctggggccagcccagacccctttggacctccaccccaggtgcccagccggcccaacagagcccctcctggggtgccccgcatcaccatcagtgacccctag

SEQ ID NO: 107000 - DNA, 2556 bp, Artificial Sequence
  derived and/or modified sequence
atgggcaaccggggcatggaggacctgatccccctggtgaaccggctgcaggacgcgttctcagctatagggcagaacgcagacctggatctgccccagattgcggtggtgggaggccagtccgcaggcaagtcttctgtgctcgagaattttgtggggagggacttcctacctcgcggctcaggtattgtcacccgccggccgctggttttacagctagtcaacgcaacaacggagtacgccgagttcttacactgtaaaggaaaaaagttcaccgactttgaagaggtgcgccttgaaattgaagctgaaactgacagggtgacaggtaccaacaagggtatcagccctgtgcccatcaatctgcgcgtctatagtccccatgttttgaatctgacactcgtggatcttcctggcatgacaaaagtgccggtgggcgatcagccacctgatatcgaatttcagatccgcgatatgttgatgcagttcgtgacaaaagagaattgtctgattttggctgtctccccagccaacagtgatctagcgaattccgatgcactgaaagtggccaaggaagtggatccgcagggacagcggacaatcggcgtcattacaaaattggatctgatggatgagggaaccgacgctcgggatgtcctggagaacaaactattgccattgaggcgcgggtatataggcgtcgtgaatagaagccagaaggatatcgatggaaagaaggacattacagctgcgctggcagctgagcggaagttctttctaagtcacccttcttacaggcacctcgcagacagaatgggaacaccctacctgcagaaggtgcttaaccagcagttgactaatcatatccgcgatacgctccctggcctcagaaacaaactgcaatcccagttattgtccatagagaaagaggtcgaagagtataaaaatttcaggccagatgatcctgcgcgtaaaacaaaggccctgttacagatggtgcagcagttcgccgtagattttgagaagcggattgaaggcagcggcgaccagattgacacttatgagttgtccggaggcgcccgcatcaatagaatcttccacgagcggttcccttttgaattagttaagatggagttcgacgagaaagaactgcgtcgggaaatctcttatgcaatcaagaatattcacggaatacgcaccgggcttttcacccccgacctggcttttgaagctaccgttaagaagcaagtccagaagttgaaggaaccatccattaagtgcgtagatatggtggtgtctgaattgaccgcgacaatccggaagtgttctgagaaactacagcagtacccacgcttacgggaggaaatggagcggattgttaccacgcacattcgagaaagagaaggacgcacaaaggaacaggtgatgttgcttatcgacatcgaactggcgtacatgaatacgaaccacgaggactttattgggttcgcgaatgcgcagcaacgctctaaccaaatgaacaagaaaaagaccagtggtaatcaagacgaaattcttgtgattcgtaaaggctggctgacaatcaataacatagggattatgaaaggggggtccaaagagtactggtttgtcttgacggccgaaaacctcagctggtacaaggacgatgaggagaaggaaaagaagtatatgctgagcgtggataatctgaaactaagggacgttgagaaggggtttatgtcctctaagcacatatttgccttatttaatactgaacagagaaatgtttacaaagactatcggcagttggaactagcctgtgagacgcaggaggaggtggacagttggaaggcaagcttcctacgggcgggtgtgtaccctgagagagtgggtgacaaagaaaaggcctccgagacagaggagaacggatcggatagcttcatgcattcaatggacccccaattggagaggcaggttgagacaattcgcaacctcgttgactcttacatggctattgtgaacaagactgtgagggatctgatgcctaaaactatcatgcaccttatgatcaacaataccaaagaattcatctttagtgaactcctcgctaatctgtactcttgtggggaccagaacaccctcatggaggagtccgccgaacaggcccagcgcagggatgaaatgttgaggatgtaccacgccctgaaagaagccctgtccattatcggtgacatcaacactacaacagtttccaccccgatgccccccccagtggatgactcatggctacaggtgcagagtgtgcctgccgggcgtagatctccaacgagcagcccaacgccccagcggagagcccccgcagtccctcccgctagacctgggtctcggggaccagcacctggtccacctcctgcaggctctgctttgggcggcgcccctccggtgccctcacggcctggggccagcccggatccgtttggtcccccaccacaggtacccagccggcctaaccgcgccccccctggagtgccacgcattacgatttctgacccatag

SEQ ID NO: 107001 - DNA, 2556 bp, Artificial Sequence
  derived and/or modified sequence
atgggcaaccggggcatggaggacctgatccccctggtgaaccggttgcaggacgcttttagcgccatcggccagaatgccgacctggacctcccccagattgccgtggtcggtgggcagagtgcgggcaagagctcagttctagagaatttcgtcggccgcgacttcttgcccagaggttccgggattgtcacacgcaggccactggtgctgcaactggtgaacgcaactacagaatatgcagaattcctgcattgtaagggcaagaagtttaccgactttgaggaagtacgactcgagatcgaagccgaaaccgatcgtgtaactgggacaaataaaggaatctcaccagtgcccattaacctgcgagtctacagtccacatgttctaaacctgaccctagtggacctccctggtatgaccaaagtgcccgtcggagaccaaccaccggacatcgaatttcagatcagagacatgcttatgcaatttgttaccaaggagaattgcctcatcctggccgtgagccctgcaaatagtgatctcgcgaacagtgacgcgctgaaggtggccaaggaagtcgaccctcaagggcagcggaccatcggggtcataactaaactggacctaatggacgagggaactgacgcaagagacgttctggagaacaagctcctcccactccggagaggctacatcggggtcgtgaacagatctcagaaagatatcgacggcaagaaggatattacagctgccctggcagctgaaagaaagttcttcttgagccatcccagttaccgccatttagccgaccgaatggggaccccgtacctccagaaggtgctcaaccagcagctcactaaccatatcagagacacgctgcccggcctccgcaacaaactgcagtctcagctgttgagcatcgaaaaagaggttgaagagtataagaattttcgacctgatgatcctgccagaaagaccaaagccttactccagatggtgcagcagttcgcagtggacttcgaaaagagaatagagggatccggggatcagatcgacacatatgagctcagtggaggagctcgcattaataggatctttcatgagaggtttccttttgaactggtaaagatggagtttgacgaaaaggaactacggcgagagatttcctacgccattaaaaatattcacggaattaggacagggctctttactcccgacctggcttttgaggccaccgtaaaaaaacaggtgcagaagcttaaggagccttcaattaagtgcgtggatatggtggtaagtgagttaactgccacaatcaggaagtgctccgagaagctgcagcagtaccccaggctccgcgaggagatggaacggatcgtgacaacacatatcagggagcgagaagggcgcacaaaggagcaagtaatgctgctgattgatattgagctcgcatatatgaataccaatcatgaagattttatcggatttgccaatgcccaacagcggtccaaccagatgaacaaaaaaaaaactagcgggaaccaggacgaaattctagttataaggaaaggctggctgactatcaacaacatcggaatcatgaaaggtggctcgaaagagtattggtttgtcctgacggctgagaatctgagttggtacaaagacgacgaagagaaggaaaagaagtacatgctgtcagtggataacctcaaattaagagatgtcgagaagggattcatgtcctcaaaacatatcttcgctctcttcaacaccgaacagagaaacgtatacaaagactacagacagctggaactggcatgtgagacgcaggaggaggtagactcttggaaggcgtcttttctaagggcaggcgtataccccgagcgcgtgggcgacaaggaaaaagcctcagagacggaggaaaacggaagtgatagctttatgcattccatggatccccaactggaaaggcaggtggagacaatcaggaaccttgtcgattcctacatggctatcgtcaataaaactgtgagagatctcatgcctaagaccatcatgcacctaatgatcaacaacaccaaggagttcattttttccgagctgctcgccaacctgtatagttgtggagatcaaaacaccctcatggaggaatctgctgagcaggcccaaagaagggatgagatgctcagaatgtaccacgccctgaaagaggccctcagtatcataggtgacattaatacaaccactgtgagcacaccaatgcctccccctgttgatgatagttggctccaggtgcagtcagttccggccggcagaaggtcaccgacttcatctcctaccccccaacggcgggcccctgcagtaccccccgcaagaccagggtctcggggtcccgctccaggaccgccacccgcgggttcggccttgggcggagccccgcccgtgcccagcaggccgggagcctctcccgaccccttcggtccaccgccacaggttccttcccgaccaaacagagccccaccgggagtgcctcgaatcacaatttctgatccttag

SEQ ID NO: 107002 - DNA, 1191 bp, Artificial Sequence
  derived and/or modified sequence
atggagcggatcgtgaccacccacatccgggagcgggagggccggacaaaagagcaggttatgctccttatcgacatagaattggcgtacatgaacacgaaccacgaggatttcatagggtttgctaatgcgcagcagaggagtaaccagatgaataaaaaaaaaacctctggcaatcaggatgaaattctggtaattaggaagggctggctgacaatcaataatatcggcattatgaagggcggatctaaagagtactggtttgtgctgaccgcggagaacctgtcttggtataaggacgacgaggaaaaggagaagaaatatatgctgtcggtcgacaacctaaaacttagggatgtggaaaagggctttatgtcttcgaagcacatctttgctctgttcaacacagagcagcggaatgtgtacaaagattaccgacagttggaacttgcttgcgaaacccaagaggaggtagattcctggaaggcttcattcctgcgcgcaggggtttaccctgagcgagtgggtgacaaggagaaggcgtcagagaccgaggagaatgggtctgactcattcatgcactctatggatccccagctagagcgccaggtggagaccatccggaatctggtggattcctacatggcaatcgtcaataagaccgtgcgagatctgatgcccaagaccatcatgcatttgatgatcaacaacaccaaggagttcatcttctcagagctgctggcaaacctgtatagctgtggtgatcaaaacaccctcatggaggagtcggccgaacaggcacagcgcagggatgaaatgctccgcatgtaccacgcactgaaggaggctttatcaattatcggagacattaacaccacgacagtttccaccccaatgcctccccctgtcgacgatagctggctacaggtccagtcagtccccgccggccggcggtctcctacctcaagcccgacccctcaaaggcgagctccagccgtgccacccgcccgcccaggtagcagggggccagcccccggccccccccctgctggcagcgccctggggggggcccccccggtgccctcccgtccgggcgcctctccggatcctttcggaccaccaccccaggtgcctagtcgcccaaatagggctccaccgggggtccctcgcatcactatatctgatccctag

SEQ ID NO: 107003 - DNA, 2556 bp, Artificial Sequence
  derived and/or modified sequence
atgggcaaccggggaatggaggatcttatcccactagtcaaccgactccaagacgccttttctgctatcggccagaacgctgatttggaccttccgcagatagccgtggtgggtggtcaatctgcgggaaagtccagcgttctagaaaactttgtgggacgagattttctgccacgtggcagtggcatcgtgacaagacgcccacttgtactgcaactggtgaatgccaccactgaatatgctgagtttctacactgtaaaggcaaaaaatttaccgatttcgaagaagtgagactggagatcgaggctgagaccgatcgggtgactggaacgaataaaggcatttcgccagttcctatcaacctcagagtgtactctccccacgtcctgaatctgaccctggtggacctacctggcatgaccaaagtgcccgtgggggatcagcccccagatatcgagttccagatccgagacatgttgatgcagtttgtcacaaaagagaactgcctgattttagcagtttctcctgccaacagtgacctggcaaatagcgacgctctgaaagtggccaaagaagttgatcctcaggggcaacgaactatcggtgtcattaccaagctagatctgatggatgaagggaccgatgctagagatgttctggagaacaagctcttgcccttaagacgcggttacatcggagtggtaaaccggagccagaaagacatagacgggaagaaggatatcaccgcagcgcttgccgctgaaaggaagtttttcctttctcatccgtcatacagacacttagcagatcgtatgggcactccatatttacagaaggtgcttaaccagcagctcaccaaccatattcgagatacactgccagggctgcgaaataaactgcaatcacagcttctttctattgaaaaagaggttgaggagtataaaaattttcgcccagatgaccccgcaaggaaaaccaaagctctgctgcagatggtgcagcagtttgcagtcgacttcgaaaaacgcatcgagggcagtggcgatcagatagacacctatgaactgtctggaggcgcacggattaataggatttttcatgaaagattcccctttgaacttgtgaagatggagtttgacgaaaaagaactgagacgggagatttcctacgccattaagaatatccatggcatccggactggcctcttcacgcctgatctagcgttcgaggccacggtcaaaaagcaggtccagaagctgaaagagccatccataaagtgtgtggacatggttgtcagtgaactcacggctaccataaggaaatgttccgaaaaactgcagcagtacccccgtctcagggaagagatggagcgaattgttaccacccatatccgagaaagagagggaaggacaaaagaacaggtgatgttgctaattgacattgagcttgcatacatgaacacaaaccatgaggactttatcgggtttgcgaatgctcagcagcgctccaatcaaatgaacaaaaaaaaaacttccggaaaccaggacgagattctcgttatccgtaagggctggctgaccattaataacattggcattatgaaggggggaagtaaggaatactggttcgtactgactgcagaaaacctgagctggtataaggatgatgaggaaaaggagaaaaaatacatgctttcagtggacaacctgaagctgcgggacgtcgaaaaaggctttatgtcaagcaagcatatttttgccctgtttaataccgaacagcgaaacgtatacaaagactatcgccagttagaattggcctgtgagacacaagaagaggtggatagttggaaggccagttttcttcgggcaggggtgtacccggagagggtgggggacaaagaaaaagcatccgaaaccgaggagaacggtagcgatagcttcatgcacagcatggatcctcagctcgagcgacaggtggagacaattcggaacctggtcgactcctacatggcaatcgtcaataagacagtacgtgaccttatgcctaagacgattatgcacttgatgatcaacaacacaaaagagttcatctttagcgaattgttggctaatctgtactcatgcggggaccaaaacacactgatggaggagagcgctgagcaggcccagcgcagggatgaaatgttaagaatgtaccacgccctcaaggaggccctgtccatcatcggagacattaatactactactgtatcaacccccatgcccccacctgtggacgattcatggctgcaagtacagtcggtccctgctggtcggagatctccaacctcctccccgaccccgcaaagaagagcccctgctgttccacccgcacggcctggctcgagaggtcccgctccaggacctcctccagcaggaagcgcgctcggtggcgcacctccagtgccctctcggccaggagccagccctgatcctttcggaccaccaccacaggtgccatctcgacccaaccgggctccgccaggggtgcctcggataacaatttccgatccttag

SEQ ID NO: 107004 - DNA, 2556 bp, Artificial Sequence
  derived and/or modified sequence
atgggcaatagaggcatggaagacctgatcccgcttgtcaaccgccttcaagacgcttttagtgcgattggccagaatgctgacttagacttacctcagatagctgtggtgggaggccaatccgccggaaagtctagcgttctagaaaactttgtgggcagggattttcttcccagagggtctgggatcgttaccaggcggccactagtcctgcagctcgtcaatgcaaccacggagtacgccgagttcctgcattgcaaagggaaaaagttcacggacttcgaggaagtcagactggaaatcgaagccgagaccgatagggtaactgggaccaataaggggatttcaccagtgccgatcaatctgagggtatactcaccacacgtcctgaacctgacattggtagacctcccgggaatgactaaggtacctgttggagaccagcccccagatatagagtttcagattagagacatgctcatgcagtttgtgactaaggaaaactgcctgatcctagccgtgtcccctgccaactcagacctggcaaacagtgatgctctgaaagttgctaaggaagtcgacccccaggggcagcggaccatcggagtcatcaccaagctggaccttatggacgaggggaccgacgcacgtgatgtgctggaaaacaaacttttgcctctgcgcagaggctatattggagtggtgaaccgcagccagaaagacattgacggaaaaaaggatataactgctgctctggccgctgagcggaagttcttcctgagtcaccctagctacaggcacctggcggaccgaatgggaactccttatttgcagaaggtactgaatcagcagctgacaaaccatatccgagacaccctccccggactaagaaacaagttacaaagtcagctgctttccattgagaaagaagtggaggaatacaaaaatttcaggccagacgatcctgccaggaaaactaaggcccttctccagatggtgcaacagtttgcagtggatttcgagaaaagaatcgaagggtcaggagatcaaatagacacctacgagttaagcggcggagcgaggatcaaccgcatattccatgagaggtttccattcgagctggtcaagatggaatttgatgaaaaggaattgcgacgcgagattagctatgctataaagaatattcacggaattcgcaccgggctgttcactccagacctggcttttgaagctacagtgaagaaacaggtgcaaaagctgaaggaacctagtattaaatgtgtagacatggttgtctcagagctgacagctacaatccgaaaatgttctgaaaagctgcaacagtacccccgtctccgcgaagagatggaacggatcgtcaccactcacatccgggaacgcgagggtaggaccaaagagcaggtgatgcttttaattgatattgagttagcttacatgaacactaaccatgaggacttcattgggttcgccaacgcccaacagcgatctaatcagatgaacaagaagaaaacctctggaaaccaggacgaaattttggttattagaaagggctggctgaccatcaataatatagggatcatgaagggcggtagtaaagagtattggtttgtcctgacagccgagaatctgtcatggtataaagatgatgaagaaaaagaaaagaagtacatgttatccgtcgacaatcttaagctgagagatgtcgagaaaggctttatgagtagtaagcacatttttgccttgtttaacacagaacagagaaacgtgtataaagattaccgccagctcgagttagcgtgcgagacccaggaggaggttgatagttggaaggcatcatttttacgcgctggagtctatccagagcgggtcggggacaaggaaaaagcctccgaaactgaagagaatgggagcgactcattcatgcactcaatggatccccagctcgagcggcaagttgaaacaatccgaaacctggttgacagttacatggccatcgtgaataagacggtaagagacctgatgccaaagaccattatgcatcttatgatcaataacacaaaggagtttatcttttctgagcttctggctaatttgtattcctgcggggatcagaatactctgatggaagaaagtgccgaacaggcacagcgaagagacgaaatgctgcggatgtaccacgcactgaaggaagcactttccatcatcggtgatatcaacaccactactgtatcaaccccgatgccacctccggtggacgattcatggctgcaggttcagagtgtccctgccggacggagatccccaacgtcgagccccaccccccagcgcagagctccggcagttccacccgctcgccctgggagtaggggaccagccccagggcctccccctgcaggaagcgctctgggtggagcccctcctgtcccaagtcgcccaggtgccagtccggatccattcggacctccaccgcaggtaccctccaggcccaaccgcgctccgcctggcgtgccacggattactatttcagacccttag

SEQ ID NO: 107005 - DNA, 1191 bp, Artificial Sequence
  derived and/or modified sequence
atggagagaattgtgacgactcatatccgggaaagggaaggtcgaacaaaggagcaggtgatgctgctgatcgacattgaactagcctatatgaatacaaaccacgaggattttattggttttgcgaacgcacaacagcgcagcaatcagatgaataaaaagaaaacatctggcaatcaagatgaaatcctggtcatccggaagggatggctgaccataaacaatatcggaatcatgaaggggggaagtaaggagtactggtttgttctgactgctgagaatctctcatggtacaaggatgatgaggagaaagaaaaaaagtacatgctgtcagtcgacaaccttaagttgagagacgtggagaaagggttcatgtccagcaaacatatattcgctctgttcaacacagagcagcgtaatgtatacaaagattaccgccagttggagcttgcttgcgagacgcaggaagaggtggactcttggaaagccagtttcctgcgagccggtgtctatcctgagagagtgggcgacaaagaaaaagcctctgaaacggaggagaatggatccgattcattcatgcatagtatggatccccagttagagcgccaggtcgaaacaattaggaatcttgtggatagctacatggctatcgtcaacaaaacagttcgcgacctgatgcccaagacaattatgcatcttatgatcaacaacaccaaagagtttatcttctccgagttgctggcaaatttatactcgtgcggagaccaaaatacattgatggaagagtcagccgaacaggcacagcgcagagatgaaatgctcagaatgtaccatgcgctaaaggaggccctgagcatcatcggcgacattaatacaacaactgtttcaaccccaatgcccccacccgtcgacgactcttggctacaggttcagtccgtgcctgcgggaaggagaagcccaacaagttctcctacacctcagcggcgagcacctgccgttccaccagccagaccgggtagtcgcggtcccgctccaggaccgccaccagcaggatcagcactgggaggcgcaccacccgtgccctccaggcctggcgcttctcctgatccctttggcccacctccacaagtgccatcaaggccgaaccgcgcaccgcctggggtccctcgaatcactattagtgacccctag

SEQ ID NO: 107006 - DNA, 2556 bp, Artificial Sequence
  derived and/or modified sequence
atgggcaacagaggcatggaggacctgatccccctggtgaacagactgcaggacgccttcagcgccatcggccagaacgccgacctggacctgccccagatcgccgtggtgggcggccagagcgccggcaagagcagcgtgctggagaacttcgtgggcagagacttcctgcccagaggcagcggcatcgtgaccagaagacccctggtgctgcagctggtgaacgccaccaccgagtacgccgagttcctgcactgcaagggcaagaagttcaccgacttcgaggaggtgagactggagatcgaggccgagaccgacagagtgaccggcaccaacaagggcatcagccccgtgcccatcaacctgagagtgtacagcccccacgtgctgaacctgaccctggtggacctgcccggcatgaccaaggtgcccgtgggcgaccagccccccgacatcgagttccagatcagagacatgctgatgcagttcgtgaccaaggagaactgcctgatcctggccgtgagccccgccaacagcgacctggccaacagcgacgccctgaaggtggccaaggaggtggacccccagggccagagaaccatcggcgtgatcaccaagctggacctgatggacgagggcaccgacgccagagacgtgctggagaacaagctgctgcccctgagaagaggctacatcggcgtggtgaacagaagccagaaggacatcgacggcaagaaggacatcaccgccgccctggccgccgagagaaagttcttcctgagccaccccagctacagacacctggccgacagaatgggcaccccctacctgcagaaggtgctgaaccagcagctgaccaaccacatcagagacaccctgcccggcctgagaaacaagctgcagagccagctgctgagcatcgagaaggaggtggaggagtacaagaacttcagacccgacgaccccgccagaaagaccaaggccctgctgcagatggtgcagcagttcgccgtggacttcgagaagagaatcgagggcagcggcgaccagatcgacacctacgagctgagcggcggcgccagaatcaacagaatcttccacgagagattccccttcgagctggtgaagatggagttcgacgagaaggagctgagaagagagatcagctacgccatcaagaacatccacggcatcagaaccggcctgttcacccccgacctggccttcgaggccaccgtgaagaagcaggtgcagaagctgaaggagcccagcatcaagtgcgtggacatggtggtgagcgagctgaccgccaccatcagaaagtgcagcgagaagctgcagcagtaccccagactgagagaggagatggagagaatcgtgaccacccacatcagagagagagagggcagaaccaaggagcaggtgatgctgctgatcgacatcgagctggcctacatgaacaccaaccacgaggacttcatcggcttcgccaacgcccagcagagaagcaaccagatgaacaagaagaagaccagcggcaaccaggacgagatcctggtgatcagaaagggctggctgaccatcaacaacatcggcatcatgaagggcggcagcaaggagtactggttcgtgctgaccgccgagaacctgagctggtacaaggacgacgaggagaaggagaagaagtacatgctgagcgtggacaacctgaagctgagagacgtggagaagggcttcatgagcagcaagcacatcttcgccctgttcaacaccgagcagagaaacgtgtacaaggactacagacagctggagctggcctgcgagacccaggaggaggtggacagctggaaggccagcttcctgagagccggcgtgtaccccgagagagtgggcgacaaggagaaggccagcgagaccgaggagaacggcagcgacagcttcatgcacagcatggacccccagctggagagacaggtggagaccatcagaaacctggtggacagctacatggccatcgtgaacaagaccgtgagagacctgatgcccaagaccatcatgcacctgatgatcaacaacaccaaggagttcatcttcagcgagctgctggccaacctgtacagctgcggcgaccagaacaccctgatggaggagagcgccgagcaggcccagagaagagacgagatgctgagaatgtaccacgccctgaaggaggccctgagcatcatcggcgacatcaacaccaccaccgtgagcacccccatgcccccccccgtggacgacagctggctgcaggtgcagagcgtgcccgccggcagaagaagccccaccagcagccccaccccccagagaagagcccccgccgtgccccccgccagacccggcagcagaggccccgcccccggccccccccccgccggcagcgccctgggcggcgccccccccgtgcccagcagacccggcgccagccccgaccccttcggcccccccccccaggtgcccagcagacccaacagagccccccccggcgtgcccagaatcaccatcagcgacccctag

SEQ ID NO: 107007 - DNA, 1191 bp, Artificial Sequence
  derived and/or modified sequence
atggagagaatcgtgaccacccacatcagagagagagagggcagaaccaaggagcaggtgatgctgctgatcgacatcgagctggcctacatgaacaccaaccacgaggacttcatcggcttcgccaacgcccagcagagaagcaaccagatgaacaagaagaagaccagcggcaaccaggacgagatcctggtgatcagaaagggctggctgaccatcaacaacatcggcatcatgaagggcggcagcaaggagtactggttcgtgctgaccgccgagaacctgagctggtacaaggacgacgaggagaaggagaagaagtacatgctgagcgtggacaacctgaagctgagagacgtggagaagggcttcatgagcagcaagcacatcttcgccctgttcaacaccgagcagagaaacgtgtacaaggactacagacagctggagctggcctgcgagacccaggaggaggtggacagctggaaggccagcttcctgagagccggcgtgtaccccgagagagtgggcgacaaggagaaggccagcgagaccgaggagaacggcagcgacagcttcatgcacagcatggacccccagctggagagacaggtggagaccatcagaaacctggtggacagctacatggccatcgtgaacaagaccgtgagagacctgatgcccaagaccatcatgcacctgatgatcaacaacaccaaggagttcatcttcagcgagctgctggccaacctgtacagctgcggcgaccagaacaccctgatggaggagagcgccgagcaggcccagagaagagacgagatgctgagaatgtaccacgccctgaaggaggccctgagcatcatcggcgacatcaacaccaccaccgtgagcacccccatgcccccccccgtggacgacagctggctgcaggtgcagagcgtgcccgccggcagaagaagccccaccagcagccccaccccccagagaagagcccccgccgtgccccccgccagacccggcagcagaggccccgcccccggccccccccccgccggcagcgccctgggcggcgccccccccgtgcccagcagacccggcgccagccccgaccccttcggcccccccccccaggtgcccagcagacccaacagagccccccccggcgtgcccagaatcaccatcagcgacccctag

SEQ ID NO: 107008 - DNA, 3211 bp, Artificial Sequence
  derived and/or modified sequence
gagccgggagcgctagcggcagccggatcgcagcctgcggggcccgccgcagccatgggcaaccgcggcatggaagatctcatcccgctggtcaaccggctgcaagacgccttctctgccatcggccagaacgcggacctcgacctgccgcagatcgctgtggtgggcggccagagcgccggcaagagctcggtgctcgagaatttcgtaggcagggacttcttgcctcgaggatctggcattgtcacccgacgtcccctggtcttgcagctggtcaatgcaaccacagaatatgccgagttcctgcactgcaagggaaagaaattcaccgacttcgaggaggtgcgccttgagatcgaggccgagaccgacagggtcaccggcaccaacaagggcatctcgccggtgcctatcaacctccgcgtctactcgccgcacgtgctgaacctgaccctggtggacctgcccggaatgaccaaggtcccggtgggggaccaacctcccgacatcgagttccagatccgagacatgcttatgcagtttgtcaccaaggagaactgcctcatcctggccgtgtcccccgccaactctgacctggccaattctgacgccctcaaggtcgccaaggaggtggacccccagggccagcgcaccatcggggtcatcaccaagctggacctgatggacgagggcacagatgcccgtgatgtgctggagaacaagctgctccccctgcgcagaggctacattggagtggtgaaccggagccagaaggacattgatggcaagaaggacattaccgccgccttggctgctgaacgaaagttcttcctctcccatccatcttatcgccacttggctgaccgtatgggcacgccctacctgcagaaggtcctcaatcagcaactgacgaaccacatccgggacacactgccggggctgcggaacaagctgcagagccagctactgtccattgagaaggaggtggaggaatacaagaacttccgccctgatgacccagctcgcaagaccaaggccctgctgcagatggtccagcagttcgccgtagactttgagaagcgcattgagggctcaggagatcagatcgacacctacgaactgtcagggggagcccgcattaaccgaatcttccacgagcgcttccctttcgagctggtcaagatggagtttgatgagaaggaactccgaagggagatcagctatgctatcaagaatatccatggcattaggacgggcctcttcacacctgacctcgcttttgaagccacagtgaaaaagcaggtgcagaagctcaaagagcccagtatcaagtgtgtggatatggtagtcagtgagctcacagccaccatcagaaagtgtagcgaaaagctccagcagtacccgcggctacgggaggagatggagcgcatcgtgaccacccacatccgggagcgcgagggccgcactaaggagcaggtcatgcttctcatcgatatcgagctggcttacatgaacaccaaccatgaggacttcataggctttgccaatgctcagcagaggagcaaccagatgaacaagaagaagacttcagggaaccaggatgagattctggtcatccgcaagggctggctgactatcaataatattggcatcatgaaagggggctccaaggagtactggtttgtgctgactgctgagaatctgtcctggtacaaggatgatgaggagaaagagaagaaatacatgctgtctgtggacaacctcaagctgcgggacgtggagaagggctttatgtcgagcaagcatatctttgccctctttaacacggagcagaggaatgtctacaaggattatcggcagctggagctagcctgtgagacacaggaggaggtggacagctggaaggcctccttcctgagggctggcgtgtaccctgagcgtgttggggacaaagagaaagccagcgagaccgaggagaatggctccgacagcttcatgcattccatggacccacagctggaacggcaagtggagaccatccggaatcttgtggactcatacatggccattgtcaacaagaccgtgagggacctcatgcccaagaccatcatgcacctcatgattaacaataccaaggagttcatcttctcggagctgctggccaacctgtactcgtgtggggaccagaacacgctgatggaggagtcggcggagcaggcacagcggcgcgacgagatgctgcgcatgtaccacgcactgaaggaggcgctcagcatcatcggcgacatcaacacgaccaccgtcagcacgcccatgcccccgcccgtggacgactcctggctgcaggtgcagagcgtaccggccggacgcaggtcgcccacgtccagccccacgccgcagcgccgagcccccgccgtgcccccagcccggcccgggtcgcggggccctgctcctgggcctccgcctgctgggtccgccctggggggggcgccccccgtgccctccaggccgggggcttcccctgaccctttcggccctccccctcaggtgccctcgcgccccaaccgcgccccgcccggggtccccagaatcactatcagtgacccctgaggagcgtcagccatgccgatcgggtcaggcaagtccatcccgtcctgagagccccaggccccccttcgacctctaaacagatccctcctcttctcggagacctccctttccaagcctgcctggacggctgttctgtgacttgacagtggctcccccagccccaaagccagcccccttcatctgtgacttaatctgttgtagtggtgagctgatacattcaggtgtgaccgttggtgaaaacttgtgccccttctgtggtatgcccttgccctgttctataaatatctataaatactcatatatatacacacctacacatggccaaccgcctcgcctctagcgctgggaatcagtcactgtgctatccttgtggagtcttgtggcccaactaccagagaacgctgtcccccgacatcccactccaaagtgtgccacctccagtgagcctccttgtcatgcccggcctgtggacagccagcccccgccatccctcccaccccctaccaagcatgggggtgctgtgcaggcagccgtgtggcctgacagtttctaccagtcctgctgtccctcggctgagaataaaacccatttctggatgatg

SEQ ID NO: 107009 - DNA, 2817 bp, Artificial Sequence
  derived and/or modified sequence
agtctgggcgcgcggctgcagcggcggagccggagtcggagccgggagcgctagcggcagccggatcgcagcctgcggggcccgccgcagccatgggcaaccgcggcatggaagatctcatcccgctggtcaaccggctgcaagacgccttctctgccatcggccagaacgcggacctcgacctgccgcagatcgctgtggtgggcggccagagcgccggcaagagctcggtgctcgagaatttcgtaggcagggacttcttgcctcgaggatctggcattgtcacccgacgtcccctggtcttgcagctggtcaatgcaaccacagaatatgccgagttcctgcactgcaagggaaagaaattcaccgacttcgaggaggtgcgccttgagatcgaggccgagaccgacagggtcaccggcaccaacaagggcatctcgccggtgcctatcaacctccgcgtctactcgccgcacgtgctgaacctgaccctggtggacctgcccggaatgaccaaggtcccggtgggggaccaacctcccgacatcgagttccagatccgagacatgcttatgcagtttgtcaccaaggagaactgcctcatcctggccgtgtcccccgccaactctgacctggccaattctgacgccctcaaggtcgccaaggaggtggacccccagggccagcgcaccatcggggtcatcaccaagctggacctgatggacgagggcacagatgcccgtgatgtgctggagaacaagctgctccccctgcgcagaggctacattggagtggtgaaccggagccagaaggacattgatggcaagaaggacattaccgccgccttggctgctgaacgaaagttcttcctctcccatccatcttatcgccacttggctgaccgtatgggcacgccctacctgcagaaggtcctcaatcagcaactgacgaaccacatccgggacacactgccggggctgcggaacaagctgcagagccagctactgtccattgagaaggaggtggaggaatacaagaacttccgccctgatgacccagctcgcaagaccaaggccctgctgcagatggtccagcagttcgccgtagactttgagaagcgcattgagggctcaggagatcagatcgacacctacgaactgtcagggggagcccgcattaaccgaatcttccacgagcgcttccctttcgagctggtcaagatggagtttgatgagaaggaactccgaagggagatcagctatgctatcaagaatatccatggcattaggacgggcctcttcacacctgacctcgcttttgaagccacagtgaaaaagcaggtgcagaagctcaaagagcccagtatcaagtgtgtggatatggtagtcagtgagctcacagccaccatcagaaagtgtagcgaaaagctccagcagtacccgcggctacgggaggagatggagcgcatcgtgaccacccacatccgggagcgcgagggccgcactaaggagcaggtcatgcttctcatcgatatcgagctggcttacatgaacaccaaccatgaggacttcataggctttgccaatgctcagcagaggagcaaccagatgaacaagaagaagacttcagggaaccaggatgagattctggtcatccgcaagggctggctgactatcaataatattggcatcatgaaagggggctccaaggagtactggtttgtgctgactgctgagaatctgtcctggtacaaggatgatgaggagaaagagaagaaatacatgctgtctgtggacaacctcaagctgcgggacgtggagaagggctttatgtcgagcaagcatatctttgccctctttaacacggagcagaggaatgtctacaaggattatcggcagctggagctagcctgtgagacacaggaggaggtggacagctggaaggcctccttcctgagggctggcgtgtaccctgagcgtgttggggacaaagagaaagccagcgagaccgaggagaatggctccgacagcttcatgcattccatggacccacagctggaacggcaagtggagaccatccggaatcttgtggactcatacatggccattgtcaacaagaccgtgagggacctcatgcccaagaccatcatgcacctcatgattaacaataccaaggagttcatcttctcggagctgctggccaacctgtactcgtgtggggaccagaacacgctgatggaggagtcggcggagcaggcacagcggcgcgacgagatgctgcgcatgtaccacgcactgaaggaggcgctcagcatcatcggcgacatcaacacgaccaccgtcagcacgcccatgcccccgcccgtggacgactcctggctgcaggtgcagagcgtaccggccggacgcaggtcgcccacgtccagccccacgccgcagcgccgagcccccgccgtgcccccagcccggcccgggtcgcggggccctgctcctgggcctccgcctgctgggtccgccctggggggggcgccccccgtgccctccaggccgggggcttcccctgaccctttcggccctccccctcaggtgccctcgcgccccaaccgcgccccgcccggggtccccagaatcactatcagtgacccctgaggagcgtcagccatggaagggcccagcctcacctacgagacctgcagccccccgaccagctgaggctcccctcttagacttataagtctatggccactggcatccggctgcctgccctccctgcctcccccagggtcccttcagagggtcctgggttttctgaacaccc

SEQ ID NO: 107010 - DNA, 4103 bp, Artificial Sequence
  derived and/or modified sequence
taatagagacggggtttctccatgttggtcaggctggtctcgaactcccgacctcaggtgatctgcccacctcggcctcccaatgtactgggattacaggtgcaagccaccgcaaccggccacttttgccttttgattggtttagtggatcataattatttttttccttataggcaaaactcacctttgcctatctttgtgtatatattttttcctcccctcgagttttctaaggttatcaagtcactcctgccagaagtttaatgagtgttaataagtgaactctcattactgccagccctgctgggattagacttgccatctctgagtgaaatgaagagtttaatgttgggcatgggatgtgctgctcagttctctcaacaactctaggagggaaggtgtcattactaccccattttccacatggagaaactgaggcccagagaggtctggtcatttttctaaggagagtcagcggacagcggctggctttgaacccagggctgaatggctccaggggctgtgtccctgactgctaacccggtgggctccaggctgatcgccccctcagccaagggctgagaggggaacgttccttttgaaaagctggcggaacatcctggaaatgttcagaggcagccagaatggaaaaagatgctcaaaggggacagaacttctcaaaggggtggaggctgccctgccatgggtgacacgtggaaaacttgagacatgtgacatccaggcggttagtgggagaattggtcatgctctttggcaaattgcgccctcctcctccctccttctccctgctcctccaaactctaccctgggagggagcacttgggaccacctcagaggaggcctggtggctgtgacccagtcccaaatgtctgcccagacttggagactgcaaagagcgggagcccttccttgagcctcaggagcagtggggttcacagggcccctctagtcaccgtttttaagcccctggtctcagactgcccctccctcaggtctcctgagcttagccacatcatccacgcccttggcacagccacgggatgatgggtgtgatgcgggcatccctcgtgttggcatcctggaccgatatccagggccctgctttctccccatcctcctgcctctcccatgcccctcctcaaaactccttggcctccatcctgccctcagaatcaccacctgtgactcaggcacaccaatccctgggcctcttcctccactgggggacccacctgaagggcctgacccagccacgggaagaaggacgaggagcgctcccagctttgccccatcgtgctgcctgggccccaggtggccaccgcgtggagagggtgggcccacaggactggagcccctgggggtgggctcccaccatcagaaatgcactgagtctcctccccggaagagctgatcatgggccagagggctgaggaccctgtgccactcaccctggcatccatccttcattcattccctcattctccaacacgccctcttccagcactggccatgggcctggccctgccccagccctgcctcggggacagttgccacccagttgattggaggaggtggagtgggagaggagtggagagaggcccctaactcagctctcaagcagtcggggcaggctttctggaggagctgaagtccggcagaaccttgtagtcaagtgaatcacctgggctgtgcccagagcccgactgagctgagggcacgattcgcaggcagagggggacgggtttggagcaacttccccttcagcctcccttcataagaactggggggaaagaggtgctgctgagctcctaccccaaaggagtggggtcgagacagtgtggctggccagagccgggcagatgtggctggggatggtggtgccgggcaggggcatgcaagggagacagagctgaatggattccaccaagagggccagggcccagccaggccccgcggggtactgctcatgctgctggcccccgccttgcatgtcccccagccctcgcatgcttttgcttgtgtttcctgcatgtcctctggtgtgactgctggttttcccctgaaccccctccccagctctgacaaggagcattgcctgtcccagcctgactcaggaggccaactggcaccttgggccctgtcctcccccgattcctcctggataggaatccagaggctgtcccctgcctgattccccatctagctgtccctccacgcctttaggaaggcacagggtagccctgagtatgagggaacaccttgggagctaacggtccccagaggccttaacctaaccagtctgcggggcaggctcattcccatggcctttctcccacgggaaccacccctctgccctgaagttgcccaggtaggccagtgaagagggcccggaaccaggaagacccttgaatcaccatttggaacccacacttgggggaaaggggtggccgtggcttggtgccatcagcgtcctgggaccctaggtctctcttccccgcgttgtgggcattctgtgtgtgcctcccaccctgcgccgcggatccctggactcgtggggtgtgggtgctccctgcccgtgccctctgtgtacgtggctttctgccctcctgcccttccccagctccagcagtacccgcggctacgggaggagatggagcgcatcgtgaccacccacatccgggagcgcgagggccgcactaaggagcaggtcatgcttctcatcgatatcgagctggcttacatgaacaccaaccatgaggacttcataggctttgccaatgctcagcagaggagcaaccagatgaacaagaagaagacttcagggaaccaggatgagattctggtcatccgcaagggctggctgactatcaataatattggcatcatgaaagggggctccaaggagtactggtttgtgctgactgctgagaatctgtcctggtacaaggatgatgaggagaaagagaagaaatacatgctgtctgtggacaacctcaagctgcgggacgtggagaagggctttatgtcgagcaagcatatctttgccctctttaacacggagcagaggaatgtctacaaggattatcggcagctggagctagcctgtgagacacaggaggaggtggacagctggaaggcctccttcctgagggctggcgtgtaccctgagcgtgttggggacaaagagaaagccagcgagaccgaggagaatggctccgacagcttcatgcattccatggacccacagctggaacggcaagtggagaccatccggaatcttgtggactcatacatggccattgtcaacaagaccgtgagggacctcatgcccaagaccatcatgcacctcatgattaacaataccaaggagttcatcttctcggagctgctggccaacctgtactcgtgtggggaccagaacacgctgatggaggagtcggcggagcaggcacagcggcgcgacgagatgctgcgcatgtaccacgcactgaaggaggcgctcagcatcatcggcgacatcaacacgaccaccgtcagcacgcccatgcccccgcccgtggacgactcctggctgcaggtgcagagcgtaccggccggacgcaggtcgcccacgtccagccccacgccgcagcgccgagcccccgccgtgcccccagcccggcccgggtcgcggggccctgctcctgggcctccgcctgctgggtccgccctggggggggcgccccccgtgccctccaggccgggggcttcccctgaccctttcggccctccccctcaggtgccctcgcgccccaaccgcgccccgcccggggtccccagaatcactatcagtgacccctgaggagcgtcagccatgcaggaagggcccagcctcacctacgagacctgcagccccccgacatcccactccaaagtgtgccacctccagtgagcctccttgtcatgcccggcctgtggacagccagcccccgccatccctcccaccccctaccaagcatgggggtgctgtgcaggcagccgtgtggcctgacagtttctaccagtcctgctgtccctcggctgagaataaaacccatttctgg

SEQ ID NO: 107011 - protein, 864 aa, Artificial Sequence
  derived and/or modified sequence
MGNRGMEDLIPLVNRLQDAFSAIGQNADLDLPQIAVVGGQSAGKSSVLENFVGRDFLPRGSGIVTRRPLVLQLVNATTEYAEFLHCKGKKFTDFEEVRLEIEAETDRVTGTNKGISPVPINLRVYSPHVLNLTLVDLPGMTKVPVGDQPPDIEFQIRDMLMQFVTKENCLILAVSPANSDLANSDALKVAKEVDPQGQRTIGVITKLDLMDEGTDARDVLENKLLPLRRGYIGVVNRSQKDIDGKKDITAALAAERKFFLSHPSYRHLADRMGTPYLQKVLNQQLTNHIRDTLPGLRNKLQSQLLSIEKEVEEYKNFRPDDPARKTKALLQMVQQFAVDFEKRIEGSGDQIDTYELSGGARINRIFHERFPFELVKMEFDEKELRREISYAIKNIHGIRTGLFTPDLAFEATVKKQVQKLKEPSIKCVDMVVSELTATIRKCSEKLQQYPRLREEMERIVTTHIREREGRTKEQVMLLIDIELAYMNTNHEDFIGFANAQQRSNQMNKKKTSGNQDEILVIRKGWLTINNIGIMKGGSKEYWFVLTAENLSWYKDDEEKEKKYMLSVDNLKLRDVEKGFMSSKHIFALFNTEQRNVYKDYRQLELACETQEEVDSWKASFLRAGVYPERVGDKEKASETEENGSDSFMHSMDPQLERQVETIRNLVDSYMAIVNKTVRDLMPKTIMHLMINNTKEFIFSELLANLYSCGDQNTLMEESAEQAQRRDEMLRMYHALKEALSIIGDINTTTVSTPMPPPVDDSWLQVQSVPAGRRSPTSSPTPQRRAPAVPPARPGSRGPAPGPPPAGSALGGAPPVPSRPGASPDPFGPPPQVPSRPNRAPPGVPSRSGQASPSRPESPRPPFDL

SEQ ID NO: 107012 - DNA, 2595 bp, Artificial Sequence
  derived and/or modified sequence
atgggcaaccgcggcatggaggatctgattccgctggtgaaccgtttgcaggacgccttcagtgcaatagggcaaaacgccgacctcgaccttcctcagatcgctgtcgtcggtgggcaatcagcggggaaaagtagcgtactggagaacttcgtgggacgggattttctgccacgtgggtcaggtatcgtaacccgcagaccattggtcctgcaattggtgaatgccactactgaatacgcagaattcttgcactgtaaagggaaaaagtttacagacttcgaagaggtgcggctcgaaatagaagctgaaaccgatagggtaaccggcacaaataaagggatcagcccagtgcctattaatttgcgcgtgtattctcctcacgttttgaatctgacactggttgacctgccaggcatgactaaggtgccagtcggagaccaaccacccgacatagagtttcagataagagatatgcttatgcagtttgtgacaaaggaaaactgcctcattctggcagtttctccggccaattctgaccttgcgaactccgatgctctgaaggtcgcgaaggaggttgacccccaaggccagaggacaatcggagtgattaccaaattggacctcatggatgaaggaacggacgctcgcgacgtactcgagaacaaactgctgcccttgcgccgaggatacatcggcgtagtcaatagaagtcagaaagacattgacgggaagaaagacattacagctgccctcgccgctgaacggaagtttttcctatcccacccgagttaccggcacctggctgaccgcatggggacgccctatctgcagaaggtactcaatcaacagctgacaaaccacatcagggataccttgccgggtttacgtaacaagctgcagtcccagctgttatcgatcgaaaaggaagttgaggagtataagaacttccggcccgacgaccctgcccggaagaccaaagcgttgctgcaaatggtacaacaattcgcagtggattttgagaagcgtattgaagggagtggggaccagatcgatacatacgaactctctggcggtgcccgaataaatcggatatttcacgaacggtttcccttcgaacttgtgaaaatggagttcgatgagaaagaactgcgtcgcgagatctcctatgccattaagaacattcacggcatccgcacagggctgtttacccccgatctcgcttttgaagccacagttaagaaacaagtccagaagttgaaagagcccagtattaaatgcgtcgacatggtggtctctgaacttacggccacaatacgcaagtgcagcgaaaagcttcaacagtacccgcgccttcgcgaggagatggaacggatagtgacaacgcacatccgcgagcgcgaaggacgcaccaaagagcaagtgatgttactcatcgacatagagttggcatatatgaataccaaccacgaggatttcatcggttttgccaatgcacagcaaagatccaatcaaatgaataagaaaaaaactagcggaaatcaggacgagatccttgttatccggaaagggtggttgactatcaacaacatagggatcatgaaaggaggcagtaaggagtactggtttgtcctaacggctgagaatctgagttggtacaaagatgatgaagaaaaggagaagaagtacatgttgtctgtcgacaatcttaagctcagggacgtggaaaaaggttttatgtccagtaagcatatatttgctctgttcaacactgaacagaggaatgtttacaaagattatcgacagctagagcttgcctgtgaaactcaggaggaggtcgactcatggaaagccagcttcctgcgggcaggcgtgtacccagagcgggtgggcgataaagaaaaagcttctgaaacagaggagaacgggtccgatagttttatgcattccatggatccgcagttagagcggcaggtggaaacaattagaaacctggtggattcatatatggccattgtgaataaaactgtgcgcgacctgatgcctaagactattatgcatttgatgatcaataacactaaagaattcattttctccgagctgctggctaatctgtattcctgtggggaccagaacaccctgatggaggaatccgcggagcaggcccagaggcgagacgaaatgctgcggatgtaccatgccctgaaggaagccctcagcattatcggtgacatcaatactaccaccgtctccacacctatgccacccccagtggacgattcgtggctgcaggtccagtcagtccctgcaggacgacgcagccccacctccagtcccacccctcaaagacgcgcccctgctgtacctccagccagaccgggttcgaggggccctgcgcctggccctcctcctgccgggtcagccttgggtggagcaccaccagttccttccagacccggagcttctcccgatcccttcggcccacccccacaggtcccaagtaggccaaatcgagcccctccaggagtgccttcccggtccgggcaggcctcaccctccagacccgagagcccgagaccgccctttgatctgtag

SEQ ID NO: 107013 - DNA, 2595 bp, Artificial Sequence
  derived and/or modified sequence
atgggcaacagaggcatggaggacctgatccccctggtgaaccggctgcaggatgccttcagcgccatcggccagaatgctgacctggacctgccccagattgctgtggtgggcggccagagcgctgggaagagctctgtgctggagaactttgtgggccgggacttcctgccccggggcagcggcatcgtgacccggcggcccctggtgctgcagctggtgaatgccaccacagaatatgcagagttcctgcactgcaagggcaagaagttcacagactttgaggaggtgcggctggagattgaagctgagacagacagagtgacaggcaccaacaagggcatcagccctgtgcccatcaacctgcgggtgtacagcccccacgtgctgaacctgaccctggtggacctgcccggcatgaccaaggtgcctgtgggggaccagcccccagacatcgagttccagatccgggacatgctgatgcagtttgtgaccaaggagaactgcctgatcctggccgtgtccccagccaacagcgacctggccaacagtgatgccctgaaggtggccaaggaggtggacccccagggccagaggaccatcggggtcatcaccaagctggacctgatggatgagggcacagatgccagagatgtgctggagaacaagctgctgcccctgcggcggggctacatcggcgtggtgaacagaagccagaaggacattgatggcaagaaggacatcacagctgccctggccgctgagaggaagttcttcctgagccaccccagctaccgccacctggccgacaggatgggcaccccctacctgcagaaggtgctgaaccagcagctgaccaaccacatccgggacaccctgcccggcctgaggaacaagctgcagagccagctgctgagcattgagaaggaggtggaggagtacaagaacttccggccagatgatcctgccaggaagaccaaggccctgctgcagatggtgcagcagtttgctgtggactttgagaagagaattgagggcagcggggaccagattgacacctatgagctgtctggaggagcccgcatcaaccgcatcttccacgagcgcttcccctttgagctggtgaagatggagtttgatgagaaggagctgcggcgggagatctcctatgccatcaagaacatccacggcatcagaacaggcctcttcaccccagacctggcctttgaggccaccgtgaagaagcaggtgcagaagctgaaggagcccagcatcaagtgtgtggacatggtggtgtctgagctgacagccaccatcagaaaatgttctgagaagctgcagcagtacccccggctgcgggaggagatggagagaattgtgaccacccacatccgggagcgggagggccgcaccaaggagcaggtgatgctgctgattgatattgagctggcctacatgaacaccaaccacgaggacttcatcggctttgccaatgcccagcagaggagcaaccagatgaacaagaagaagaccagcggcaaccaggatgagatcctggtgatcaggaagggctggctgaccatcaacaacatcggcatcatgaagggcggcagcaaggagtactggtttgtgctgacagctgagaacctgtcctggtacaaggatgatgaggagaaggagaagaagtacatgctgtctgtggacaacctgaagctgagagatgtggagaagggcttcatgagcagcaagcacatctttgccctcttcaacacagagcagagaaatgtgtacaaggactaccggcagctggagctggcctgtgagacccaggaggaggtggacagctggaaggccagcttcctgcgggccggcgtgtacccagagcgggtgggggacaaggagaaggccagcgagacagaagaaaatggaagtgacagcttcatgcacagcatggacccccagctggagcggcaggtggagaccatccggaacctggtggacagctacatggccatcgtgaacaagacagtgcgggacctgatgcccaagaccatcatgcacctgatgatcaacaacaccaaggagttcatcttcagcgagctgctggccaacctgtacagctgtggggaccagaacaccctgatggaggagagcgctgagcaggcccagaggagagatgagatgctgaggatgtaccacgccctgaaggaggccctgagcatcatcggggacatcaacaccaccaccgtgtccacccccatgcctcctcctgtggatgacagctggctgcaggtgcagagcgtgcctgctggccgccgcagccccaccagcagccccaccccccagaggcgggccccagctgtgcccccagcccggcccggcagccggggccctgcccctggccccccacctgctggcagcgccctgggcggggcccctcctgtgcccagcaggcctggggccagcccagaccccttcggccccccaccccaggtgcccagccggcccaacagagcccctcctggggtgcccagccgcagcggccaggccagccccagcaggcctgagagcccccggcccccatttgacctgtag

SEQ ID NO: 107014 - DNA, 2595 bp, Artificial Sequence
  derived and/or modified sequence
atgggcaaccggggcatggaggacctgatccccctggtgaaccggttgcaagacgcattttcggccatcggtcagaacgccgatcttgatctgccccaaatcgccgtcgtgggtgggcaatccgcaggaaaatcatctgttcttgagaatttcgttggtcgggacttcttgcctaggggttctggaattgtgacccggcgtccactcgtgctgcagctggtgaatgccaccacggagtatgctgagttcctacactgtaagggtaagaaattcactgattttgaggaagtcagacttgaaatagaggccgagactgatcgagtaactggaaccaataaaggtatttctccagtcccaattaatctgcgagtctatagccctcacgtgctgaatttgaccctagtagatctgccaggtatgactaaggttcctgtgggcgatcaacctcctgatatcgaatttcagattagggacatgctgatgcagtttgtgactaaggaaaattgcctgatcctcgcagtgtctccagccaactcagatttagctaatagcgatgccctcaaggtcgcgaaggaagtggatccacaggggcaacgcactattggcgtcatcacgaagctggatctgatggacgagggcacggacgcaagggacgttctggagaataagctcctacctctccgtcgcggctacataggcgtggtcaataggtcccaaaaggatattgacggcaagaaagatatcactgccgcactcgctgccgaacgtaagttttttctctcccatcctagctaccggcacctggccgatcggatggggacaccttacttgcagaaagtcttgaatcagcaactcaccaaccacatcagggacacgctgccaggcctgcgaaataagcttcagagccaactgttgtccattgagaaagaggtcgaggagtacaaaaacttcagacctgacgatcccgctcggaagactaaggccttgttacagatggttcagcagttcgccgttgacttcgagaagagaattgaaggcagcggggatcagatagatacttatgaactctccggaggcgcaagaatcaaccgcatatttcacgagagattccccttcgagttagtgaagatggagtttgacgaaaaggaattgcggagggaaatcagctacgccattaagaatatccacgggatcaggaccggcctgtttacccctgatctggcatttgaggcgactgtgaagaagcaggtccagaaattgaaagaaccaagcataaaatgtgtcgacatggttgtgtcagagttaaccgctacaatcagaaaatgctctgaaaaactccagcagtatccccgtctgagggaagagatggagaggattgtgacaactcatatacgggaaagggaaggccggacaaaggagcaagtgatgttgctcattgatatcgagttagcctacatgaataccaatcacgaggatttcatcggattcgccaacgcccagcagcgcagcaatcagatgaataagaagaagactagcgggaatcaggacgaaattttggtgatccgcaaaggctggctaacaatcaataatatcggtatcatgaaaggtggtagtaaggagtactggtttgtgctgacagcggaaaacttatcctggtacaaggacgacgaggaaaaagaaaaaaaatatatgcttagtgtggacaatctcaagctacgtgacgtggagaagggttttatgtcatctaagcacatttttgcactcttcaacacagaacagcggaatgtgtataaggactatagacagctggagttagcgtgtgagacacaggaagaagtcgattcctggaaagctagcttcctccgggcgggggtctaccctgagcgtgtgggcgacaaagagaaagcctctgagactgaagaaaatggaagcgattcattcatgcactccatggacccacagctggagcggcaggtcgaaaccatcaggaatctggtggactcctatatggccatagtcaataaaacagtaagggacctgatgcctaagacgatcatgcatctgatgattaacaacacaaaggaatttatcttctccgagctcctggccaatctctactcttgcggggaccagaacacactcatggaggagtcagcggagcaggctcaacgtcgtgatgaaatgttgcgtatgtatcatgcccttaaagaggccctgtcaatcattggtgatatcaacaccactaccgtgtcaacaccaatgcccccccccgttgatgacagctggctccaagtgcagagcgttcctgccggaagaagatctcctacctcatcacccacaccacagcggagggcccctgctgtaccgccggccaggcccgggtcaaggggtcccgcaccgggccctcccccagccggtagcgcacttggcggcgcgcctcccgtccccagtcgccctggggcaagcccagatccttttggcccccccccccaggtaccctcacggcccaatcgagcccctccaggcgtgccaagtaggtctggccaggcctcaccctcaagaccggagtccccccgtcccccgtttgatctgtag

SEQ ID NO: 107015 - DNA, 2595 bp, Artificial Sequence
  derived and/or modified sequence
atggggaatcgcggaatggaggacctcatcccgttagtcaatcgcttacaggacgccttttctgctataggccagaacgccgacctcgacctgcctcagatcgcagttgtgggaggtcagagtgctgggaagtcaagcgtccttgaaaacttcgtgggcagagactttctacctcggggtagcggcatcgtgactcgcagacctttagttctgcaactggtaaacgccactacagagtacgcagagttcttgcactgcaaaggcaagaaatttacagattttgaagaggtccggcttgagatcgaggcggagactgaccgtgtcacagggacaaacaaggggattagccctgtacctatcaacctccgcgtgtatagcccccacgtgcttaatctgactctagtcgatttacccggtatgaccaaggtaccagtgggagaccagccacccgacattgagttccaaatccgggacatgctgatgcagtttgtgaccaaggaaaactgcttgattttagctgtgtcacccgctaactctgatctggcgaactctgatgccctgaaggtcgcaaaagaggtggatcctcaaggccagagaaccattggcgttatcacaaaactcgacttgatggacgaaggcacagacgccagggatgtcctagagaacaagctcttgccactcaggcggggatacatcggggtcgtaaacagaagccagaaagacattgacggcaagaaggacataacagctgccttagctgccgagcgtaaattctttctgtcgcatccgtcatacagacacctcgcggatagaatgggcaccccttacctccaaaaggtgctcaaccagcagctgacgaaccatataagagatacattacccggtttgcggaataaactacagtcacagcttttatccatagaaaaagaggtcgaggagtacaaaaactttcgtcccgacgatcccgcacgtaaaacgaaggcactgttgcagatggtgcaacagttcgccgtcgactttgaaaaacgcatagagggaagcggggaccaaatcgatacttatgaacttagtggcggagcccgaattaatagaatctttcatgaaagattcccattcgaattagttaagatggaatttgatgaaaaagagttgcggagagagatctcgtacgccatcaaaaatattcatgggatccggaccggcttatttacgcctgatcttgccttcgaggccaccgtaaagaagcaggtgcagaaactcaaagaacccagcattaaatgtgtcgacatggtagtaagcgagctgaccgctaccattcggaaatgtagtgagaaactgcagcagtacccacgactgagggaggaaatggaaaggattgttacaacccatatacgggaacgggaagggagaacgaaggagcaggtgatgttgttaattgatattgaactcgcgtacatgaacaccaaccatgaagactttattggatttgctaacgctcagcagaggagcaaccagatgaataagaagaagacaagcgggaatcaagatgaaatcctggtgatccgtaaggggtggctcaccatcaataacatcgggatcatgaagggcggatccaaggagtattggtttgtccttaccgccgagaacttaagctggtataaggatgatgaggagaaagaaaaaaaatatatgttgtccgtggacaatctaaagctgagggacgtggagaaaggcttcatgtcaagtaaacatatctttgcgcttttcaatacagaacagagaaacgtgtataaggattatcggcagttagagctggcatgtgagactcaggaggaggtagattcttggaaagctagctttcttcgggcaggtgtgtacccagagcgggtcggagataaggaaaaagcatccgagactgaggagaatgggtctgactcctttatgcacagcatggatcctcagctggaacggcaggtcgaaaccatcagaaatctggtggacagctacatggccatcgtgaacaaaaccgtgcgcgaccttatgcctaaaactatcatgcacctgatgatcaataatacaaaggagttcatcttttctgaacttctggctaatttgtacagctgcggggatcaaaataccttgatggaggagagtgcagagcaggcccagcgaagggatgagatgctgaggatgtaccatgccctgaaagaggcactctctatcatcggggatatcaataccacgaccgtgtccacccctatgccacccccagtcgacgacagttggctgcaggtacaatcagtccccgcaggaaggaggagcccaacctcttctccaaccccacagagacgggctccagcagttcccccagcgaggcctggaagcagggggccagcaccaggtccaccgcctgcaggatccgccctgggtggtgcccctcccgtgccatctaggcctggtgcgtcccctgacccttttgggcctccaccccaggtcccctcgaggccgaatagggcccctcccggagtgcccagtcgaagcggccaggcctctccaagccgccctgaatcacctcggcctccttttgatttatag

SEQ ID NO: 107016 - DNA, 2595 bp, Artificial Sequence
  derived and/or modified sequence
atgggcaacagaggcatggaggacctgatccccctggtgaacagactgcaggacgccttcagcgccatcggccagaacgccgacctggacctgccccagatcgccgtggtgggcggccagagcgccggcaagagcagcgtgctggagaacttcgtgggcagagacttcctgcccagaggcagcggcatcgtgaccagaagacccctggtgctgcagctggtgaacgccaccaccgagtacgccgagttcctgcactgcaagggcaagaagttcaccgacttcgaggaggtgagactggagatcgaggccgagaccgacagagtgaccggcaccaacaagggcatcagccccgtgcccatcaacctgagagtgtacagcccccacgtgctgaacctgaccctggtggacctgcccggcatgaccaaggtgcccgtgggcgaccagccccccgacatcgagttccagatcagagacatgctgatgcagttcgtgaccaaggagaactgcctgatcctggccgtgagccccgccaacagcgacctggccaacagcgacgccctgaaggtggccaaggaggtggacccccagggccagagaaccatcggcgtgatcaccaagctggacctgatggacgagggcaccgacgccagagacgtgctggagaacaagctgctgcccctgagaagaggctacatcggcgtggtgaacagaagccagaaggacatcgacggcaagaaggacatcaccgccgccctggccgccgagagaaagttcttcctgagccaccccagctacagacacctggccgacagaatgggcaccccctacctgcagaaggtgctgaaccagcagctgaccaaccacatcagagacaccctgcccggcctgagaaacaagctgcagagccagctgctgagcatcgagaaggaggtggaggagtacaagaacttcagacccgacgaccccgccagaaagaccaaggccctgctgcagatggtgcagcagttcgccgtggacttcgagaagagaatcgagggcagcggcgaccagatcgacacctacgagctgagcggcggcgccagaatcaacagaatcttccacgagagattccccttcgagctggtgaagatggagttcgacgagaaggagctgagaagagagatcagctacgccatcaagaacatccacggcatcagaaccggcctgttcacccccgacctggccttcgaggccaccgtgaagaagcaggtgcagaagctgaaggagcccagcatcaagtgcgtggacatggtggtgagcgagctgaccgccaccatcagaaagtgcagcgagaagctgcagcagtaccccagactgagagaggagatggagagaatcgtgaccacccacatcagagagagagagggcagaaccaaggagcaggtgatgctgctgatcgacatcgagctggcctacatgaacaccaaccacgaggacttcatcggcttcgccaacgcccagcagagaagcaaccagatgaacaagaagaagaccagcggcaaccaggacgagatcctggtgatcagaaagggctggctgaccatcaacaacatcggcatcatgaagggcggcagcaaggagtactggttcgtgctgaccgccgagaacctgagctggtacaaggacgacgaggagaaggagaagaagtacatgctgagcgtggacaacctgaagctgagagacgtggagaagggcttcatgagcagcaagcacatcttcgccctgttcaacaccgagcagagaaacgtgtacaaggactacagacagctggagctggcctgcgagacccaggaggaggtggacagctggaaggccagcttcctgagagccggcgtgtaccccgagagagtgggcgacaaggagaaggccagcgagaccgaggagaacggcagcgacagcttcatgcacagcatggacccccagctggagagacaggtggagaccatcagaaacctggtggacagctacatggccatcgtgaacaagaccgtgagagacctgatgcccaagaccatcatgcacctgatgatcaacaacaccaaggagttcatcttcagcgagctgctggccaacctgtacagctgcggcgaccagaacaccctgatggaggagagcgccgagcaggcccagagaagagacgagatgctgagaatgtaccacgccctgaaggaggccctgagcatcatcggcgacatcaacaccaccaccgtgagcacccccatgcccccccccgtggacgacagctggctgcaggtgcagagcgtgcccgccggcagaagaagccccaccagcagccccaccccccagagaagagcccccgccgtgccccccgccagacccggcagcagaggccccgcccccggccccccccccgccggcagcgccctgggcggcgccccccccgtgcccagcagacccggcgccagccccgaccccttcggcccccccccccaggtgcccagcagacccaacagagccccccccggcgtgcccagcagaagcggccaggccagccccagcagacccgagagccccagaccccccttcgacctgtag

SEQ ID NO: 107017 - DNA, 3143 bp, Artificial Sequence
  derived and/or modified sequence
gcagcctgcggggcccgccgcagccatgggcaaccgcggcatggaagatctcatcccgctggtcaaccggctgcaagacgccttctctgccatcggccagaacgcggacctcgacctgccgcagatcgctgtggtgggcggccagagcgccggcaagagctcggtgctcgagaatttcgtaggcagggacttcttgcctcgaggatctggcattgtcacccgacgtcccctggtcttgcagctggtcaatgcaaccacagaatatgccgagttcctgcactgcaagggaaagaaattcaccgacttcgaggaggtgcgccttgagatcgaggccgagaccgacagggtcaccggcaccaacaagggcatctcgccggtgcctatcaacctccgcgtctactcgccgcacgtgctgaacctgaccctggtggacctgcccggaatgaccaaggtcccggtgggggaccaacctcccgacatcgagttccagatccgagacatgcttatgcagtttgtcaccaaggagaactgcctcatcctggccgtgtcccccgccaactctgacctggccaattctgacgccctcaaggtcgccaaggaggtggacccccagggccagcgcaccatcggggtcatcaccaagctggacctgatggacgagggcacagatgcccgtgatgtgctggagaacaagctgctccccctgcgcagaggctacattggagtggtgaaccggagccagaaggacattgatggcaagaaggacattaccgccgccttggctgctgaacgaaagttcttcctctcccatccatcttatcgccacttggctgaccgtatgggcacgccctacctgcagaaggtcctcaatcagcaactgacgaaccacatccgggacacactgccggggctgcggaacaagctgcagagccagctactgtccattgagaaggaggtggaggaatacaagaacttccgccctgatgacccagctcgcaagaccaaggccctgctgcagatggtccagcagttcgccgtagactttgagaagcgcattgagggctcaggagatcagatcgacacctacgaactgtcagggggagcccgcattaaccgaatcttccacgagcgcttccctttcgagctggtcaagatggagtttgatgagaaggaactccgaagggagatcagctatgctatcaagaatatccatggcattaggacgggcctcttcacacctgacctcgcttttgaagccacagtgaaaaagcaggtgcagaagctcaaagagcccagtatcaagtgtgtggatatggtagtcagtgagctcacagccaccatcagaaagtgtagcgaaaagctccagcagtacccgcggctacgggaggagatggagcgcatcgtgaccacccacatccgggagcgcgagggccgcactaaggagcaggtcatgcttctcatcgatatcgagctggcttacatgaacaccaaccatgaggacttcataggctttgccaatgctcagcagaggagcaaccagatgaacaagaagaagacttcagggaaccaggatgagattctggtcatccgcaagggctggctgactatcaataatattggcatcatgaaagggggctccaaggagtactggtttgtgctgactgctgagaatctgtcctggtacaaggatgatgaggagaaagagaagaaatacatgctgtctgtggacaacctcaagctgcgggacgtggagaagggctttatgtcgagcaagcatatctttgccctctttaacacggagcagaggaatgtctacaaggattatcggcagctggagctagcctgtgagacacaggaggaggtggacagctggaaggcctccttcctgagggctggcgtgtaccctgagcgtgttggggacaaagagaaagccagcgagaccgaggagaatggctccgacagcttcatgcattccatggacccacagctggaacggcaagtggagaccatccggaatcttgtggactcatacatggccattgtcaacaagaccgtgagggacctcatgcccaagaccatcatgcacctcatgattaacaataccaaggagttcatcttctcggagctgctggccaacctgtactcgtgtggggaccagaacacgctgatggaggagtcggcggagcaggcacagcggcgcgacgagatgctgcgcatgtaccacgcactgaaggaggcgctcagcatcatcggcgacatcaacacgaccaccgtcagcacgcccatgcccccgcccgtggacgactcctggctgcaggtgcagagcgtaccggccggacgcaggtcgcccacgtccagccccacgccgcagcgccgagcccccgccgtgcccccagcccggcccgggtcgcggggccctgctcctgggcctccgcctgctgggtccgccctggggggggcgccccccgtgccctccaggccgggggcttcccctgaccctttcggccctccccctcaggtgccctcgcgccccaaccgcgccccgcccggggtccccagccgatcgggtcaggcaagtccatcccgtcctgagagccccaggccccccttcgacctctaaacagatccctcctcttctcggagacctccctttccaagcctgcctggacggctgttctgtgacttgacagtggctcccccagccccaaagccagcccccttcatctgtgacttaatctgttgtagtggtgagctgatacattcaggtgtgaccgttggtgaaaacttgtgccccttctgtggtatgcccttgccctgttctataaatatctataaatactcatatatatacacacctacacatggccaaccgcctcgcctctagcgctgggaatcagtcactgtgctatccttgtggagtcttgtggcccaactaccagagaacgctgtcccccgacatcccactccaaagtgtgccacctccagtgagcctccttgtcatgcccggcctgtggacagccagcccccgccatccctcccaccccctaccaagcatgggggtgctgtgcaggcagccgtgtggcctgacagtttctaccagtcctgctgtccctcggctgagaataaaacccatttctggatga

SEQ ID NO: 107018 - protein, 105 aa, Artificial Sequence
  derived and/or modified sequence
MLSARDRRDRHPEEGVVAELQGFAVDKAFLTSHKGILLETELDFLRCVSAIIIFLVVSFAAVTSRDGAAIAAFVFGIILVSIFAYDAFKIYRTEMAPGASQGDQQ

SEQ ID NO: 107019 - DNA, 318 bp, Artificial Sequence
  derived and/or modified sequence
atgctgtcagcccgggataggcgcgacagacaccctgaggaaggggtcgtagccgagttacagggatttgccgtggataaggccttcctgacatcccacaaagggatcttgctggagacggaactggactttttgcgctgtgtcagcgcgataatcatattcctagtggttagttttgcagcggtgactagccgggatggagccgccatcgcagcctttgtgttcggcataattcttgtgagcatctttgcctacgatgcctttaaaatttaccgaacagagatggcacccggtgccagtcagggggaccaacaatag

SEQ ID NO: 107020 - DNA, 318 bp, Artificial Sequence
  derived and/or modified sequence
atgctgagcgcccgggacagaagagacagacaccctgaggagggcgtggtggccgagctgcagggctttgctgtggacaaggccttcctgaccagccacaagggcatcctgctggagacagagctggacttcctgcgctgtgtgtctgccatcatcatcttcctggtggtgtcctttgctgctgtgaccagcagagatggagctgccatcgccgcctttgtgtttggcatcatcctggtgtccatctttgcctatgatgccttcaagatctacagaacagagatggcccctggggccagccagggcgaccagcagtag

SEQ ID NO: 107021 - DNA, 318 bp, Artificial Sequence
  derived and/or modified sequence
atgctgagcgcccgggaccggcgggaccggcaccccgaggagggcgtggtggccgagctccaaggttttgccgtcgacaaagcttttctcacttcccataagggtatcctactggagaccgagctggacttcctgaggtgtgtttctgccattattatatttctggtggtgagtttcgccgctgtcacttcacgcgacggagccgcaattgctgcctttgtgttcggtatcatcctggtaagcatctttgcctacgacgctttcaaaatatatcggaccgaaatggccccaggcgctagccagggtgaccagcagtag

SEQ ID NO: 107022 - DNA, 318 bp, Artificial Sequence
  derived and/or modified sequence
atgctgtctgcacgggaccggcgagatcgtcatccagaggagggagttgtggcagagctgcagggatttgctgttgacaaggcttttctgacttcacacaagggaatcctgcttgagactgagcttgatttcttacggtgcgtgtctgctattataatcttccttgtggtctccttcgctgccgtgactagtagggatggggcagccattgcagctttcgtttttgggattatcctcgtgtcgattttcgcttacgatgcatttaaaatttataggaccgaaatggcccctggcgcttctcaaggggatcagcagtag

SEQ ID NO: 107023 - DNA, 818 bp, Artificial Sequence
  derived and/or modified sequence
agcagaggcactctgggcagctgggtgagggcccatctgggcaaggcccccagcgcctgccttctctcccggggccctgtgggcaagcctcctgcttcactttcaggtttctcgaagtgccttcttgctcctgtctgtttccccatcctgccagatttctgtttctcttgctgggcttttggcagtagggggctgtgttggtgggccctacgaagatgctcagtgctcgagatcgccgggaccggcaccctgaggagggggtagttgcagagctccagggcttcgcggtggacaaggccttcctcacctcccacaagggcatcctgctggaaaccgagctggacttcctgcgctgtgtcagtgccatcatcatcttcctggtggtctcctttgcagctgtgacctcccgggacggagctgccattgctgcttttgtttttggcatcatcctggtttccatctttgcctatgatgccttcaagatctaccggactgagatggcacccggggccagccagggggaccagcagtgactctggggctacctggctcctaggcccagccagccagagaggacagtggagcccagacacgtctccttgggattcactagcccccagcccgccaaaccccaccccagccctacacagcagtctggcctgagacgtcactggggacttatctgtggagcctggtgctccaggatgtggcttctcatgaagctctggccagaggaggggaacttattgggggagggggggtggaggggaggaatctggacctctaagtcattcccaaattaaaatattcaaattcta

SEQ ID NO: 107024 - DNA, 318 bp, Artificial Sequence
  derived and/or modified sequence
atgctgagcgccagagacagaagagacagacaccccgaggagggcgtggtggccgagctgcagggcttcgccgtggacaaggccttcctgaccagccacaagggcatcctgctggagaccgagctggacttcctgagatgcgtgagcgccatcatcatcttcctggtggtgagcttcgccgccgtgaccagcagagacggcgccgccatcgccgccttcgtgttcggcatcatcctggtgagcatcttcgcctacgacgccttcaagatctacagaaccgagatggcccccggcgccagccagggcgaccagcagtag

SEQ ID NO: 107025 - protein, 74 aa, Artificial Sequence
  derived and/or modified sequence
MLSARDRRDRHPEEGVVAELQGFAVDKAFLTSHKGILLETELVFGIILVSIFAYDAFKIYRTEMAPGASQGDQQ

SEQ ID NO: 107026 - DNA, 225 bp, Artificial Sequence
  derived and/or modified sequence
atgttgagcgccagagaccgcagggaccgccaccccgaagagggtgtagtagctgagctacaaggattcgccgttgacaaggccttcctgacctctcacaaggggatcctcttagagacagaactcgtgttcggaatcatcctggtgtccatctttgcctacgacgcgtttaagatctataggaccgagatggccccaggggcatcccagggcgatcaacagtag

SEQ ID NO: 107027 - DNA, 225 bp, Artificial Sequence
  derived and/or modified sequence
atgctgagcgcccgggacagaagagacagacaccctgaggagggcgtggtggccgagctgcagggctttgctgtggacaaggccttcctgaccagccacaagggcatcctgctggagacagagctggtgtttggcatcatcctggtgtccatctttgcctatgatgccttcaagatctacagaacagagatggcccctggggccagccagggcgaccagcagtag

SEQ ID NO: 107028 - DNA, 225 bp, Artificial Sequence
  derived and/or modified sequence
atgctgagcgcccgggaccggcgggaccggcaccccgaggagggcgtagtagccgagctccaggggtttgcagtggacaaggcatttcttacttcccataagggcatactcctcgagactgagcttgtgtttggtattatccttgtatcgattttcgcatatgacgcctttaaaatatatcgcacagaaatggcccccggcgcttcgcagggtgaccagcagtag

SEQ ID NO: 107029 - DNA, 225 bp, Artificial Sequence
  derived and/or modified sequence
atgttatcagcccgtgacaggcgggacagacatccagaagaaggcgtggtcgccgaacttcaaggttttgcagtcgataaagcattcctgacatcacataaggggatccttctggagacagagcttgtgttcggtattattctggtgagtatatttgcttacgatgcgtttaaaatttacaggaccgagatggcacccggagcctcacagggagatcagcaatag

SEQ ID NO: 107030 - DNA, 725 bp, Artificial Sequence
  derived and/or modified sequence
agcagaggcactctgggcagctgggtgagggcccatctgggcaaggcccccagcgcctgccttctctcccggggccctgtgggcaagcctcctgcttcactttcaggtttctcgaagtgccttcttgctcctgtctgtttccccatcctgccagatttctgtttctcttgctgggcttttggcagtagggggctgtgttggtgggccctacgaagatgctcagtgctcgagatcgccgggaccggcaccctgaggagggggtagttgcagagctccagggcttcgcggtggacaaggccttcctcacctcccacaagggcatcctgctggaaaccgagctggtttttggcatcatcctggtttccatctttgcctatgatgccttcaagatctaccggactgagatggcacccggggccagccagggggaccagcagtgactctggggctacctggctcctaggcccagccagccagagaggacagtggagcccagacacgtctccttgggattcactagcccccagcccgccaaaccccaccccagccctacacagcagtctggcctgagacgtcactggggacttatctgtggagcctggtgctccaggatgtggcttctcatgaagctctggccagaggaggggaacttattgggggagggggggtggaggggaggaatctggacctctaagtcattcccaaattaaaatattcaaattcta

SEQ ID NO: 107031 - DNA, 225 bp, Artificial Sequence
  derived and/or modified sequence
atgctgagcgccagagacagaagagacagacaccccgaggagggcgtggtggccgagctgcagggcttcgccgtggacaaggccttcctgaccagccacaagggcatcctgctggagaccgagctggtgttcggcatcatcctggtgagcatcttcgcctacgacgccttcaagatctacagaaccgagatggcccccggcgccagccagggcgaccagcagtag

SEQ ID NO: 107032 - protein, 223 aa, Artificial Sequence
  derived and/or modified sequence
MLSARDRRDRHPEEGVVAELQGFAVDKAFLTSHKGILLETELALTLIIFICFTASISAYMAAALLEFFITLAFLFLYATQYYQRFDRINWPCLLQGHGQSGGPHPLDLLSHSAKVQPQPWPGLTPPGWHTPAAVPWVPAPAPGFWSWLLWFICFHSLGSSDFLRCVSAIIIFLVVSFAAVTSRDGAAIAAFVFGIILVSIFAYDAFKIYRTEMAPGASQGDQQ

SEQ ID NO: 107033 - DNA, 672 bp, Artificial Sequence
  derived and/or modified sequence
atgctctcagccagagaccgtcgggatagacaccctgaggagggagtggtggccgagctgcagggtttcgcagtcgataaagcattcctgacgtcccataagggtatcctgttagaaacagagctggctcttaccttaatcatttttatctgcttcactgccagtatctccgcctacatggccgccgccctgctggagttctttatcacattggccttcctctttctgtacgcaactcaatactaccagcggtttgataggattaattggccgtgtctactgcaaggtcatggacagtccgggggcccacacccgcttgatcttctcagccactctgccaaggttcagccccagccatggcccgggttgactccccctgggtggcacactcctgcagctgttccgtgggttccggctcccgccccagggttctggagctggttactgtggtttatctgttttcacagtcttggctccagcgattttctgcgatgtgtctcagccattatcatcttcctggttgtgagcttcgccgccgtgacctcaagggacggtgcggcaatcgctgcgttcgtctttggaatcattcttgtctcgatcttcgcctatgatgccttcaaaatttaccgaactgagatggcccctggggccagccagggtgaccagcaatag

SEQ ID NO: 107034 - DNA, 672 bp, Artificial Sequence
  derived and/or modified sequence
atgctgagcgcccgggacagaagagacagacaccctgaggagggcgtggtggccgagctgcagggctttgctgtggacaaggccttcctgaccagccacaagggcatcctgctggagacagagctggccctgaccctcatcatcttcatctgcttcaccgccagcatcagcgcctacatggccgccgccctgctggagttcttcatcaccctggccttcctgttcctgtatgccacccagtactaccagagatttgaccgcatcaactggccctgcctgctgcagggccacggccagagcggcggcccccaccccctggacctgctgagccacagcgccaaggtgcagccccagccctggccaggcctgaccccacctggctggcacaccccagctgctgtgccctgggtgcctgccccagcccctggcttctggagctggctgctgtggttcatctgcttccacagcctgggcagcagtgacttcctgcgctgtgtgtctgccatcatcatcttcctggtggtgtcctttgctgctgtgaccagcagagatggagctgccatcgccgcctttgtgtttggcatcatcctggtgtccatctttgcctatgatgccttcaagatctacagaacagagatggcccctggggccagccagggcgaccagcagtag

SEQ ID NO: 107035 - DNA, 672 bp, Artificial Sequence
  derived and/or modified sequence
atgctgagcgcccgggaccggcgggaccggcaccccgaggagggcgtggtggcggagctacagggatttgctgtagacaaagcatttctaacctcacacaaaggcatcctgctagagacagaacttgctctgaccctgataatcttcatttgtttcacagcttccatttcagcttacatggctgcagctctgcttgagttttttattacccttgcatttctttttctgtatgcaacccagtactatcaaaggttcgaccgcatcaactggccttgtctgctccagggccacgggcagagcggcggcccacaccccctcgatctactgagtcactcagcgaaggtccaaccgcagccatggccaggattgacgccccctgggtggcacacaccagcggccgtgccatgggtgccagcacccgcccccggcttctggtcatggctgttgtggtttatctgcttccattccctgggaagttccgactttctgaggtgcgtgagtgccattatcattttcttggtggtttccttcgctgccgtgacaagcagagatggcgcagctatcgcagccttcgtctttggcatcatcctcgtgagcattttcgcttacgatgcgttcaagatatacagaacagagatggctcctggggcctcacagggagaccagcagtag

SEQ ID NO: 107036 - DNA, 672 bp, Artificial Sequence
  derived and/or modified sequence
atgctgtcggcacgtgataggcgcgatcggcaccccgaagagggggtggttgcggagttacagggatttgcggtggacaaggcttttctgactagtcataagggcattctgctggaaaccgagctggccttgacactgattatcttcatctgcttcacagcaagtatatctgcctacatggcagctgccctgttggagttttttattactctggccttcttattcctctacgccactcagtattaccagcgcttcgacagaatcaattggccctgtcttctgcagggacatggccaaagtggagggccacaccctctggatctgttgtctcactccgccaaggtgcagccccaaccctggccgggactgacccccccagggtggcatacccccgcagcagtgccctgggtacccgctcctgcaccaggattttggtcctggctgctctggttcatttgcttccattcactgggttcatcagacttccttcggtgcgttagtgctataatcattttcctcgtggtgtcattcgccgctgtgaccagtcgggacggggctgctattgccgctttcgtcttcggtattatcctcgtcagcatctttgcctatgacgctttcaaaatataccggaccgagatggctccgggagccagccagggtgaccaacaatag

SEQ ID NO: 107037 - DNA, 1173 bp, Artificial Sequence
  derived and/or modified sequence
cagcagaggcactctgggcagctgggtgagggcccatctgggcaaggcccccagcgcctgccttctctcccggggccctgtgggcaagcctcctgcttcactttcaggtttctcgaagtgccttcttgctcctgtctgtttccccatcctgccagatttctgtttctcttgctgggcttttggcagtagggggctgtgttggtgggccctacgaagatgctcagtgctcgagatcgccgggaccggcaccctgaggagggggtagttgcagagctccagggcttcgcggtggacaaggccttcctcacctcccacaagggcatcctgctggaaaccgagctggccctgaccctcatcatcttcatctgcttcacggcctccatctctgcctacatggccgcggcgctactggagttcttcatcacacttgccttcctcttcctctatgccacccagtactaccagcgcttcgaccgaattaactggccctgtctgctgcagggccacgggcaatcaggaggaccacatccgctagatctactctcccactcagcaaaggtccagccccagccctggcctggcttgacccccccgggctggcatactccagccgctgtcccctgggttccagccccagcgcctggcttctggtcctggttgctctggttcatctgcttccactccctgggtagcagtgacttcctgcgctgtgtcagtgccatcatcatcttcctggtggtctcctttgcagctgtgacctcccgggacggagctgccattgctgcttttgtttttggcatcatcctggtttccatctttgcctatgatgccttcaagatctaccggactgagatggcacccggggccagccagggggaccagcagtgactctggggctacctggctcctaggcccagccagccagagaggacagtggagcccagacacgtctccttgggattcactagcccccagcccgccaaaccccaccccagccctacacagcagtctggcctgagacgtcactggggacttatctgtggagcctggtgctccaggatgtggcttctcatgaagctctggccagaggaggggaacttattgggggagggggggtggaggggaggaatctggacctctaagtcattcccaaattaaaatattcaaattcta

SEQ ID NO: 107038 - DNA, 672 bp, Artificial Sequence
  derived and/or modified sequence
atgctgagcgccagagacagaagagacagacaccccgaggagggcgtggtggccgagctgcagggcttcgccgtggacaaggccttcctgaccagccacaagggcatcctgctggagaccgagctggccctgaccctgatcatcttcatctgcttcaccgccagcatcagcgcctacatggccgccgccctgctggagttcttcatcaccctggccttcctgttcctgtacgccacccagtactaccagagattcgacagaatcaactggccctgcctgctgcagggccacggccagagcggcggcccccaccccctggacctgctgagccacagcgccaaggtgcagccccagccctggcccggcctgaccccccccggctggcacacccccgccgccgtgccctgggtgcccgcccccgcccccggcttctggagctggctgctgtggttcatctgcttccacagcctgggcagcagcgacttcctgagatgcgtgagcgccatcatcatcttcctggtggtgagcttcgccgccgtgaccagcagagacggcgccgccatcgccgccttcgtgttcggcatcatcctggtgagcatcttcgcctacgacgccttcaagatctacagaaccgagatggcccccggcgccagccagggcgaccagcagtag

SEQ ID NO: 107039 - protein, 650 aa, Artificial Sequence
  derived and/or modified sequence
MKKDVRILLVGEPRVGKTSLIMSLVSEEFPEEVPPRAEEITIPADVTPERVPTHIVDYSEAEQSDEQLHQEISQANVICIVYAVNNKHSIDKVTSRWIPLINERTDKDSRLPLILVGNKSDLVEYSSMETILPIMNQYTEIETCVECSAKNLKNISELFYYAQKAVLHPTGPLYCPEEKEMKPACIKALTRIFKISDQDNDGTLNDAELNFFQRICFNTPLAPQALEDVKNVVRKHISDGVADSGLTLKGFLFLHTLFIQRGRHETTWTVLRRFGYDDDLDLTPEYLFPLLKIPPDCTTELNHHAYLFLQSTFDKHDLDRDCALSPDELKDLFKVFPYIPWGPDVNNTVCTNERGWITYQGFLSQWTLTTYLDVQRCLEYLGYLGYSILTEQESQASAVTVTRDKKIDLQKKQTQRNVFRCNVIGVKNCGKSGVLQALLGRNLMRQKKIREDHKSYYAINTVYVYGQEKYLLLHDISESEFLTEAEIICDVVCLVYDVSNPKSFEYCARIFKQHFMDSRIPCLIVAAKSDLHEVKQEYSISPTDFCRKHKMPPPQAFTCNTADAPSKDIFVKLTTMAMYPEDHYRDRLSRDMGHTDRIENLRKIWVFLKTALHVTQADLKSSTFWLRASFGATVFAVLGFAMYKALLKQR

SEQ ID NO: 107040 - protein, 247 aa, Artificial Sequence
  derived and/or modified sequence
MKKDVRILLVGEPRVGKTSLIMSLVSEEFPEEVPPRAEEITIPADVTPERVPTHIVDYSEAEQSDEQLHQEISQANVICIVYAVNNKHSIDKVTSRWIPLINERTDKDSRLPLILVGNKSDLVEYSSMETILPIMNQYTEIETCVECSAKNLKNISELFYYAQKAVLHPTGPLYCPEEKEMKPACIKALTRIFKISDQDNDGTLNDAELNFFQRICFNTPLAPRFGFEQVLVLLFLQFWALLCTKHY

SEQ ID NO: 107041 - DNA, 1953 bp, Artificial Sequence
  derived and/or modified sequence
atgaagaaggacgtgcggattttattagtgggggagccccgcgttggaaaaacatcactcataatgtccctcgtgtccgaggagttccccgaggaagtccctccccgggcagaggagattacaatcccggcggacgtgactccggagagagtacctacacacattgttgattacagcgaggctgaacagagtgacgaacagcttcaccaagaaatttcacaggcaaatgtcatttgcattgtgtacgccgtgaataacaagcattccattgacaaggttactagccgttggatcccactcatcaacgaacgtactgacaaagacagccggcttcctttgatactggtcggaaataaaagcgacctggtagagtatagctccatggaaaccatcctgccaattatgaaccagtatactgaaatcgaaacttgcgtggagtgctccgcaaagaatttgaaaaacatatccgaacttttttactatgcccagaaggccgtgctccacccaacagggcctttgtactgtccagaagagaaagagatgaaacctgcatgcattaaagccctcacccggatcttcaagatcagcgaccaggacaatgacggtaccttgaacgacgccgagcttaatttttttcagagaatttgtttcaatacgcccctggccccccaggccctcgaagacgtcaagaatgtggtgaggaaacacattagtgatggcgtggctgattctgggctgactctcaagggttttctttttctgcacactctgtttattcaaaggggccgtcatgagacgacatggacggtgctcagacgatttggatacgacgatgacttggacctgactccggaatacctctttcccttgctcaaaattcctcctgactgtactaccgagctcaaccatcacgcatatctatttttgcagtccaccttcgacaagcatgacctcgatcgagactgcgcgctgagccctgacgaattgaaggacttgttcaaggttttcccatacattccctgggggcccgatgtcaacaacacggtatgtacgaacgagagaggatggatcacataccagggtttcttatcacagtggacactgactacctacttggacgttcaacggtgtcttgaatacctggggtacctgggctatagtattctcaccgagcaggaatctcaagcaagcgccgtcacggttacacgggacaagaagatcgatctgcagaagaagcagacgcaacgcaatgtctttaggtgtaatgtgattggtgtgaaaaactgtggcaaaagcggcgtgcttcaggccctgctcggtaggaatctaatgcgacagaagaagattcgagaggatcacaagtcatactatgccatcaatacggtgtatgtgtacgggcaggagaagtacctcctattgcacgacatttccgaatcggaattcctgactgaggctgaaatcatatgcgacgtcgtctgcctggtctatgacgtatctaaccctaaatcttttgaatactgtgctagaattttcaagcaacactttatggactctcgaatcccatgtctgatcgttgctgctaaaagcgatctgcacgaggtgaagcaggaatactccattagcccgacagacttctgcagaaaacacaaaatgccgcctcctcaggcttttacttgtaacaccgcagatgctccgtcaaaagacatcttcgtgaagttgacaacgatggctatgtaccccgaagatcactaccgggacaggctctccagagacatgggccatacagataggattgaaaatctgcggaagatctgggtctttctcaagactgcacttcacgttacccaggccgatctcaagtcctctacattttggctgcgagctagtttcggtgctaccgtgttcgctgtgcttgggttcgccatgtataaagcactcctgaagcagagatag

SEQ ID NO: 107042 - DNA, 1953 bp, Artificial Sequence
  derived and/or modified sequence
atgaagaaggatgtgcgcatcctgctggtgggggagccccgggtgggcaagaccagcctcatcatgagcctggtgtctgaggagttccctgaggaggtgccccccagggctgaggagatcaccatcccagcagatgtgaccccagagcgggtgcccacccacatcgtggactacagcgaggccgagcagagtgatgagcagctgcaccaggagatcagccaggccaacgtcatctgcatcgtgtatgctgtgaacaacaagcacagcattgacaaggtgaccagccgctggatccccctcatcaatgaaagaacagacaaggacagccggctgcccctcatcctggtgggcaacaagagtgacctggtggagtacagctccatggagaccatcctgcccatcatgaaccagtacacagaaattgagacctgtgtggagtgcagcgccaagaacctgaagaacatcagcgagctgttctactatgcccagaaggctgtgctgcaccccaccggccccctgtactgcccagaggagaaggagatgaagccagcctgcatcaaggccctgacccgcatcttcaagatcagtgaccaggacaatgatggcaccctgaatgatgctgagctgaacttcttccagaggatctgcttcaacacccccctggccccccaggccctggaggatgtgaagaatgtggtgaggaagcacatcagtgatggagtggccgacagcggcctgaccctgaagggcttcctgttcctgcacaccctcttcatccagagaggaagacatgagaccacctggacagtgctgcggcgcttcggctatgatgatgacctggacctgaccccagagtacctgttccccctgctgaagatccccccagactgcaccacagagctgaaccaccacgcctacctgttcctgcagagcacctttgacaagcatgacctggaccgggactgtgccctgagcccagatgagctgaaggacctcttcaaggtgttcccctacatcccctggggcccagatgtgaacaacacagtgtgcaccaatgaaagaggctggatcacctaccagggcttcctgagccagtggaccctgaccacctacctggatgtgcagcgctgcctggagtacctgggctacctgggctacagcatcctgacagagcaggagagccaggccagcgctgtgacagtgacccgggacaagaagattgacctgcagaagaagcagacccagagaaatgtgttccgctgcaacgtcatcggcgtgaagaactgtgggaagagcggcgtgctgcaggccctgctgggcaggaacctgatgaggcagaagaagatccgggaggaccacaagagctactatgccatcaacacagtgtatgtgtatggccaggagaagtacctgctgctgcatgacatcagcgagagcgagttcctgacagaagctgagatcatctgtgatgtggtgtgcctggtgtatgatgtgagcaaccccaagagctttgagtactgtgcccgcatcttcaagcagcacttcatggacagccgcatcccctgcctgattgtggccgccaagagtgacctgcacgaggtgaagcaggagtacagcatcagccccacagacttctgcaggaagcacaagatgcccccaccccaggccttcacctgcaacacagcagatgcccccagcaaggacatctttgtgaagctgaccaccatggccatgtacccagaggaccactacagagaccggctgagccgggacatgggccacacagacagaattgagaacctgaggaagatctgggtgttcctgaagacagccctgcacgtgacccaggccgacctgaagagcagcaccttctggctgcgggccagctttggagccaccgtgtttgctgtgctgggctttgccatgtacaaggccctgctgaagcagaggtag

SEQ ID NO: 107043 - DNA, 1953 bp, Artificial Sequence
  derived and/or modified sequence
atgaagaaggacgtgcggatcctgctggtgggcgagccccgggtgggtaaaacatcgctgattatgagtctagtgtcagaggaattccctgaggaagttccgcctcgggccgaagaaattacaatacctgccgacgtgacccctgagcgcgtacctactcatattgtcgactactccgaggctgagcagagcgatgaacagttgcatcaggaaatttctcaggctaacgtgatctgcatagtgtacgctgtgaacaacaaacattctatcgacaaggttacctcccggtggatcccgctgataaacgagcgtacggacaaggatagccgccttccccttattctggtgggaaacaaaagtgacctcgtcgaatattcaagcatggagacgatcttgcccattatgaaccagtacacagagatcgagacgtgtgttgagtgcagtgcaaagaacctaaagaacatcagcgaactgttttactatgctcaaaaggctgttctgcacccaacaggaccgctgtactgtcctgaggagaaagagatgaaacctgcgtgtataaaggccctaaccaggatattcaagattagcgatcaggacaacgacggcacattgaatgacgcggagctgaactttttccagcggatctgcttcaacactccccttgcccctcaagctctcgaggacgtaaagaacgtggtgaggaagcatatctcagatggagtcgctgattcgggcctcaccttaaagggttttctgttccttcacacactgtttattcaaaggggacggcacgaaaccacctggacggtccttaggcggttcggatatgatgacgatcttgatctcactcctgaatacttattccctctgcttaaaattcctcctgattgtacaacggagctcaaccatcatgcatatctgttcctgcagtcgaccttcgacaaacacgacctggaccgggattgcgccctgtccccagacgagttgaaggatctcttcaaggtatttccttatattccatggggaccagatgtaaacaatacagtttgtaccaacgaaaggggttggataacctatcaggggttcctgagtcaatggaccctgacaacttacctcgacgtgcaacgctgtcttgaatatctcgggtacctgggctattcaatattgacagagcaagagagtcaagccagcgctgttactgtgactcgtgataagaaaattgacctccagaaaaagcagacccagcgcaacgtgtttagatgtaacgtgatcggtgtcaagaattgtgggaaatccggagttctgcaagcactgctgggccggaatctcatgagacagaagaagatccgggaagatcataagtcatattatgctatcaacacagtatatgtttacggacaggagaagtacctgctcctgcacgacatttcagaatccgagttcctaacagaagctgagatcatctgcgatgtcgtgtgccttgtctacgatgttagcaaccccaaatcttttgagtactgcgcccggatcttcaagcagcatttcatggactctaggatcccatgccttatcgtcgcagccaaatcggatctccatgaggtcaaacaggaatattccatctctccaactgatttttgcagaaaacataagatgcctccgcctcaggcttttacttgcaacaccgccgacgcccccagcaaggacattttcgtgaagcttacaacaatggcaatgtacccagaagaccattatcgcgatcgcctaagccgggacatgggacacacagatcgcatcgaaaacctgaggaagatctgggtgttcctgaaaacggctttgcatgtgacacaggccgacctgaagtcgtcaacattttggttgcgcgcaagttttggcgccaccgtctttgcagtgctggggtttgccatgtataaggccctcttgaagcagcgatag

SEQ ID NO: 107044 - DNA, 1953 bp, Artificial Sequence
  derived and/or modified sequence
atgaaaaaagatgtccgcatcctgctcgttggcgagcccagggtgggcaagacctctctcataatgtccttagtgtctgaggaattccccgaggaggtgccacccagagcagaggagatcactattcctgctgacgtcactcctgaacgcgtccctacccatattgtcgattacagcgaggcagagcagagcgacgaacagctgcaccaggagatttcccaggctaacgtcatctgtatcgtctacgctgtcaacaacaagcactccatcgataaagtgacctcacgctggatcccgcttatcaacgagagaactgataaggattctagattgcccctgattctggtgggaaacaaaagcgaccttgtcgagtattcaagtatggagacaatcctgccaatcatgaaccagtatactgaaattgagacatgtgtcgagtgctcggccaagaacctcaaaaatatctccgagcttttctactacgcccagaaagccgtgttgcatccgactgggcctctttactgtccagaggaaaaggaaatgaagccagcatgtattaaagcactcactcgcattttcaagatttcggatcaggataatgacggtacattaaatgatgccgaactcaacttttttcagaggatatgtttcaacactccattagccccacaggccctggaggacgtgaagaacgtggtgaggaagcacatctctgatggtgtcgcagatagtggtctgacactgaaaggatttctgttccttcacaccttatttatacagcgcggtcgacacgaaacaacctggaccgtattacggcgtttcgggtacgatgacgatcttgatctgactccggaatatctgtttcctctcctgaagatccccccagattgcacaacagagcttaatcaccacgcctatctctttctacaaagcaccttcgacaaacatgacctagacagagactgcgccttgtcacccgacgagttgaaggacctgttcaaggttttcccctacataccatgggggccagacgtaaataataccgtatgtaccaatgagcggggatggattacatatcagggattcctgagccagtggaccctcaccacctacctggacgtgcagaggtgccttgagtaccttgggtatctgggatatagcattctcactgagcaggagtcccaggcctcagctgtgactgtgacaagggataagaaaattgacctacagaagaagcaaacacagcgaaatgtgtttcggtgtaatgtgattggggtaaaaaattgcggtaagagcggagtgcttcaagccctgctggggagaaatcttatgcgccaaaaaaagatcagagaagatcacaaatcctattatgcaataaacaccgtgtacgtttacggccaggaaaaatatctgcttctccatgacatctccgaatcagagtttctcaccgaggcagaaattatttgcgacgttgtttgcttagtgtatgacgtgtcgaaccccaaatcttttgagtattgtgccaggatttttaagcaacattttatggattcacgcatcccgtgcctgatcgtcgctgctaaatccgatttacacgaggtgaagcaggaatacagcatttcacctacagacttctgccgcaaacataagatgcctccaccccaagcttttacttgtaacacagccgatgccccttctaaagatatctttgtcaagctgactaccatggccatgtaccctgaggatcactaccgggaccgcctctctcgagatatgggccacaccgaccgtattgagaacttacggaaaatctgggtctttctgaaaactgctctccatgtcacgcaggccgatctgaaaagcagcactttctggttgagggcctcttttggagccacagtgtttgccgtgctgggctttgcaatgtacaaggcgcttctgaagcaacggtag

SEQ ID NO: 107045 - DNA, 3186 bp, Artificial Sequence
  derived and/or modified sequence
gccgccgccgccgccgccgccgccgccgccgccgccgccgccgccgccacagcccgctgggccggaggaggcggagctggcgctgtcccggctctcttgcggggaagcaactgagggggcggcgcggcgggccccggcggccgaagaggctggcaggtggcgccgtggggtgggtgctcctggtgagaggagtccactccgtgcgtgcgggcggaggccggcccccgagagccgccgacatgaagaaagacgtgcggatcctgctggtgggagaacctagagttgggaagacatcactgattatgtctctggtcagtgaagaatttccagaagaggttcctccccgggcagaagaaatcaccattccagctgatgtcaccccagagagagttccaacacacattgtagattactcagaagcagaacagagtgatgaacaacttcatcaagaaatatctcaggctaatgtcatctgtatagtgtatgccgttaacaacaagcattctattgataaggtaacaagtcgatggattcctctcataaatgaaagaacagacaaagacagcaggctgcctttaatattggttgggaacaaatctgatctggtggaatatagtagtatggagaccatccttcctattatgaaccagtatacagaaatagaaacctgtgtggagtgttcagcgaaaaacctgaagaacatatcagagctcttttattacgcacagaaagctgttcttcatcctacagggcccctgtactgcccagaggagaaggagatgaaaccagcttgtataaaagcccttactcgtatatttaaaatatctgatcaagataatgatggtactctcaatgatgctgaactcaacttctttcagaggatttgtttcaacactccattagctcctcaagctctggaggatgtcaagaatgtagtcagaaaacatataagtgatggtgtggctgacagtgggttgaccctgaaaggttttctctttttacacacactttttatccagagagggagacacgaaactacttggactgtgcttcgacgatttggttatgatgatgacctggatttgacacctgaatatttgttccccctgctgaaaatacctcctgattgcactactgaattaaatcatcatgcatatttatttctccaaagcacctttgacaagcatgatttggatagagactgtgctttgtcacctgatgagcttaaagatttatttaaagttttcccttacataccttgggggccagatgtgaataacacagtttgtaccaatgaaagaggctggataacctaccagggattcctttcccagtggacgctcacgacttatttagatgtacagcggtgcctggaatatttgggctatctaggctattcaatattgactgagcaagagtctcaagcttcagctgttacagtgacaagagataaaaagatagacctgcagaaaaaacaaactcaaagaaatgtgttcagatgtaatgtaattggagtgaaaaactgtgggaaaagtggagttcttcaggctcttcttggaagaaacttaatgaggcagaagaaaattcgtgaagatcataaatcctactatgcgattaacactgtttatgtatatggacaagagaaatacttgttgttgcatgatatctcagaatcggaatttctaactgaagctgaaatcatttgtgatgttgtatgcctggtatatgatgtcagcaatcccaaatcctttgaatactgtgccaggatttttaagcaacactttatggacagcagaataccttgcttaatcgtagctgcaaagtcagacctgcatgaagttaaacaagaatacagtatttcacctactgatttctgcaggaaacacaaaatgcctccaccacaagccttcacttgcaatactgctgatgcccccagtaaggatatctttgttaaattgacaacaatggccatgtatccagaggatcattacagagacagactctcccgagacatgggccacactgatagaatagagaatttgagaaaaatctgggtctttctaaaaactgctttgcacgtgacacaagctgacctcaagagctccacgttttggcttcgagcaagttttggtgctactgtttttgcagttttgggctttgctatgtacaaagcattattgaaacagcgatgatataaaaagaaatactgtccctaccaaaaacaaatacttttatgtacattctgaatgctttaagttctgctagaattattgagatatttatacatgcagagttactttattaatatttgtaattcatgcataagagtattttaatgatagttataactgcagtattggctagcatatggaaagaaaacagctaacagccaaactaaaatggctaaattccagaggccaaaagggaatattttgtaaatatatgtacatattcaggcaagatatggtctcccaagctgagttctagaaatgatgtttctagacatttctaagtggtattgttagtgctcacttggctcactcttctaggtttaagttagcccagagattgtatttactcatggatcactttatttatttcacatttactcagaatgatcctttgggttctataaggacataaggtacaatttgccattgtctctccatttttaaaaacatacaagtcagtgtcagcttaccaacatgacattttttcagtcagttgtggtaggccagccttgaagccatcgcacagtctagaaacttgtgtagctgagtgtgcagctcacctttaagggtgaagttaggtaaaagcaattagcagaggcgttatctatgtgattatgttgcttccttgtcagtatgttgaattttatagccctttcaatgaaataaaaaaaaaatttgtatattaccaatgtttttagtttaaataaagagtcacccttactactgttgaatttcatcccaagtgtaaatcattctataatggctgtgtctgttatagtatattacagtaactgcatgtgtcaccaagtgttctatatcaggctaggataacctagaggcagtaattttttaaatgataaaataaatctaatgaatataaactctcatgataaacctattttttccatcatcagccttttcaagtatttaaataaataactgctgtgtactgtga

SEQ ID NO: 107046 - DNA, 1953 bp, Artificial Sequence
  derived and/or modified sequence
atgaagaaggacgtgagaatcctgctggtgggcgagcccagagtgggcaagaccagcctgatcatgagcctggtgagcgaggagttccccgaggaggtgccccccagagccgaggagatcaccatccccgccgacgtgacccccgagagagtgcccacccacatcgtggactacagcgaggccgagcagagcgacgagcagctgcaccaggagatcagccaggccaacgtgatctgcatcgtgtacgccgtgaacaacaagcacagcatcgacaaggtgaccagcagatggatccccctgatcaacgagagaaccgacaaggacagcagactgcccctgatcctggtgggcaacaagagcgacctggtggagtacagcagcatggagaccatcctgcccatcatgaaccagtacaccgagatcgagacctgcgtggagtgcagcgccaagaacctgaagaacatcagcgagctgttctactacgcccagaaggccgtgctgcaccccaccggccccctgtactgccccgaggagaaggagatgaagcccgcctgcatcaaggccctgaccagaatcttcaagatcagcgaccaggacaacgacggcaccctgaacgacgccgagctgaacttcttccagagaatctgcttcaacacccccctggccccccaggccctggaggacgtgaagaacgtggtgagaaagcacatcagcgacggcgtggccgacagcggcctgaccctgaagggcttcctgttcctgcacaccctgttcatccagagaggcagacacgagaccacctggaccgtgctgagaagattcggctacgacgacgacctggacctgacccccgagtacctgttccccctgctgaagatcccccccgactgcaccaccgagctgaaccaccacgcctacctgttcctgcagagcaccttcgacaagcacgacctggacagagactgcgccctgagccccgacgagctgaaggacctgttcaaggtgttcccctacatcccctggggccccgacgtgaacaacaccgtgtgcaccaacgagagaggctggatcacctaccagggcttcctgagccagtggaccctgaccacctacctggacgtgcagagatgcctggagtacctgggctacctgggctacagcatcctgaccgagcaggagagccaggccagcgccgtgaccgtgaccagagacaagaagatcgacctgcagaagaagcagacccagagaaacgtgttcagatgcaacgtgatcggcgtgaagaactgcggcaagagcggcgtgctgcaggccctgctgggcagaaacctgatgagacagaagaagatcagagaggaccacaagagctactacgccatcaacaccgtgtacgtgtacggccaggagaagtacctgctgctgcacgacatcagcgagagcgagttcctgaccgaggccgagatcatctgcgacgtggtgtgcctggtgtacgacgtgagcaaccccaagagcttcgagtactgcgccagaatcttcaagcagcacttcatggacagcagaatcccctgcctgatcgtggccgccaagagcgacctgcacgaggtgaagcaggagtacagcatcagccccaccgacttctgcagaaagcacaagatgccccccccccaggccttcacctgcaacaccgccgacgcccccagcaaggacatcttcgtgaagctgaccaccatggccatgtaccccgaggaccactacagagacagactgagcagagacatgggccacaccgacagaatcgagaacctgagaaagatctgggtgttcctgaagaccgccctgcacgtgacccaggccgacctgaagagcagcaccttctggctgagagccagcttcggcgccaccgtgttcgccgtgctgggcttcgccatgtacaaggccctgctgaagcagagatag

SEQ ID NO: 107047 - protein, 184 aa, Artificial Sequence
  derived and/or modified sequence
MMGASTLQEPALSPGRCPRQPLRSKFGHQGSTVQRKCSKTNALNVSQKMIEMFVRTKHKIDKSHEFALVVVNDDTAWLSGLTSDPRELCSCLYDLETASCSTFNISGASPARQQKTELPVTENVQTIPPPYVVRTILVYSRPPCQPQFSLTEPMKKMFQCPYFFFDVVYIHNGTEEKEEEMSWK

SEQ ID NO: 107048 - protein, 329 aa, Artificial Sequence
  derived and/or modified sequence
MEVAEPSSPTEEEEEEEEHSAEPRPRTRSNPEGAEDRAVGAQASVGSRSEGEGEAASADDGSLNTSGAGPKSWQVPPPAPEVQIRTPRVNCPEKVIICLDLSEEMSLPKLESFNGSKTNALNVSQKMIEMFVRTKHKIDKSHEFALVVVNDDTAWLSGLTSDPRELCSCLYDLETASCSTFNLEGLFSLIQQKTELPVTENVQTIPPPYVVRTILVYSRPPCQPQFSLTEPMKKMFQCPYFFFDVVYIHNGTEEKEEEMSWKDMFAFMGSLDTKGTSYKYEVALAGPALELHNCMAKLLAHPLQRPCQSHASYSLLEEEDEAIEVEATV

SEQ ID NO: 107049 - protein, 329 aa, Artificial Sequence
  derived and/or modified sequence
MEVAEPSSPTEEEEEEEEHSAEPRPRTRSNPEGAEDRAVGAQASVGSRSEGEGEAASADDGSLNTSGAGPKSWQVPPPAPEVQIRTPRVNCPEKVIICLDLSEEMSLPKLESFNGSKTNALNVSQKMIEMFVRTKHKIDKSHEFALVVVNDDTAWLSGLTSDPRELCSCLYDLETASCSTFNISGASPARQQKTELPVTENVQTIPPPYVVRTILVYSRPPCQPQFSLTEPMKKMFQCPYFFFDVVYIHNGTEEKEEEMSWKDMFAFMGSLDTKGTSYKYEVALAGPALELHNCMAKLLAHPLQRPCQSHASYSLLEEEDEAIEVEATV

SEQ ID NO: 107050 - DNA, 990 bp, Artificial Sequence
  derived and/or modified sequence
atggaggtggccgagcccagcagccccaccgaggaggaggaggaggaggaggagcacagcgccgagcccagacccagaaccagaagcaaccccgagggcgccgaggacagagccgtgggcgcccaggccagcgtgggcagcagaagcgagggcgagggcgaggccgccagcgccgacgacggcagcctgaacaccagcggcgccggccccaagagctggcaggtgcccccccccgcccccgaggtgcagatcagaacccccagagtgaactgccccgagaaggtgatcatctgcctggacctgagcgaggagatgagcctgcccaagctggagagcttcaacggcagcaagaccaacgccctgaacgtgagccagaagatgatcgagatgttcgtgagaaccaagcacaagatcgacaagagccacgagttcgccctggtggtggtgaacgacgacaccgcctggctgagcggcctgaccagcgaccccagagagctgtgcagctgcctgtacgacctggagaccgccagctgcagcaccttcaacctggagggcctgttcagcctgatccagcagaagaccgagctgcccgtgaccgagaacgtgcagaccatcccccccccctacgtggtgagaaccatcctggtgtacagcagacccccctgccagccccagttcagcctgaccgagcccatgaagaagatgttccagtgcccctacttcttcttcgacgtggtgtacatccacaacggcaccgaggagaaggaggaggagatgagctggaaggacatgttcgccttcatgggcagcctggacaccaagggcaccagctacaagtacgaggtggccctggccggccccgccctggagctgcacaactgcatggccaagctgctggcccaccccctgcagagaccctgccagagccacgccagctacagcctgctggaggaggaggacgaggccatcgaggtggaggccaccgtgtag

SEQ ID NO: 107051 - DNA, 990 bp, Artificial Sequence
  derived and/or modified sequence
atggaggtggccgagcccagcagccccaccgaggaggaggaggaggaggaggagcacagcgccgagcccagacccagaaccagaagcaaccccgagggcgccgaggacagagccgtgggcgcccaggccagcgtgggcagcagaagcgagggcgagggcgaggccgccagcgccgacgacggcagcctgaacaccagcggcgccggccccaagagctggcaggtgcccccccccgcccccgaggtgcagatcagaacccccagagtgaactgccccgagaaggtgatcatctgcctggacctgagcgaggagatgagcctgcccaagctggagagcttcaacggcagcaagaccaacgccctgaacgtgagccagaagatgatcgagatgttcgtgagaaccaagcacaagatcgacaagagccacgagttcgccctggtggtggtgaacgacgacaccgcctggctgagcggcctgaccagcgaccccagagagctgtgcagctgcctgtacgacctggagaccgccagctgcagcaccttcaacatcagcggcgccagccccgccagacagcagaagaccgagctgcccgtgaccgagaacgtgcagaccatcccccccccctacgtggtgagaaccatcctggtgtacagcagacccccctgccagccccagttcagcctgaccgagcccatgaagaagatgttccagtgcccctacttcttcttcgacgtggtgtacatccacaacggcaccgaggagaaggaggaggagatgagctggaaggacatgttcgccttcatgggcagcctggacaccaagggcaccagctacaagtacgaggtggccctggccggccccgccctggagctgcacaactgcatggccaagctgctggcccaccccctgcagagaccctgccagagccacgccagctacagcctgctggaggaggaggacgaggccatcgaggtggaggccaccgtgtag

SEQ ID NO: 107052 - DNA, 555 bp, Artificial Sequence
  derived and/or modified sequence
atgatgggcgccagtaccctacaggaacctgccctcagccctggccggtgcccacgacagcctctgcgcagcaaatttgggcatcaaggctccaccgtccagcgtaagtgcagtaaaaccaacgccctgaacgtgtcgcaaaagatgatagagatgttcgtgcgcacaaagcataaaatagacaagtcccacgagtttgccctggtagtggtgaatgatgacaccgcctggctgtccggtctgacttcagacccacgcgagttatgcagttgcctgtacgacctcgagactgcctcatgctctactttcaatatctcgggagcgagcccggcccggcagcagaaaactgagctgcctgtgaccgaaaatgttcagaccatccccccaccgtacgtcgtacggaccatcttggtctacagccgacccccttgtcagccacagttcagcctgactgagcccatgaaaaaaatgtttcagtgcccgtatttcttctttgatgtggtatacatccacaatggcacggaagaaaaggaggaggagatgtcatggaaatag

SEQ ID NO: 107053 - DNA, 1451 bp, Artificial Sequence
  derived and/or modified sequence
ggaggcgtcggggctgcgccgtacaacttccggctgtaaagatggcggcttcctagtgagtcggcggctgatttagaaggaggttcaggctacggtgagccgaaggggaggattctggcttcccctgtccgtgttccatctagccacacaggagccatggaagtggcagagcccagcagccccactgaagaggaggaggaggaagaggagcactcggcagagcctcggccccgcactcgctccaatcctgaaggggctgaggaccgggcagtaggggcacaggccagcgtgggcagccgcagcgagggtgagggtgaggccgccagtgctgatgatgggagcctcaacacttcaggagccggccctaagtcctggcaggtgcccccgccagcccctgaggtccaaattcggacaccaagggtcaactgtccagagaaagtgattatctgcctggacctgtcagaggaaatgtcactgccaaagctggagtcgttcaacggctccaaaaccaacgccctcaatgtctcccagaagatgattgagatgttcgtgcggacaaaacacaagatcgacaaaagccacgagtttgcactggtggtggtgaacgatgacacggcctggctgtctggcctgacctccgacccccgcgagctctgtagctgcctctatgatctggagacggcctcctgttccaccttcaatctggaaggacttttcagcctcatccagcagaaaactgagcttccggtcacagagaacgtgcagacgattcccccgccatatgtggtccgcaccatccttgtctacagccgtccaccttgccagccccagttctccttgacggagcccatgaagaaaatgttccagtgcccatatttcttctttgacgttgtttacatccacaatggcactgaggagaaggaggaggagatgagttggaaggatatgtttgccttcatgggcagcctggataccaagggtaccagctacaagtatgaggtggcactggctgggccagccctggagttgcacaactgcatggcgaaactgttggcccaccccctgcagcggccttgccagagccatgcttcctacagcctgctggaggaggaggatgaagccattgaggttgaggccactgtctgaaccatccctgtacatctgcaccttcttgtgcaaggaagtccttggcctaaagccttggttctcaaactgggttccttgggacctccggggtgggggggttccaggaggcacgtagggtaccttgcagggtcctaggagggaaacccaggattccaggagggatcccaggaactgtgggcacccattttctgtgtctcccagcccatttccactcctagtttgtcatggataatttttgttcttccctgtgtgatttttgccatcaaaataaaaatttgagactcgttaaccgaagtccacgccaa

SEQ ID NO: 107054 - DNA, 990 bp, Artificial Sequence
  derived and/or modified sequence
atggaagtggctgagccatcgagccccaccgaggaagaagaggaggaggaagaacactcggcagagccacggcctcggacccggagtaaccctgaaggggcagaggatcgggccgttggcgcgcaggccagcgtgggatcccgaagtgagggagagggtgaggctgcgtcagcagacgatgggtcactgaatacatccggcgctggccccaaaagctggcaggtgccaccacctgcgccagaggtgcagattcgcactccacgggtgaattgccctgaaaaggtcatcatatgcttggacctgagcgaagaaatgtctctgcctaaactcgagtccttcaatggtagcaagactaatgcactgaacgtgtcccaaaaaatgatcgagatgtttgttcgcaccaaacacaaaattgacaaatcgcatgagtttgctctcgttgtggtgaatgatgatacagcctggctatccggcctcactagtgaccctcgcgagttatgctcatgtctttacgatctggaaaccgcgagttgttctacatttaacctggagggcttattctcccttatccagcagaaaaccgaattgcccgtaaccgaaaatgtgcagaccattccccctccttatgtggttagaaccattctagtatacagcaggccaccctgtcagccacagttctctctgaccgagcctatgaaaaagatgttccagtgtccttatttcttcttcgatgtggtgtatatccataatggaaccgaagagaaggaggaggaaatgtcatggaaggatatgttcgcctttatggggtcactggacacaaaagggacctcctacaaatacgaggtggccctcgccggacccgccctcgaactgcataactgtatggcaaagctgcttgcccacccccttcagagaccttgccagagtcacgcctcctattcccttctcgaggaggaagatgaggcaattgaggtggaagccacagtgtag

SEQ ID NO: 107055 - DNA, 990 bp, Artificial Sequence
  derived and/or modified sequence
atggaagtcgcggaaccatcatcaccaacagaggaggaagaggaggaggaggaacactccgccgaaccacgacctaggaccaggtccaacccggagggtgccgaggaccgggcggttggcgctcaggcttccgtgggctctcgttctgagggtgaaggtgaggctgccagcgccgacgacggtagtctgaacacatccggggcggggcccaagtcatggcaggttccaccgccagcccccgaggtgcagatcagaacgcccagagtgaactgtcccgagaaggtcatcatatgcttggatctgagcgaggagatgtctctccccaagctggaaagttttaatggctcaaaaacgaatgcccttaacgtgagtcagaaaatgatcgaaatgttcgtacgaaccaaacacaagatcgataaatcccatgagttcgctttggttgtcgtgaacgatgacactgcatggctgtctgggctgacctccgatccaagggagctctgctcatgcctatacgatttagagaccgcctcttgttctacttttaacatcagcggcgccagccccgctaggcagcagaagactgaactgcccgtaacagaaaatgtgcagaccattccacctccttacgtggtcaggactattctggtctactcccggccaccctgccagcctcagttctccctgacagagcccatgaaaaaaatgttccagtgtccctactttttcttcgacgtggtgtatattcacaacggaactgaggagaaggaagaagaaatgagctggaaggacatgttcgccttcatgggatcccttgatacaaaggggacgagctacaagtatgaggtggccttagccggacccgcccttgaactccataattgcatggccaaactgttggctcaccctcttcagcgtccctgccagagtcacgcaagttactccctgctggaagaagaggacgaggccattgaggtggaagccacagtgtag

SEQ ID NO: 107056 - DNA, 990 bp, Artificial Sequence
  derived and/or modified sequence
atggaggtagctgaaccctcctcccctaccgaagaggaggaagaggaagaggagcactccgcagaacctaggccaagaactaggtcaaatcctgagggcgccgaagacagagcagtgggcgcacaggctagcgtggggagccgcagtgagggggagggcgaggctgcctcagcagacgacggctcactgaatacctctggagcaggtccgaagtcctggcaggttccccccccagcaccagaagttcagatccgcactcctcgagtcaactgtccagagaaggtcatcatctgcctggatctcagtgaagaaatgagtctgccaaagttggaaagcttcaatggttcaaagacaaatgccctcaacgtcagtcagaagatgattgaaatgttcgtcaggaccaagcataagatagacaagagccatgagttcgccctggtggtggtcaacgacgacacagcttggctttccggtctcacctcagatccgagggagctgtgctcctgtttgtacgatctagaaactgcttcttgtagtacattcaacttggaggggctgttctccttaattcagcagaaaaccgaactccctgtcaccgaaaatgtccagacaattcctcccccctatgtggttcggacaattctggtctattccaggcctccctgccagcctcagttctcactgaccgaaccaatgaaaaagatgtttcagtgcccctacttcttctttgacgtggtgtatattcacaacggaaccgaggagaaggaggaggagatgtcctggaaggacatgtttgcttttatgggttctttggatactaagggaaccagttacaaatatgaggtcgccctcgctggacccgccctggagctccataactgcatggctaagcttctcgctcacccacttcaacgaccgtgccaatcccacgcgtcctattcgctcctggaggaggaggatgaggccattgaggtggaagctactgtttag

SEQ ID NO: 107057 - DNA, 555 bp, Artificial Sequence
  derived and/or modified sequence
atgatgggcgccagcaccctgcaggagcccgccctgagccctggccgctgcccccggcagcccctgcggagcaagtttggccaccagggcagcacagtgcagaggaagtgcagcaagaccaatgccctgaatgtgtcccagaagatgattgagatgtttgtgaggaccaagcacaagattgacaagagccatgaatttgccctggtggtggtgaatgatgacacagcctggctgagcggcctgaccagtgacccccgggagctgtgcagctgcctgtatgacctggagacagccagctgcagcaccttcaacatcagcggggccagccctgcccggcagcagaagacagagctgcctgtgacagaaaatgtgcagaccatccccccaccctacgtggtgaggaccatcctggtgtacagccggcccccctgccagccccagttcagcctgacagagcccatgaagaagatgttccagtgcccctacttcttctttgatgtggtgtacatccacaacggcacagaggagaaggaggaggagatgtcctggaagtag

SEQ ID NO: 107058 - DNA, 990 bp, Artificial Sequence
  derived and/or modified sequence
atggaggtggccgagcccagcagccccacagaggaggaggaggaggaggaggagcacagcgctgagccccggcccaggaccaggagcaaccctgagggcgcagaagatagagctgtgggcgcccaggcctctgtgggcagccgctctgagggggagggggaggccgccagcgcagatgatggcagcctgaacaccagcggggccggccccaagtcctggcaggtgcccccaccagcccctgaggtgcagatccgcaccccccgggtgaactgcccagagaaggtgatcatctgcctggacctgtctgaggagatgagcctgcccaagctggagagcttcaacggcagcaagaccaatgccctgaatgtgtcccagaagatgattgagatgtttgtgaggaccaagcacaagattgacaagagccatgaatttgccctggtggtggtgaatgatgacacagcctggctgagcggcctgaccagtgacccccgggagctgtgcagctgcctgtatgacctggagacagccagctgcagcaccttcaacctggagggcctcttcagcctcatccagcagaagacagagctgcctgtgacagaaaatgtgcagaccatccccccaccctacgtggtgaggaccatcctggtgtacagccggcccccctgccagccccagttcagcctgacagagcccatgaagaagatgttccagtgcccctacttcttctttgatgtggtgtacatccacaacggcacagaggagaaggaggaggagatgtcctggaaggacatgtttgccttcatgggcagcctggacaccaagggcaccagctacaagtatgaggtggccctggccggccctgccctggagctgcacaactgcatggccaagctgctggcccaccccctgcagaggccctgccagagccacgccagctacagcctgctggaggaggaggatgaggccatcgaggtggaggccaccgtgtag

SEQ ID NO: 107059 - DNA, 990 bp, Artificial Sequence
  derived and/or modified sequence
atggaggtggccgagcccagcagccccacagaggaggaggaggaggaggaggagcacagcgctgagccccggcccaggaccaggagcaaccctgagggcgcagaagatagagctgtgggcgcccaggcctctgtgggcagccgctctgagggggagggggaggccgccagcgcagatgatggcagcctgaacaccagcggggccggccccaagtcctggcaggtgcccccaccagcccctgaggtgcagatccgcaccccccgggtgaactgcccagagaaggtgatcatctgcctggacctgtctgaggagatgagcctgcccaagctggagagcttcaacggcagcaagaccaatgccctgaatgtgtcccagaagatgattgagatgtttgtgaggaccaagcacaagattgacaagagccatgaatttgccctggtggtggtgaatgatgacacagcctggctgagcggcctgaccagtgacccccgggagctgtgcagctgcctgtatgacctggagacagccagctgcagcaccttcaacatcagcggggccagccctgcccggcagcagaagacagagctgcctgtgacagaaaatgtgcagaccatccccccaccctacgtggtgaggaccatcctggtgtacagccggcccccctgccagccccagttcagcctgacagagcccatgaagaagatgttccagtgcccctacttcttctttgatgtggtgtacatccacaacggcacagaggagaaggaggaggagatgtcctggaaggacatgtttgccttcatgggcagcctggacaccaagggcaccagctacaagtatgaggtggccctggccggccctgccctggagctgcacaactgcatggccaagctgctggcccaccccctgcagaggccctgccagagccacgccagctacagcctgctggaggaggaggatgaggccatcgaggtggaggccaccgtgtag

SEQ ID NO: 107060 - DNA, 555 bp, Artificial Sequence
  derived and/or modified sequence
atgatgggcgccagcaccctgcaggagcccgccctgagccccggcaggtgtccccgccagcctctgaggtcaaaatttggccatcaaggctctaccgtccagaggaaatgctcgaagacaaatgccctcaacgtctcacaaaaaatgatagagatgtttgtcaggacaaaacacaagatcgataaaagtcatgagtttgcactcgtcgtagttaacgacgacactgcatggctcagcgggctgacttccgaccctcgggagttatgctcctgcctatacgatttggagactgcatcctgctccacattcaacatctcgggggccagcccggcacggcaacaaaagaccgagttgcctgttactgagaacgtgcagactatacctcctccatatgtggtcaggaccatcttagtctatagcaggccaccctgtcagccccaattcagtttgacagaacccatgaaaaaaatgtttcaatgtccctatttcttctttgatgtggtgtatattcataacggtacagaggagaaggaggaagaaatgtcctggaaatag

SEQ ID NO: 107061 - DNA, 990 bp, Artificial Sequence
  derived and/or modified sequence
atggaggtggccgagcccagcagccccaccgaggaggaggaggaggaggaggagcactccgcagaaccgcgcccccgtacacgatccaaccctgaaggggcggaagatcgcgccgtgggcgcccaagcttccgtaggtagtcggtctgaaggtgagggcgaagcagcctcggcagacgatgggtcgctcaataccagtggcgctggcccaaaaagttggcaggtgccacctccggccccagaagtccagatacgcactccccgcgtaaattgccctgagaaggtcatcatttgcttggacctaagcgaagagatgagccttccaaaactggagtctttcaacggctccaaaactaacgccctcaatgtttcccagaaaatgatcgagatgtttgtgcgtaccaagcacaagatcgacaaaagtcatgagtttgccttggttgtcgtcaacgacgatactgcatggctttctggcctcacatctgacccaagggaactgtgctcctgcttatatgatttagagacggctagttgcagcaccttcaatctggagggactgttctccttaatacagcagaagactgagctcccagtgacagaaaacgtccagaccattccgcccccttacgtggtacggacaattttggtctactcccgcccgccctgccaaccacagtttagcctgaccgaacccatgaaaaaaatgtttcagtgtccatactttttcttcgatgttgtctacattcataatggtacagaggaaaaggaggaggaaatgagttggaaggatatgttcgctttcatggggtcgctggacactaagggcacatcatacaaatatgaggttgcccttgctgggcctgctcttgaattgcacaactgtatggccaaattgctggcccaccctctgcaaagaccctgtcagtcacatgcctcgtatagcttacttgaggaagaggacgaggccatcgaggttgaagctactgtttag

SEQ ID NO: 107062 - DNA, 990 bp, Artificial Sequence
  derived and/or modified sequence
atggaggtggccgagcccagcagccccaccgaggaggaggaggaggaggaagagcatagcgccgaacctagaccccgtaccaggtctaatcctgagggtgcggaggatcgagccgtgggagcacaggcaagcgtgggctcccggtctgaaggggaaggagaagccgcctcggctgacgacggaagtctgaacaccagcggagccgggcctaaaagttggcaggttcctccgcccgcgccagaagtccagattagaacccctagggtgaactgtccggagaaagtcattatctgtcttgatctctccgaagagatgtctttgcccaagctggagtcctttaacggaagcaagacaaatgccttaaacgtctcccagaaaatgattgaaatgtttgtcaggaccaagcacaagatagacaagtcccatgagtttgcactggtggttgtcaacgacgatactgcttggctgtccggcctgacctccgatccaagagagctgtgcagctgtctgtacgacttggaaacagcatcttgctctacattcaacatcagcggagcaagtcctgcaaggcaacaaaaaaccgagttgcctgtgacagagaacgtgcaaacaattccccctccatatgtggttaggactatcctggtgtatagtagacccccctgccaaccccaattctcactcactgagccgatgaaaaagatgtttcagtgtccatacttcttttttgatgtggtgtacattcacaacggaacggaggagaaagaagaagagatgtcttggaaggatatgtttgcttttatgggttctctggatacaaagggaacctcctacaaatacgaggtggccctggccgggccagctctcgaactgcacaactgtatggccaagctgctcgctcatccgctgcaacggccctgccaaagccatgcctcttattcccttttggaggaggaggatgaggccatcgaagtggaggctacagtctag

SEQ ID NO: 107063 - DNA, 990 bp, Artificial Sequence
  derived and/or modified sequence
atggaggtggccgagcccagcagccccaccgaggaggaggaggaggaggaggaacacagcgccgagccgcgacctaggactcgatctaaccccgagggggccgaagatagggccgtgggggcgcaggcttctgtcggctcaagatcagagggggagggtgaggctgctagcgctgacgacggaagcctcaacacgagcggggcgggacccaaatcatggcaggtcccccctccagctcccgaggtgcaaattagaacgccacgagtgaactgtcctgagaaggtcatcatctgcctggacctaagcgaggagatgtctctgcccaagctcgaaagttttaatggctccaaaacaaatgccctgaatgtcagtcagaagatgatagagatgtttgtgcgtactaagcacaagatcgataagagccatgagttcgctctcgtggtcgtgaacgacgatactgcctggctgagtggccttacctcagacccacgcgagttatgctcttgcctctacgacctcgagacagcatcctgtagcactttcaacctcgaagggctgttttctctgatccagcaaaaaaccgaactccccgtgacggagaatgtccagaccatcccgccaccctacgttgttcgcaccattcttgtgtacagccgccctccttgtcagccgcagtttagtctgactgaacccatgaagaagatgttccaatgtccgtacttcttttttgacgtggtttatattcataacggcacagaggagaaggaagaggagatgtcctggaaggatatgtttgcgttcatgggatcacttgatacaaaaggtacatcatataagtacgaggttgccttagcaggtccagcccttgagctccataattgtatggccaagctgttagcgcacccccttcaaagaccatgtcagtcccatgccagttatagtttgcttgaggaggaggacgaggccatcgaagttgaggcgacagtatag

SEQ ID NO: 107064 - DNA, 555 bp, Artificial Sequence
  derived and/or modified sequence
atgatgggggcatccacccttcaggagccagctctgtcccctgggcgatgtcctagacagcccctgcgaagtaaattcgggcatcaagggtccacggtgcagcgcaaatgcagcaaaactaatgctctcaatgtaagccagaagatgatcgaaatgttcgtgaggacaaagcataagattgataagagccatgagttcgccctggttgtcgtgaacgacgatactgcatggctgtccgggctgacgagcgacccgcgtgaactatgcagttgcctctatgatctcgagacagcctcatgtagtacattcaatatttccggggcttctccagctagacagcagaagaccgagttaccagttaccgaaaatgttcagaccataccacccccttacgttgttcgtactatacttgtatacagcagacccccatgccagccacagttttctttgactgaaccgatgaaaaaaatgttccagtgcccctacttcttttttgatgtggtgtacatccataacgggactgaagagaaggaggaggaaatgtcgtggaaatag

SEQ ID NO: 107065 - DNA, 990 bp, Artificial Sequence
  derived and/or modified sequence
atggaagtggcggagcccagtagtccaacagaggaagaggaggaagaggaagagcattccgccgaacctaggcccaggacacgttcgaatcctgagggagccgaggatcgggctgtaggagcccaggcttctgtgggatcaaggagcgagggtgagggggaagccgctagcgcggatgatggctccctgaacacctcaggtgctggacccaagtcctggcaggtgccaccacccgcaccggaggtccagattcgtacacccagagtaaactgccccgagaaggtgatcatttgccttgacctctccgaggaaatgtccctgccaaaacttgaaagttttaatggaagtaaaactaatgcattaaacgtgtcccagaaaatgattgaaatgtttgtgcgcacaaagcacaaaatcgacaagtcgcatgagtttgcattagtcgtcgttaacgacgatacagcctggctaagtgggctgacgtccgatcctcgcgaactgtgcagctgtctgtatgaccttgagactgcctcatgtagcacgtttaacctggagggacttttttcccttatccagcagaagacagagcttcccgtcacagaaaacgtacagacaatccctcccccttatgtggtcaggaccatcctggtctactcacgacccccttgccagccacagttttctctgactgaacccatgaaaaaaatgttccaatgtccatatttcttttttgacgtggtgtatattcataacggaacggaagagaaggaagaagaaatgtcttggaaagatatgtttgcttttatgggatctctggacactaaggggacatcctataagtacgaagtggccctggccggacctgctctggaactgcacaattgcatggccaagctgctcgcccaccccctgcagagaccctgtcagtcacacgcttcatacagtcttctagaagaggaagacgaggccatagaagttgaagccacagtgtag

SEQ ID NO: 107066 - DNA, 990 bp, Artificial Sequence
  derived and/or modified sequence
atggaagtggctgagcccagctctccaaccgaggaggaagaggaggaagaggagcactcagctgagccgaggcctcggactaggtcaaatccagaaggagctgaagatagggctgttggggcacaggcctccgtgggaagccggtcagaaggcgaaggggaagccgcttccgctgatgacggtagcctcaatacctccggcgcaggcccaaagagctggcaggttccaccaccagcacctgaggtgcagatccggacacccagggtcaattgccctgaaaaggtgatcatttgtcttgatttgtccgaagagatgtccctgccaaaactggaaagctttaatggcagcaagaccaacgctctcaatgtttctcaaaagatgattgagatgtttgttagaacaaaacataagattgataaaagtcatgaatttgctctcgtcgttgtcaacgatgatacagcttggctcagtggcttgaccagcgatcctagggagctgtgttcatgtctgtacgatctagagacggcatcctgctcaacttttaacatttcaggggctagccctgctcgacaacagaagactgaattacccgtgactgaaaatgtgcagactattccccctccctacgtggtgcgcacaattctggtgtatagccggcctccctgtcagccccagttttcactaacagaaccgatgaagaaaatgtttcagtgcccctatttcttctttgacgtcgtgtacatccataatgggactgaggaaaaggaagaggaaatgtcatggaaagatatgtttgccttcatgggcagcttggacacgaaagggacatcatacaagtacgaggtggccctggcaggtccggcattggagttacataactgcatggcaaagcttttggctcaccccctgcagcgcccttgtcaaagtcacgccagctattccctgttggaagaagaggacgaggccatcgaggtggaagctacagtgtag

SEQ ID NO: 107067 - DNA, 990 bp, Artificial Sequence
  derived and/or modified sequence
atggaggtggcggagccatcttcgcctaccgaggaagaggaggaggaggaagagcattctgcggagcccaggcccagaaccaggtctaaccccgaaggtgcagaagatagagccgttggtgcccaggccagtgtaggctctcggagcgagggagagggcgaagccgcatccgccgacgatggctcactgaatacatctggggcagggccaaagagttggcaggtgccgcctccagccccagaagtgcaaatacgcactccgagggttaactgtccagagaaggttattatttgtctcgatctcagcgaagaaatgtccctgcctaagctagaatcatttaatggctctaagacaaatgctctaaatgtatcacagaaaatgattgagatgtttgttcgcaccaagcataagatagataagagccacgagtttgctctcgtcgtggtcaatgacgatacagcttggctaagcggtctgacgtctgaccctagagagctatgttcttgcctgtatgatctagagactgccagctgttccacctttaacctcgagggacttttcagcttaattcaacaaaagactgagttaccagtgacagagaatgtgcagacaatccccccaccctacgtggtccggactattttggtctattcacggcctccatgtcagcctcagttctcactgacggagcctatgaagaagatgtttcagtgcccatatttcttcttcgacgtcgtgtacattcataatgggaccgaagagaaggaagaggagatgtcctggaaggacatgtttgcattcatggggtcactcgacacaaaaggcacttcttataaatatgaagtcgcactcgccggtcccgcattggagttgcataactgcatggcgaagctgttggcccatccgcttcagcgaccatgccagtcccacgcctcttactctctactggaggaggaggatgaggcaatcgaggtggaagccacagtctag

SEQ ID NO: 107068 - DNA, 1375 bp, Artificial Sequence
  derived and/or modified sequence
gtacaacttccggctgtaaagatggcggcttcctagtgagtcggcggctgatttagaaggaggttcaggctacggtgagccgaagccacacaggagccatggaagtggcagagcccagcagccccactgaagaggaggaggaggaagaggagcactcggcagagcctcggccccgcactcgctccaatcctgaaggggctgaggaccgggcagtaggggcacaggccagcgtgggcagccgcagcgagggtgagggtgaggccgccagtgctgatgatgggagcctcaacacttcaggagccggccctaagtcctggcaggtgcccccgccagcccctgaggtccaaattcggacaccaagggtcaactgtccagagaaagtgattatctgcctggacctgtcagaggaaatgtcactgccaaagctggagtcgttcaacggctccaaaaccaacgccctcaatgtctcccagaagatgattgagatgttcgtgcggacaaaacacaagatcgacaaaagccacgagtttgcactggtggtggtgaacgatgacacggcctggctgtctggcctgacctccgacccccgcgagctctgtagctgcctctatgatctggagacggcctcctgttccaccttcaacatcagtggggcctcacctgcccgccagcagaaaactgagcttccggtcacagagaacgtgcagacgattcccccgccatatgtggtccgcaccatccttgtctacagccgtccaccttgccagccccagttctccttgacggagcccatgaagaaaatgttccagtgcccatatttcttctttgacgttgtttacatccacaatggcactgaggagaaggaggaggagatgagttggaaggatatgtttgccttcatgggcagcctggataccaagggtaccagctacaagtatgaggtggcactggctgggccagccctggagttgcacaactgcatggcgaaactgttggcccaccccctgcagcggccttgccagagccatgcttcctacagcctgctggaggaggaggatgaagccattgaggttgaggccactgtctgaaccatccctgtacatctgcaccttcttgtgcaaggaagtccttggcctaaagccttggttctcaaactgggttccttgggacctccggggtgggggggttccaggaggcacgtagggtaccttgcagggtcctaggagggaaacccaggattccaggagggatcccaggaactgtgggcacccattttctgtgtctcccagcccatttccactcctagtttgtcatggataatttttgttcttccctgtgtgatttttgccatcaaaataaaaatttgagactcgtt

SEQ ID NO: 107069 - DNA, 1470 bp, Artificial Sequence
  derived and/or modified sequence
tttccaagttctttctagcctcaaccagtttctgtctctgcttgttctgcagcccgctgaactacatttcccaggaggcgtcggggctgcgccgtacaacttccggctgtaaagatggcggcttcctagtgagtcggcggctgatttagaaggaggttcaggctacggtgagccgaagccacacaggagccatggaagtggcagagcccagcagccccactgaagaggaggaggaggaagaggagcactcggcagagcctcggccccgcactcgctccaatcctgaaggggctgaggaccgggcagtaggggcacaggccagcgtgggcagccgcagcgagggtgagggtgaggccgccagtgctgatgatgggagcctcaacacttcaggagccggccctaagtcctggcaggtgcccccgccagcccctgaggtccaaattcggacaccaagggtcaactgtccagagaaagtgattatctgcctggacctgtcagaggaaatgtcactgccaaagctggagtcgttcaacggctccaaaaccaacgccctcaatgtctcccagaagatgattgagatgttcgtgcggacaaaacacaagatcgacaaaagccacgagtttgcactggtggtggtgaacgatgacacggcctggctgtctggcctgacctccgacccccgcgagctctgtagctgcctctatgatctggagacggcctcctgttccaccttcaatctggaaggacttttcagcctcatccagcagaaaactgagcttccggtcacagagaacgtgcagacgattcccccgccatatgtggtccgcaccatccttgtctacagccgtccaccttgccagccccagttctccttgacggagcccatgaagaaaatgttccagtgcccatatttcttctttgacgttgtttacatccacaatggcactgaggagaaggaggaggagatgagttggaaggatatgtttgccttcatgggcagcctggataccaagggtaccagctacaagtatgaggtggcactggctgggccagccctggagttgcacaactgcatggcgaaactgttggcccaccccctgcagcggccttgccagagccatgcttcctacagcctgctggaggaggaggatgaagccattgaggttgaggccactgtctgaaccatccctgtacatctgcaccttcttgtgcaaggaagtccttggcctaaagccttggttctcaaactgggttccttgggacctccggggtgggggggttccaggaggcacgtagggtaccttgcagggtcctaggagggaaacccaggattccaggagggatcccaggaactgtgggcacccattttctgtgtctcccagcccatttccactcctagtttgtcatggataatttttgttcttccctgtgtgatttttgccatcaaaataaaaatttgagactcgttaa

SEQ ID NO: 107070 - DNA, 1316 bp, Artificial Sequence
  derived and/or modified sequence
gtacaacttccggctgtaaagatggcggcttcctagtgagtcggcggctgatttagaaggaggttcaggctacggtgagccgaagccacacaggagccatggaagtggcagagcccagcagccccactgaagaggaggaggaggaagaggagcactcggcagagcctcggccccgcactcgctccaatcctgaaggggctgaggaccgggcagtaggggcacaggccagcgtgggcagccgcagcgagggtgagggtgaggccgccagtgctgatgatgggagcctcaacacttcaggagccggccctaagtcctggcaggtgcccccgccagcccctgaggtccaaattcggacaccaagggtcaactgtccagagaaagtgctccaaaaccaacgccctcaatgtctcccagaagatgattgagatgttcgtgcggacaaaacacaagatcgacaaaagccacgagtttgcactggtggtggtgaacgatgacacggcctggctgtctggcctgacctccgacccccgcgagctctgtagctgcctctatgatctggagacggcctcctgttccaccttcaacatcagtggggcctcacctgcccgccagcagaaaactgagcttccggtcacagagaacgtgcagacgattcccccgccatatgtggtccgcaccatccttgtctacagccgtccaccttgccagccccagttctccttgacggagcccatgaagaaaatgttccagtgcccatatttcttctttgacgttgtttacatccacaatggcactgaggagaaggaggaggagatgagttggaaggatatgtttgccttcatgggcagcctggataccaagggtaccagctacaagtatgaggtggcactggctgggccagccctggagttgcacaactgcatggcgaaactgttggcccaccccctgcagcggccttgccagagccatgcttcctacagcctgctggaggaggaggatgaagccattgaggttgaggccactgtctgaaccatccctgtacatctgcaccttcttgtgcaaggaagtccttggcctaaagccttggttctcaaactgggttccttgggacctccggggtgggggggttccaggaggcacgtagggtaccttgcagggtcctaggagggaaacccaggattccaggagggatcccaggaactgtgggcacccattttctgtgtctcccagcccatttccactcctagtttgtcatggataatttttgttcttccctgtgtgatttttgccatcaaaataaaaatttgagactcgtt

SEQ ID NO: 107071 - DNA, 555 bp, Artificial Sequence
  derived and/or modified sequence
atgatgggcgccagcaccctgcaggagcccgccctgagccccggcagatgccccagacagcccctgagaagcaagttcggccaccagggcagcaccgtgcagagaaagtgcagcaagaccaacgccctgaacgtgagccagaagatgatcgagatgttcgtgagaaccaagcacaagatcgacaagagccacgagttcgccctggtggtggtgaacgacgacaccgcctggctgagcggcctgaccagcgaccccagagagctgtgcagctgcctgtacgacctggagaccgccagctgcagcaccttcaacatcagcggcgccagccccgccagacagcagaagaccgagctgcccgtgaccgagaacgtgcagaccatcccccccccctacgtggtgagaaccatcctggtgtacagcagacccccctgccagccccagttcagcctgaccgagcccatgaagaagatgttccagtgcccctacttcttcttcgacgtggtgtacatccacaacggcaccgaggagaaggaggaggagatgagctggaagtag

SEQ ID NO: 107072 - protein, 171 aa, Artificial Sequence
  derived and/or modified sequence
MEVAEPSSPTEEEEEEEEHSAEPRPRTRSNPEGAEDRAVGAQASVGSRSEGEGEAASADDGSLNTSGAGPKSWQVPPPAPEVQIRTPRVNCPEKVIICLDLSEEMSLPKLESFNGQQKTELPVTENVQTIPPPYVVRTILVYSRPPCQPQFSLTEPMKVGEAWEREGCLQP

SEQ ID NO: 107073 - DNA, 516 bp, Artificial Sequence
  derived and/or modified sequence
atggaggtggccgagcccagcagccccaccgaggaggaggaggaggaggaggagcacagcgccgagcccagacccagaaccagaagcaaccccgagggcgccgaggacagagccgtgggcgcccaggccagcgtgggcagcagaagcgagggcgagggcgaggccgccagcgccgacgacggcagcctgaacaccagcggcgccggccccaagagctggcaggtgcccccccccgcccccgaggtgcagatcagaacccccagagtgaactgccccgagaaggtgatcatctgcctggacctgagcgaggagatgagcctgcccaagctggagagcttcaacggccagcagaagaccgagctgcccgtgaccgagaacgtgcagaccatcccccccccctacgtggtgagaaccatcctggtgtacagcagacccccctgccagccccagttcagcctgaccgagcccatgaaggtgggcgaggcctgggagagagagggctgcctgcagccctag

SEQ ID NO: 107074 - DNA, 516 bp, Artificial Sequence
  derived and/or modified sequence
atggaggtcgctgagccatcttccccaaccgaagaggaggaggaggaggaggaacattcggccgagccacggccccgcacacgatcaaaccctgagggcgccgaagatcgcgccgttggcgcacaggcttcagtgggttcacggtcggagggagaaggcgaagctgcgagcgctgacgacggatctctgaacacgtccggtgccgggccgaagtcctggcaggtgcctccccctgcgcctgaggttcagatacgcaccccaagggtcaattgccccgaaaaggtgattatctgcctggacctgagcgaagagatgagtctgcctaaattagagtcattcaatggacagcagaagaccgaactgcctgtcacagaaaatgtgcagactatcccccctccatacgttgtgcggactattctggtgtattccagacccccttgccaaccccaattttcactaacagaacctatgaaagtcggcgaggcgtgggaaagggaaggctgcctgcagccctag

SEQ ID NO: 107075 - DNA, 516 bp, Artificial Sequence
  derived and/or modified sequence
atggaggtggccgagcccagcagccccacagaggaggaggaggaggaggaggagcacagcgctgagccccggcccaggaccaggagcaaccctgagggcgcagaagatagagctgtgggcgcccaggcctctgtgggcagccgctctgagggggagggggaggccgccagcgcagatgatggcagcctgaacaccagcggggccggccccaagtcctggcaggtgcccccaccagcccctgaggtgcagatccgcaccccccgggtgaactgcccagagaaggtgatcatctgcctggacctgtctgaggagatgagcctgcccaagctggagagcttcaacggccagcagaagacagagctgcctgtgacagaaaatgtgcagaccatccccccaccctacgtggtgaggaccatcctggtgtacagcaggcctccctgccagccccagttcagcctgacagagcccatgaaggtgggggaggcctgggagcgggagggctgcctgcagccctag

SEQ ID NO: 107076 - DNA, 516 bp, Artificial Sequence
  derived and/or modified sequence
atggaggtggccgagcccagcagccccaccgaggaggaggaggaggaggaagaacactcagcggagccacgacctcggacacggtctaatcccgagggagcagaggacagggctgtcggtgcccaagcctcggttggatccaggagtgaaggcgaaggcgaggctgcttctgccgacgatggttcactgaacaccagcggagctggccctaagagctggcaggtgccaccacctgctcccgaagtccaaattcggaccccgagggtgaattgtcccgagaaagtgattatttgcctcgacctatccgaggagatgtccctgcctaagctagagagcttcaacgggcagcagaaaaccgagctgccagtgactgaaaatgtacagacgattccaccaccatatgtggttaggactattttagtctattcccgtcctccttgccaaccacaattctctctcacagaacctatgaaggtcggagaggcatgggagagagaaggctgcctccagccttag

SEQ ID NO: 107077 - DNA, 516 bp, Artificial Sequence
  derived and/or modified sequence
atggaggtggcagagccatcatcacctacagaggaggaagaagaagaggaagaacactctgcggaacctcggccaaggacgcggtccaaccccgaaggggcagaagatcgggctgtgggtgcccaggcttccgtgggctcacgcagtgaaggcgagggtgaggccgcatctgcagatgacgggtcgttaaatacctccggcgctggacccaaatcatggcaggtgcccccaccagccccagaggtccagatccgtactcctcgggtcaattgccctgagaaagtcattatctgcctggacctctcagaggagatgagcttgcctaagttggagtctttcaacggccagcaaaaaaccgaactgcctgttaccgagaacgtccaaaccattccacccccttacgtggtccgaaccatcctcgtctacagtcgtccaccatgtcagcctcagttttcactaacagagcccatgaaagttggggaagcatgggagagggaaggctgtctccagccatag

SEQ ID NO: 107078 - DNA, 614 bp, Artificial Sequence
  derived and/or modified sequence
gtacaacttccggctgtaaagatggcggcttcctagtgagtcggcggctgatttagaaggaggttcaggctacggtgagccgaagccacacaggagccatggaagtggcagagcccagcagccccactgaagaggaggaggaggaagaggagcactcggcagagcctcggccccgcactcgctccaatcctgaaggggctgaggaccgggcagtaggggcacaggccagcgtgggcagccgcagcgagggtgagggtgaggccgccagtgctgatgatgggagcctcaacacttcaggagccggccctaagtcctggcaggtgcccccgccagcccctgaggtccaaattcggacaccaagggtcaactgtccagagaaagtgattatctgcctggacctgtcagaggaaatgtcactgccaaagctggagtcgttcaacggccagcagaaaactgagcttccggtcacagagaacgtgcagacgattcccccgccatatgtggtccgcaccatccttgtctacagccgtccaccttgccagccccagttctccttgacggagcccatgaaggtgggtgaggcctgggagagggaggggtgcctgcagccatga

SEQ ID NO: 107079 - protein, 655 aa, Artificial Sequence
  derived and/or modified sequence
MVLPVQHVSRGAAEAAPAAGVGPGLPGAGAPARPSPGRPPGAGRLRTGPGQVRGRLLAVGPKSRVFQSVVQEPPASESRAEPIVVRLKEVRLQRDDFEILKVIGRGAFSEVAVVKMKQTGQVYAMKIMNKWDMLKRGEVSCFREERDVLVNGDRRWITQLHFAFQDENYLYLVMEYYVGGDLLTLLSKFGERIPAEMARFYLAEIVMAIDSVHRLGYVHRDIKPDNILLDRCGHIRLADFGSCLKLRADGTVRSLVAVGTPDYLSPEILQAVGGGPGTGSYGPECDWWALGVFAYEMFYGQTPFYADSTAETYGKIVHYKEHLSLPLVDEGVPEEARDFIQRLLCPPETRLGRGGAGDFRTHPFFFGLDWDGLRDSVPPFTPDFEGATDTCNFDLVEDGLTAMVSGGGETLSDIREGAPLGVHLPFVGYSYSCMALRDSEVPGPTPMELEAEQLLEPHVQAPSLEPSVSPQDETAEVAVPAAVPAAEAEAEVTLRELQEALEEEVLTRQSLSREMEAIRTDNQNFASQLREAEARNRDLEAHVRQLQERMELLQAEGATAVTGVPSPRATDPPSHLDGPPAVAVGQCPLVGPGPMHRRHLLLPARVPRPGLSEALSLLLFAVVLSRAAALGCIGLVAHAGQLTAVWRRPGAARAP

SEQ ID NO: 107080 - DNA, 1968 bp, Artificial Sequence
  derived and/or modified sequence
atggtgctgcccgtgcaacacgtaagcaggggagccgccgaggctgccccagcagctggagttgggccaggcctgcctggagccggcgcaccggctaggcccagtcctggccggccgccaggggccggccgcctacggacaggaccaggccaggtacgaggtcggctcctcgcggtaggacccaagagccgtgtcttccaatctgttgtgcaggaacccccggccagcgagtcaagggctgagcccatagtggtacgcttgaaggaagtgaggttgcagcgcgacgacttcgagattctgaaggtgatcggtcgcggggccttttccgaggttgccgtcgtcaaaatgaagcaaacagggcaggtttatgccatgaaaattatgaacaaatgggacatgttaaagaggggggaggtgtcctgctttcgcgaagagcgggacgttctcgtcaatggagaccgtaggtggataacccagctccacttcgcattccaggacgagaactatctctacctggttatggaatattacgtggggggcgatctcctcaccctgcttagcaagttcggggaacggatcccagcagaaatggcacggttttacctggcagagatcgtgatggctatcgactcggtgcaccgactggggtacgttcatcgggatattaaacccgataatatccttttagataggtgcgggcatataaggctggcggatttcggtagttgcctcaagctgcgggcggacggcacggtgcgctctctagttgccgtgggcacacccgactatctaagccccgaaatcctacaagctgtgggagggggtcctggcaccggaagctacggccccgaatgcgactggtgggcccttggtgtatttgcctacgaaatgttctacggccagacacccttctatgccgatagcactgctgagacctatggaaagattgtgcactataaggagcatctcagccttccattggtagacgagggtgtcccagaggaggccagggacttcattcagcggttgttgtgcccaccagaaacgcgccttgggcgcggcggcgccggtgacttcaggacacaccctttctttttcggtcttgattgggatggactgcgtgacagtgtaccacctttcacaccagattttgagggtgctacagatacatgcaactttgatctggttgaggatgggctgacagctatggtcagtggcgggggcgagaccctgagtgacatcagagaaggagccccccttggggtgcatttaccctttgtaggctactcatatagctgtatggctctgcgggattctgaagtgccggggccaacacctatggagttggaggctgagcaactgctggagcctcacgtgcaagccccctctctggaaccctccgtgtccccacaggatgaaacagcggaggttgcagtaccagccgcagtgccggctgcggaggcagaggccgaggttaccttgagggagctgcaggaagcgttggaagaggaagtgcttactagacagtctctgtctcgagagatggaggccattagaaccgacaaccagaattttgcaagtcagttacgagaagctgaggcccgaaaccgagacctggaagcgcatgttagacagctgcaagagcggatggaactactgcaggccgaaggcgcaactgccgtaaccggtgtgccatccccgcgggctacagatcctccatcacatctcgacgggcctcccgcagtagcagtgggccagtgcccacttgttggacccgggccaatgcaccggagacatcttttgttgcccgcacgagttccaaggcccggtctcagcgaagcattgagcctgttgctgttcgcggttgtgctgtcccgggcggccgcgctgggctgcattgggctcgtcgcacacgccgggcagctcactgccgtatggcgtcgtccaggtgccgcccgcgccccttag

SEQ ID NO: 107081 - DNA, 1968 bp, Artificial Sequence
  derived and/or modified sequence
atggtgctgcctgtgcagcacgtgtccagaggagctgctgaggccgccccagctgctggggtgggccctggcctgcccggggccggggccccagcccggcccagccctggccggcccccaggggccggccgcctgaggactggacctggccaggtgcggggccgcctgctggccgtgggccccaagagcagggtcttccagagcgtggtgcaggagcccccagccagcgagagcagagctgagcccatcgtggtgcggctgaaggaggtgcggctgcagagagatgactttgagatcctgaaggtgattggccgcggggccttcagcgaggtggccgtggtgaagatgaagcagacaggccaggtgtatgccatgaagatcatgaacaagtgggacatgctgaagagaggagaggtgtcctgcttccgggaggagagagatgtgctggtgaatggagaccggcgctggatcacccagctgcactttgccttccaggatgagaactacctgtacctggtgatggagtactacgtgggcggggacctgctgaccctgctgagcaagtttggagagcgcatcccagctgagatggcccgcttctacctggccgagatcgtgatggccattgattctgtgcaccggctgggctacgtgcaccgggacatcaagccagacaacatcctgctggacagatgtggccacatccggctggccgactttggcagctgcctgaagctgcgggcagatggcaccgtgcgcagcctggtggccgtgggcaccccagactacctgagccctgagatcctgcaggccgtgggcggcggccctggcaccggcagctatggcccagaatgtgactggtgggccctgggcgtgtttgcctatgagatgttttatggccagacccccttctacgccgacagcacagctgagacctacggcaagatcgtgcactacaaggagcacctgagcctgcccctggtggatgaaggagtgcctgaggaggcccgggacttcatccagaggctgctgtgccccccagagacccggctgggccggggcggggccggggacttccgcacccaccccttcttcttcggcctggactgggatggcctgcgggacagcgtgccccccttcaccccagactttgagggcgccacagacacctgcaactttgacctggtggaggatggcctgacagccatggtgtctgggggcggggagaccctgagtgacatccgggagggcgcccccctgggcgtgcacctgccctttgtgggctacagctacagctgcatggccctgcgggacagcgaggtgcccggccccacccccatggagctggaggccgagcagctgctggagccccacgtgcaggcccccagcctggagcccagcgtgagcccccaggatgaaacagctgaggtggccgtgcctgctgctgtgcctgctgctgaggccgaggccgaggtgaccctgcgggagctgcaggaggccctggaggaggaggtgctgacccggcagagcctgagccgggagatggaggccatcagaacagacaaccagaactttgccagccagctgcgggaggccgaggccaggaacagagacctggaggcccacgtgcggcagctgcaggagaggatggagctgctgcaggccgagggcgccacagctgtgactggagtgcccagcccccgggccacagacccccccagccacctggatggccccccagctgtggccgtgggccagtgccccctggtgggccctggccccatgcacagaagacacctgctgctgcctgcccgggtgcccaggcctggcctgtctgaggccctgagcctgctgctgtttgctgtggtgctgagcagagctgctgccctgggctgcatcggcctggtggcccatgctggccagctgacagctgtgtggaggaggcctggagctgcccgggccccctag

SEQ ID NO: 107082 - DNA, 1968 bp, Artificial Sequence
  derived and/or modified sequence
atggtgctgcccgtgcagcacgtgagccggggcgccgccgaggccgcccctgcggccggtgttggtcctggactgcctggagctggtgcccctgcccgaccctcccctggacgccctcctggagccggtcgccttagaacaggtccggggcaggtgcgcggtcggcttctcgcagtcggccccaaatcaagagtgtttcaaagtgtggtacaagagccacctgccagcgaatcaagagccgagcccatcgtagtccggctgaaggaagtcaggctgcagcgggacgatttcgagattttgaaagtgatcggaagaggtgcatttagcgaggtggccgtggtaaaaatgaaacagacagggcaagtatacgctatgaaaatcatgaataagtgggatatgttgaaacgcggcgaagtgtcatgttttcgcgaagaaagggacgtccttgttaatggagataggcggtggatcacccaactccactttgcctttcaggacgagaattacctgtatctggtcatggagtactatgtgggcggtgacctcctcaccctgctaagcaaattcggcgagagaatacccgcggaaatggcccgcttctatctcgccgagattgtcatggccatcgattccgtgcataggttggggtacgttcaccgggatattaaaccagacaatattctgctcgaccgctgtgggcatattcggctggcagacttcggctcttgtctgaagttgagagccgacggcaccgtgcgttcactggtggccgtgggaacgccagattatttgtctccagagatattacaggccgtcggcggcggcccaggcactggctcctacggccctgagtgcgactggtgggcattgggggtgttcgcctatgaaatgttttatggccagacgccattttacgctgattccaccgccgaaacctacgggaaaatcgtgcactataaagaacatcttagcttaccactggtggacgagggagtccccgaagaggctcgcgatttcatccagcgcctcctgtgcccccctgaaactcgtctcggacgtggaggcgccggtgactttcgaacacacccctttttttttgggttagattgggacgggttacgggattctgtgccaccattcactccagatttcgaaggagctaccgacacttgcaatttcgatctggtggaggacgggctcaccgcaatggtgagcggcgggggtgagaccctatcagatatccgggagggtgcccctctgggagtccaccttccctttgttggctatagctacagttgcatggccctgcgcgactctgaggttccgggtcctactcccatggaactggaggcagaacagctgctggagccgcatgtgcaggcaccttccctggagccctccgtttcaccgcaggatgaaacagccgaggtggcagtccccgcggctgtgccggcagcagaggctgaggcagaggtaacactgcgtgagctccaagaagccctcgaagaggaggtcctgacgaggcagagcttaagtagagaaatggaggctatacggacggataatcaaaattttgcatcgcaactgcgcgaggcggaggcaagaaatagggatctggaggcacatgtgaggcagttacaggagcgaatggaactgctgcaggctgagggcgcaacggcagtgacgggggtccctagtccccgggcaactgaccccccgtcacaccttgatggtccccccgccgtcgctgtggggcagtgtcccctggtcggtcctgggcctatgcaccgccgacatctattactacccgctagagtccctaggcccggactgtccgaagcactgagcctgcttttattcgcggtagtcctgtctcgcgctgccgctctgggctgtataggtctggtggcccacgcagggcagctcaccgcagtgtggcggcgaccaggggccgcccgagccccttag

SEQ ID NO: 107083 - DNA, 1968 bp, Artificial Sequence
  derived and/or modified sequence
atggtcttgcctgtgcagcacgtgtcgcgcggtgccgctgaggccgctccagccgctggcgtgggtccaggcctccctggtgcaggcgcacctgcccgaccctccccaggcagacctcccggtgctgggcgactgcgaacaggacctggtcaggtgcggggacgcttgttggctgttggccctaaatcccgggtctttcagagcgttgtgcaggaaccacctgcctctgaaagccgagcggagcccattgtggtccgactgaaggaagtccgcctccagagagacgattttgaaatcctgaaggtcatagggcgaggagccttctcagaggtggccgtggttaagatgaaacagacaggccaggtatacgctatgaagatcatgaacaagtgggacatgctaaagaggggcgaggtgagttgcttccgggaagaacgagacgtacttgtgaacggcgataggaggtggattacacagctccattttgctttccaagacgagaactatttgtaccttgtcatggaatattacgtaggcggagatttgctgaccttgctgtcaaagtttggagagagaatccctgccgagatggctcgcttttacttggccgagatcgtgatggctatcgattccgttcacagactggggtacgtgcatcgcgatataaaacctgacaacatcttgctggacaggtgtggacacatcagattagctgattttggctcttgcttgaagttaagggccgacgggaccgtgcgtagcttggtggccgttggcacacccgactacctgtcccccgagatcctacaggccgtcgggggaggaccaggcacgggctcttatggtcctgaatgcgactggtgggcccttggcgtcttcgcctacgaaatgttctatgggcagacacccttttatgcagactcgacggcggaaacctacggcaagattgtccattacaaggaacatttaagcttgcctctggtggacgaaggcgtgccagaagaagcccgagattttatccaacggctcctctgtccccctgagacacgcctaggacgaggaggcgcaggagattttaggacgcacccattctttttcggcttggactgggatggcctgcgggacagtgtaccgcctttcactcctgattttgagggcgcaaccgacacctgtaattttgatctagtggaagacggactgacagcaatggtttctgggggtggtgaaaccctgtcagatattcgcgaaggtgcccctctaggggttcaccttccttttgtcgggtattcctacagctgtatggcgctgagggattctgaagtgcccggtcccacccctatggaactcgaggctgagcaattgcttgagccgcatgtgcaggctccttcactcgagcccagtgtttctccccaggatgagacagccgaagtggctgttcccgctgctgtgccggcagctgaagctgaagccgaagttacactgcgagaactgcaagaggccctcgaagaggaagtgctgacgcgccagtctctctcccgggaaatggaggccattagaacggacaatcagaactttgccagccagctgcgcgaagcggaggccaggaacagagatctggaggcacatgttaggcagctccaggaacgaatggagctattgcaagccgaaggggctaccgccgtgaccggagtccccagtcccagagcaacagatccgccaagccaccttgacgggccaccagcagtggcagttgggcaatgcccactcgtgggcccagggcctatgcataggcgccatttgctgctcccggctagggtgccaaggccagggttatcagaagctctgtcactgcttctctttgctgtcgtgctctcccgggcagccgcacttggctgtatcggattggtcgcgcacgctggacagctcactgctgtgtggagaaggcctggggcagctcgggctccctag

SEQ ID NO: 107084 - DNA, 1968 bp, Artificial Sequence
  derived and/or modified sequence
atggtgctgcccgtgcagcacgtgagcagaggcgccgccgaggccgcccccgccgccggcgtgggccccggcctgcccggcgccggcgcccccgccagacccagccccggcagaccccccggcgccggcagactgagaaccggccccggccaggtgagaggcagactgctggccgtgggccccaagagcagagtgttccagagcgtggtgcaggagccccccgccagcgagagcagagccgagcccatcgtggtgagactgaaggaggtgagactgcagagagacgacttcgagatcctgaaggtgatcggcagaggcgccttcagcgaggtggccgtggtgaagatgaagcagaccggccaggtgtacgccatgaagatcatgaacaagtgggacatgctgaagagaggcgaggtgagctgcttcagagaggagagagacgtgctggtgaacggcgacagaagatggatcacccagctgcacttcgccttccaggacgagaactacctgtacctggtgatggagtactacgtgggcggcgacctgctgaccctgctgagcaagttcggcgagagaatccccgccgagatggccagattctacctggccgagatcgtgatggccatcgacagcgtgcacagactgggctacgtgcacagagacatcaagcccgacaacatcctgctggacagatgcggccacatcagactggccgacttcggcagctgcctgaagctgagagccgacggcaccgtgagaagcctggtggccgtgggcacccccgactacctgagccccgagatcctgcaggccgtgggcggcggccccggcaccggcagctacggccccgagtgcgactggtgggccctgggcgtgttcgcctacgagatgttctacggccagacccccttctacgccgacagcaccgccgagacctacggcaagatcgtgcactacaaggagcacctgagcctgcccctggtggacgagggcgtgcccgaggaggccagagacttcatccagagactgctgtgcccccccgagaccagactgggcagaggcggcgccggcgacttcagaacccaccccttcttcttcggcctggactgggacggcctgagagacagcgtgccccccttcacccccgacttcgagggcgccaccgacacctgcaacttcgacctggtggaggacggcctgaccgccatggtgagcggcggcggcgagaccctgagcgacatcagagagggcgcccccctgggcgtgcacctgcccttcgtgggctacagctacagctgcatggccctgagagacagcgaggtgcccggccccacccccatggagctggaggccgagcagctgctggagccccacgtgcaggcccccagcctggagcccagcgtgagcccccaggacgagaccgccgaggtggccgtgcccgccgccgtgcccgccgccgaggccgaggccgaggtgaccctgagagagctgcaggaggccctggaggaggaggtgctgaccagacagagcctgagcagagagatggaggccatcagaaccgacaaccagaacttcgccagccagctgagagaggccgaggccagaaacagagacctggaggcccacgtgagacagctgcaggagagaatggagctgctgcaggccgagggcgccaccgccgtgaccggcgtgcccagccccagagccaccgacccccccagccacctggacggcccccccgccgtggccgtgggccagtgccccctggtgggccccggccccatgcacagaagacacctgctgctgcccgccagagtgcccagacccggcctgagcgaggccctgagcctgctgctgttcgccgtggtgctgagcagagccgccgccctgggctgcatcggcctggtggcccacgccggccagctgaccgccgtgtggagaagacccggcgccgccagagccccctag

SEQ ID NO: 107085 - DNA, 2872 bp, Artificial Sequence
  derived and/or modified sequence
ggctggaccaaggggtggggagaaggggaggaggcctcggccggccgcagagagaagtggccagagaggcccaggggacagccagggacaggcagacatgcagccagggctccagggcctggacaggggctgccaggccctgtgacaggaggaccccgagcccccggcccggggaggggccatggtgctgcctgtccaacatgtcagccgaggtgcggctgaggcggctccagcagctggtgttggacccgggcttcctggggctggagcccctgctcgaccttctcctgggcgtccaccaggagctgggcgcctccgaactggcccaggacaagtacgtggccgacttcttgcagtgggccccaaatccagggttttccaaagtgtggttcaagaaccacctgcatctgaatctagagcggagcccatcgtggtgaggcttaaggaggtccgactgcagagggacgacttcgagattctgaaggtgatcggacgcggggcgttcagcgaggtagcggtagtgaagatgaagcagacgggccaggtgtatgccatgaagatcatgaacaagtgggacatgctgaagaggggcgaggtgtcgtgcttccgtgaggagagggacgtgttggtgaatggggaccggcggtggatcacgcagctgcacttcgccttccaggatgagaactacctgtacctggtcatggagtattacgtgggcggggacctgctgacactgctgagcaagtttggggagcggattccggccgagatggcgcgcttctacctggcggagattgtcatggccatagactcggtgcaccggcttggctacgtgcacagggacatcaaacccgacaacatcctgctggaccgctgtggccacatccgcctggccgacttcggctcttgcctcaagctgcgggcagatggaacggtgcggtcgctggtggctgtgggcaccccagactacctgtcccccgagatcctgcaggctgtgggcggtgggcctgggacaggcagctacgggcccgagtgtgactggtgggcgctgggtgtattcgcctatgaaatgttctatgggcagacgcccttctacgcggattccacggcggagacctatggcaagatcgtccactacaaggagcacctctctctgccgctggtggacgaaggggtccctgaggaggctcgagacttcattcagcggttgctgtgtcccccggagacacggctgggccggggtggagcaggcgacttccggacacatcccttcttctttggcctcgactgggatggtctccgggacagcgtgcccccctttacaccggatttcgaaggtgccaccgacacatgcaacttcgacttggtggaggacgggctcactgccatggtgagcgggggcggggagacactgtcggacattcgggaaggtgcgccgctaggggtccacctgccttttgtgggctactcctactcctgcatggccctcagggacagtgaggtcccaggccccacacccatggaactggaggccgagcagctgcttgagccacacgtgcaagcgcccagcctggagccctcggtgtccccacaggatgaaacagctgaagtggcagttccagcggctgtccctgcggcagaggctgaggccgaggtgacgctgcgggagctccaggaagccctggaggaggaggtgctcacccggcagagcctgagccgggagatggaggccatccgcacggacaaccagaacttcgccagtcaactacgcgaggcagaggctcggaaccgggacctagaggcacacgtccggcagttgcaggagcggatggagttgctgcaggcagagggagccacagctgtcacgggggtccccagtccccgggccacggatccaccttcccatctagatggccccccggccgtggctgtgggccagtgcccgctggtggggccaggccccatgcaccgccgccacctgctgctccctgccagggtccctaggcctggcctatcggaggcgctttccctgctcctgttcgccgttgttctgtctcgtgccgccgccctgggctgcattgggttggtggcccacgccggccaactcaccgcagtctggcgccgcccaggagccgcccgcgctccctgaaccctagaactgtcttcgactccggggccccgttggaagactgagtgcccggggcacggcacagaagccgcgcccaccgcctgccagttcacaaccgctccgagcgtgggtctccgcccagctccagtcctgtgatccgggcccgccccctagcggccggggagggaggggccgggtccgcggccggcgaacggggctcgaagggtccttgtagccgggaatgctgctgctgctgctggggggatcacagaccatttctttctttcggccaggctgaggccctgacgtggatgggcaaactgcaggcctgggaaggcagcaagccgggccgtccgtgttccatcctccacgcacccccacctatcgttggttcgcaaagtgcaaagctttcttgtgcatgacgccctgctctggggagcgtctggcgcgatctctgcctgcttactcgggaaatttgcttttgccaaacccgctttttcggggatcccgcgcccccctcctcacttgcgctgctctcggagccccagccggctccgcccgcttcggcggtttggatatttattgacctcgtcctccgactcgctgacaggctacaggacccccaacaaccccaatccacgttttggatgcactgagaccccgacattcctcggtatttattgtctgtccccacctaggacccccacccccgaccctcgcgaataaaaggccctccatctgccc

SEQ ID NO: 107086 - DNA, 599 bp, Artificial Sequence
  derived and/or modified sequence
aggccccacacccatggaactggaggccgagcagctgcttgagccacacgtgcaagcgcccagcctggagccctcggtgtccccacaggatgaaacagctgaagtggcagttccagcggctgtccctgcggcagaggctgaggccgaggtgacgctgcgggagctccaggaagccctggaggaggaggtgctcacccggcagagcctgagccgggagatggaggccatccgcacggacaaccagaacttcgccagtcaactacgcgaggcagaggctcggaaccgggacctagaggcacacgtccggcagttgcaggagcggatggagttgctgcaggcagagggagccacagctagatggccccccggccgtggctgtgggccagtgcccgctggtggggccaggccccatgcaccgccgccacctgctgctccctgccagggtccctaggcctggcctatcggaggcgctttccctgctcctgttcgccgttgttctgtctcgtgccgccgccctgggctgcattgggttggtggcccacgccggccaactcaccgcagtctggcgccgcccaggagccgcccgcgctccctgaacc

SEQ ID NO: 107087 - protein, 530 aa, Artificial Sequence
  derived and/or modified sequence
MSAEVRLRRLQQLVLDPGFLGLEPLLDLLLGVHQELGASELAQDKYVADFLQWAEPIVVRLKEVRLQRDDFEILKVIGRGAFSEVAVVKMKQTGQVYAMKIMNKWDMLKRGEVSCFREERDVLVNGDRRWITQLHFAFQDENYLYLVMEYYVGGDLLTLLSKFGERIPAEMARFYLAEIVMAIDSVHRLGYVHRDIKPDNILLDRCGHIRLADFGSCLKLRADGTVRSLVAVGTPDYLSPEILQAVGGGPGTGSYGPECDWWALGVFAYEMFYGQTPFYADSTAETYGKIVHYKEHLSLPLVDEGVPEEARDFIQRLLCPPETRLGRGGAGDFRTHPFFFGLDWDGLRDSVPPFTPDFEGATDTCNFDLVEDGLTAMETLSDIREGAPLGVHLPFVGYSYSCMALRDSEVPGPTPMELEAEQLLEPHVQAPSLEPSVSPQDETAEVAVPAAVPAAEAEAEVTLRELQEALEEEVLTRQSLSREMEAIRTDNQNFASQLREAEARNRDLEAHVRQLQERMELLQAEGATGP

SEQ ID NO: 107088 - DNA, 1593 bp, Artificial Sequence
  derived and/or modified sequence
atgagtgcagaagtgaggttaaggagacttcagcagctcgttcttgaccccgggttcctgggcctggaacctttgttggacctgctgctgggagtacatcaggagcttggggctagtgagttggcacaggacaagtatgtagccgattttttacaatgggctgaacctattgtggtgaggttgaaagaggtacgccttcaacgcgatgacttcgagatattgaaggtgatcggcaggggggcgttcagcgaggtggccgtcgtgaagatgaagcagacgggccaggtatatgccatgaagatcatgaacaagtgggatatgctgaaaaggggagaggtgtcctgctttcgggaagaacgcgacgtcctggtgaacggcgacaggagatggattacccagctgcattttgcgttccaggacgaaaattacttgtatttggttatggaatattatgtgggaggggacctactcacactgctgtcaaaattcggcgagcggattcccgcggagatggcaaggttctacctagccgagatagtgatggctatcgattccgtccacagactgggctacgtgcatcgcgacataaaaccagataatatattgctggatcggtgcgggcacatcagattggcggacttcggctcttgtctgaagctgcgcgccgacggcacagtgcgcagtctcgttgccgtgggcacgcccgactacctatcaccggagattctgcaggccgtaggggggggccctggtaccggtagctacgggcccgagtgcgactggtgggccctcggggtgttcgcatacgaaatgttttatgggcagactcccttctatgctgactctacagccgagacatatggcaaaatcgtacactacaaggagcacttgagcctgccccttgtcgacgaaggagtgccagaggaagctcgagactttatacagagattgctttgcccacctgagacacgccttgggcggggcggggccggtgactttagaacccacccgttcttcttcggccttgactgggacggcctgcgcgattccgtgcccccgtttaccccagattttgaaggagcgacagatacctgtaacttcgatttggtagaggatggtctcacggccatggaaactctgtcggacataagagaaggcgcccccctgggcgtacaccttccattcgtgggctatagctatagctgcatggctctgcgggactcagaggtacctggacctacacccatggaactcgaggccgaacagcttttggaaccccatgtgcaggcaccaagcctagaaccatctgtgtcaccacaggatgagacagccgaggtcgcggtccccgccgctgttcctgctgcggaggctgaagctgaggtgactcttcgcgaactccaggaggcgcttgaagaggaagtcctcacccggcagtctttatctcgggagatggaggcaatcaggacggataatcaaaattttgcttcccagctccgggaggcagaagctcgcaaccgcgatcttgaggcacacgtgaggcaacttcaagaacgtatggaactactgcaggcggagggagccaccggtccttag

SEQ ID NO: 107089 - DNA, 1593 bp, Artificial Sequence
  derived and/or modified sequence
atgtctgctgaggtgcggctgcggcggctgcagcagctggtgctggaccccggcttcctgggcctggagcccctgctggacctgctgctgggcgtgcaccaggagctgggcgccagcgagctggcccaggacaagtatgtggccgacttcctgcagtgggccgagcccatcgtggtgcggctgaaggaggtgcggctgcagagagatgactttgagatcctgaaggtgattggccgcggggccttcagcgaggtggccgtggtgaagatgaagcagacaggccaggtgtatgccatgaagatcatgaacaagtgggacatgctgaagagaggagaggtgtcctgcttccgggaggagagagatgtgctggtgaatggagaccggcgctggatcacccagctgcactttgccttccaggatgagaactacctgtacctggtgatggagtactacgtgggcggggacctgctgaccctgctgagcaagtttggagagcgcatcccagctgagatggcccgcttctacctggccgagatcgtgatggccattgattctgtgcaccggctgggctacgtgcaccgggacatcaagccagacaacatcctgctggacagatgtggccacatccggctggccgactttggcagctgcctgaagctgcgggcagatggcaccgtgcgcagcctggtggccgtgggcaccccagactacctgagccctgagatcctgcaggccgtgggcggcggccctggcaccggcagctatggcccagaatgtgactggtgggccctgggcgtgtttgcctatgagatgttttatggccagacccccttctacgccgacagcacagctgagacctacggcaagatcgtgcactacaaggagcacctgagcctgcccctggtggatgaaggagtgcctgaggaggcccgggacttcatccagaggctgctgtgccccccagagacccggctgggccggggcggggccggggacttccgcacccaccccttcttcttcggcctggactgggatggcctgcgggacagcgtgccccccttcaccccagactttgagggcgccacagacacctgcaactttgacctggtggaggatggcctgacagccatggagaccctgagtgacatccgggagggcgcccccctgggcgtgcacctgccctttgtgggctacagctacagctgcatggccctgcgggacagcgaggtgcccggccccacccccatggagctggaggccgagcagctgctggagccccacgtgcaggcccccagcctggagcccagcgtgagcccccaggatgaaacagctgaggtggccgtgcctgctgctgtgcctgctgctgaggccgaggccgaggtgaccctgcgggagctgcaggaggccctggaggaggaggtgctgacccggcagagcctgagccgggagatggaggccatcagaacagacaaccagaactttgccagccagctgcgggaggccgaggccaggaacagagacctggaggcccacgtgcggcagctgcaggagaggatggagctgctgcaggccgagggcgccaccggcccctag

SEQ ID NO: 107090 - DNA, 1593 bp, Artificial Sequence
  derived and/or modified sequence
atgagcgccgaggtgcggctgcggcggctgcagcagctggtgctggacccaggcttccttgggttggaacccctcctggacctcttgctcggggtgcaccaggagttgggggctagtgaactcgcacaagataagtacgttgctgatttcctgcagtgggcagagcctatcgtggtcagactcaaggaggtgcggctgcaaagagatgatttcgagatcctgaaggtgatcggacgtggggcttttagtgaggtggccgtggtaaaaatgaagcaaaccgggcaagtctacgccatgaagattatgaataaatgggacatgctgaagcggggggaggtgagttgctttcgggaagagcgagacgtcttggtgaacggggacaggcggtggatcacccagctgcactttgcctttcaggacgaaaattatctgtacttggtgatggagtactacgtggggggagacctgttgaccctactgtcaaaattcggggagaggatcccggccgaaatggcccgcttctatttggcggaaatcgtgatggccatcgattctgtccatcgcttaggctacgtgcaccgagacatcaagcccgacaacatcttgctggataggtgcggacacatccggcttgcagactttgggagttgtctgaaacttcgagcggacggcaccgtgcgatccctggtggcagttggcacccctgactatctctccccggagattttacaagctgtcggcggtgggcctggaacaggcagttatggtcctgagtgtgactggtgggcactgggcgtgtttgcatatgaaatgttttatggccagacccccttttacgccgatagtacggcggagacctacggcaagattgtgcactacaaagaacacctgtctcttcccttagttgacgagggggtcccagaagaagctcgcgactttattcagaggttactctgccccccagaaacacggttgggcaggggaggagccggcgacttcaggacccatccattcttctttgggttggactgggacggtcttagggattccgtcccaccttttactcccgactttgagggtgctaccgatacatgcaattttgatctcgtggaggatggactgaccgcaatggagaccctgagtgacatcagggaaggggcgccactgggcgtgcatttaccattcgttggatacagttattcttgtatggcgctgagagattcggaggtccctgggccgactcctatggagctggaagctgagcagttgctggagccccatgtccaggctccctcccttgaaccaagcgtgtccccacaggacgaaacagcagaagtggccgtgccagcagcagtgcccgcagccgaggcggaagcggaggtcacactaagggaactgcaggaggctttggaagaagaagttctaaccagacagtccctatctagagaaatggaagcgattagaaccgataaccagaatttcgcatctcagctacgagaggcggaagccagaaaccgggatctggaagcccatgttcgccagttacaagaacgcatggaattactgcaggcggaaggggcaacaggcccttag

SEQ ID NO: 107091 - DNA, 1593 bp, Artificial Sequence
  derived and/or modified sequence
atgtctgcggaggtgcgcctgcggagattacagcagcttgtcctcgatcctggatttctaggactagaaccacttttggatctcctgttgggcgttcaccaggagctcggtgccagcgagcttgctcaagacaaatacgtggctgacttcctgcagtgggccgaaccaatagttgtacgcctgaaagaagttagattgcaacgggacgatttcgagatactgaaggtgattggtcgaggagcattctctgaggttgccgtagtgaagatgaaacagactggtcaggtatatgccatgaagattatgaacaagtgggacatgctcaagcgcggtgaagtttcttgcttcagagaggaaagggatgttttagtgaatggagaccggcgatggatcacccagctgcatttcgccttccaggatgaaaactacctgtatttggtaatggaatattacgtgggaggagatctgctaactctgctcagtaagttcggcgagcgcattccggctgaaatggcaaggttctacctagctgagatagtgatggcaattgattctgtgcatagactcgggtacgtccacagagacataaaacccgataacattctcctcgatcggtgcggacatattcgattagcggactttggctcctgcctcaaactgagagcagacggaacggttcgctctctcgttgccgttgggacccccgattacctgtctcccgagattctccaggcggtggggggaggtcccggaacaggaagctatggccctgagtgtgactggtgggccttgggggtcttcgcttacgagatgttctatgggcagaccccattctacgccgattcaacagccgaaacctacgggaaaattgtgcactacaaggaacaccttagtttacctcttgtggatgagggcgtgcccgaggaggcaagagacttcattcaacggctgctgtgtccgccagaaactcggctcggacggggtggagcaggagacttccggacacacccattcttctttgggctggactgggacgggctgcgcgatagtgtgcctcctttcaccccggatttcgaaggcgcaacagacacttgcaacttcgatctggttgaggatggcctgaccgccatggaaactctgagcgacatacgggagggggctcctttgggcgtgcatctccctttcgtcggctattcctactcttgtatggcgcttcgcgatagtgaagtgcctgggcctactcctatggaactcgaagccgagcagttgctcgaaccgcacgtccaggccccaagcttggagcctagcgtgtcccctcaagatgagacagccgaagtggctgtgcccgctgccgtgcccgctgcagaggccgaggccgaggtgactttacgtgagttacaggaggcattagaggaagaggtactgactcggcagtcactgtcccgcgagatggaagctatccgcaccgacaaccagaacttcgcctcacagttgagagaagctgaggctcggaatagagatttagaagcccatgtccgccagcttcaggaacgaatggaactgctgcaggccgaaggcgctacagggccatag

SEQ ID NO: 107092 - DNA, 1590 bp, Artificial Sequence
  derived and/or modified sequence
atgagcgccgaggtgcgcctgcgccgcctgcagcagctggtgctggaccccggcttcctgggcctggagcccctgctggacctgctgctgggcgtgcaccaggagctgggcgccagcgagctggcccaggacaagtacgtggccgacttcctgcagtgggccgagcccatcgtggtgcgcctgaaggaggtgcgcctgcagcgcgacgacttcgagatcctgaaggtgatcggccgcggcgccttcagcgaggtggccgtggtgaagatgaagcagaccggccaggtgtacgccatgaagatcatgaacaagtgggacatgctgaagcgcggcgaggtgagctgcttccgcgaggagcgcgacgtgctggtgaacggcgaccgccgctggatcacccagctgcacttcgccttccaggacgagaactacctgtacctggtgatggagtactacgtgggcggcgacctgctgaccctgctgagcaagttcggcgagcgcatccccgccgagatggcccgcttctacctggccgagatcgtgatggccatcgacagcgtgcaccgcctgggctacgtgcaccgcgacatcaagcccgacaacatcctgctggaccgctgcggccacatccgcctggccgacttcggcagctgcctgaagctgcgcgccgacggcaccgtgcgcagcctggtggccgtgggcacccccgactacctgagccccgagatcctgcaggccgtgggcggcggccccggcaccggcagctacggccccgagtgcgactggtgggccctgggcgtgttcgcctacgagatgttctacggccagacccccttctacgccgacagcaccgccgagacctacggcaagatcgtgcactacaaggagcacctgagcctgcccctggtggacgagggcgtgcccgaggaggcccgcgacttcatccagcgcctgctgtgcccccccgagacccgcctgggccgcggcggcgccggcgacttccgcacccaccccttcttcttcggcctggactgggacggcctgcgcgacagcgtgccccccttcacccccgacttcgagggcgccaccgacacctgcaacttcgacctggtggaggacggcctgaccgccatggagaccctgagcgacatccgcgagggcgcccccctgggcgtgcacctgcccttcgtgggctacagctacagctgcatggccctgcgcgacagcgaggtgcccggccccacccccatggagctggaggccgagcagctgctggagccccacgtgcaggcccccagcctggagcccagcgtgagcccccaggacgagaccgccgaggtggccgtgcccgccgccgtgcccgccgccgaggccgaggccgaggtgaccctgcgcgagctgcaggaggccctggaggaggaggtgctgacccgccagagcctgagccgcgagatggaggccatccgcaccgacaaccagaacttcgccagccagctgcgcgaggccgaggcccgcaaccgcgacctggaggcccacgtgcgccagctgcaggagcgcatggagctgctgcaggccgagggcgccaccggcccc

SEQ ID NO: 107093 - DNA, 1593 bp, Artificial Sequence
  derived and/or modified sequence
atgagcgccgaggtgagactgagaagactgcagcagctggtgctggaccccggcttcctgggcctggagcccctgctggacctgctgctgggcgtgcaccaggagctgggcgccagcgagctggcccaggacaagtacgtggccgacttcctgcagtgggccgagcccatcgtggtgagactgaaggaggtgagactgcagagagacgacttcgagatcctgaaggtgatcggcagaggcgccttcagcgaggtggccgtggtgaagatgaagcagaccggccaggtgtacgccatgaagatcatgaacaagtgggacatgctgaagagaggcgaggtgagctgcttcagagaggagagagacgtgctggtgaacggcgacagaagatggatcacccagctgcacttcgccttccaggacgagaactacctgtacctggtgatggagtactacgtgggcggcgacctgctgaccctgctgagcaagttcggcgagagaatccccgccgagatggccagattctacctggccgagatcgtgatggccatcgacagcgtgcacagactgggctacgtgcacagagacatcaagcccgacaacatcctgctggacagatgcggccacatcagactggccgacttcggcagctgcctgaagctgagagccgacggcaccgtgagaagcctggtggccgtgggcacccccgactacctgagccccgagatcctgcaggccgtgggcggcggccccggcaccggcagctacggccccgagtgcgactggtgggccctgggcgtgttcgcctacgagatgttctacggccagacccccttctacgccgacagcaccgccgagacctacggcaagatcgtgcactacaaggagcacctgagcctgcccctggtggacgagggcgtgcccgaggaggccagagacttcatccagagactgctgtgcccccccgagaccagactgggcagaggcggcgccggcgacttcagaacccaccccttcttcttcggcctggactgggacggcctgagagacagcgtgccccccttcacccccgacttcgagggcgccaccgacacctgcaacttcgacctggtggaggacggcctgaccgccatggagaccctgagcgacatcagagagggcgcccccctgggcgtgcacctgcccttcgtgggctacagctacagctgcatggccctgagagacagcgaggtgcccggccccacccccatggagctggaggccgagcagctgctggagccccacgtgcaggcccccagcctggagcccagcgtgagcccccaggacgagaccgccgaggtggccgtgcccgccgccgtgcccgccgccgaggccgaggccgaggtgaccctgagagagctgcaggaggccctggaggaggaggtgctgaccagacagagcctgagcagagagatggaggccatcagaaccgacaaccagaacttcgccagccagctgagagaggccgaggccagaaacagagacctggaggcccacgtgagacagctgcaggagagaatggagctgctgcaggccgagggcgccaccggcccctag

SEQ ID NO: 107094 - DNA, 1982 bp, Artificial Sequence
  derived and/or modified sequence
gagaggcccaggggacagccagggacaggcagacatgcagccagggctccagggcctggacaggggctgccaggccctgtgacaggaggaccccgagcccccggcccggggaggggccatggtgctgcctgtccaacatgtcagccgaggtgcggctgaggcggctccagcagctggtgttggacccgggcttcctggggctggagcccctgctcgaccttctcctgggcgtccaccaggagctgggcgcctccgaactggcccaggacaagtacgtggccgacttcttgcagtgggcggagcccatcgtggtgaggcttaaggaggtccgactgcagagggacgacttcgagattctgaaggtgatcggacgcggggcgttcagcgaggtagcggtagtgaagatgaagcagacgggccaggtgtatgccatgaagatcatgaacaagtgggacatgctgaagaggggcgaggtgtcgtgcttccgtgaggagagggacgtgttggtgaatggggaccggcggtggatcacgcagctgcacttcgccttccaggatgagaactacctgtacctggtcatggagtattacgtgggcggggacctgctgacactgctgagcaagtttggggagcggattccggccgagatggcgcgcttctacctggcggagattgtcatggccatagactcggtgcaccggcttggctacgtgcacagggacatcaaacccgacaacatcctgctggaccgctgtggccacatccgcctggccgacttcggctcttgcctcaagctgcgggcagatggaacggtgcggtcgctggtggctgtgggcaccccagactacctgtcccccgagatcctgcaggctgtgggcggtgggcctgggacaggcagctacgggcccgagtgtgactggtgggcgctgggtgtattcgcctatgaaatgttctatgggcagacgcccttctacgcggattccacggcggagacctatggcaagatcgtccactacaaggagcacctctctctgccgctggtggacgaaggggtccctgaggaggctcgagacttcattcagcggttgctgtgtcccccggagacacggctgggccggggtggagcaggcgacttccggacacatcccttcttctttggcctcgactgggatggtctccgggacagcgtgcccccctttacaccggatttcgaaggtgccaccgacacatgcaacttcgacttggtggaggacgggctcactgccatggagacactgtcggacattcgggaaggtgcgccgctaggggtccacctgccttttgtgggctactcctactcctgcatggccctcagggacagtgaggtcccaggccccacacccatggaactggaggccgagcagctgcttgagccacacgtgcaagcgcccagcctggagccctcggtgtccccacaggatgaaacagctgaagtggcagttccagcggctgtccctgcggcagaggctgaggccgaggtgacgctgcgggagctccaggaagccctggaggaggaggtgctcacccggcagagcctgagccgggagatggaggccatccgcacggacaaccagaacttcgccagtcaactacgcgaggcagaggctcggaaccgggacctagaggcacacgtccggcagttgcaggagcggatggagttgctgcaggcagagggagccacaggtccctaggcctggcctatcggaggcgctttccctgctcctgttcgccgttgttctgtctcgtgccgccgccctgggctgcattgggttggtggcccacgccggccaactcaccgcagtctggcgccgcccaggagccgcccgcgctccctgaaccctagaactgtcttcgactccggggccccgttggaagactgagtgcccggggcacggcacagaagccgcgcccaccgcctgccagttcacaaccgctccgagcgt

SEQ ID NO: 107095 - protein, 935 aa, Artificial Sequence
  derived and/or modified sequence
MAAAKPTLTDSLSFCLAQLAAAAGEALGGEKDPATNETPLSRALLALRTRHIKAAGGIERFRARGGLRPLLALLRRAAAAGSAPSQAGPGSAPSSAASGASSPAPASGPAPSAVSSSSPTPPVRLRKTLDLALSILADCCTEGACRTEVRRLGGILPLVTILQCMKTDSIQNRTARALGNLAMEPESCGDIHCAGAVPLLVESLTACQDSQCLQSVVRALRNLADSPQHRLALAQQGAVRPLAELLATAPDAALTLALVRALLELSRGCSRACAEQLSLGGGLGPLVSLASHPKRAVREGTILILANLCAQGLIRPALGNAGGVEVLVDELRQRRDPNGASPTSQQPLVRAVCLLCREAINRARLRDAGGLDLLMGLLRDPRASAWHPRIVAALVGFLYDTGALGRLQALGLVPLLAGQLCGEAGEEEEEGREAASWDFPEERTPERAQGGSFRSLRSWLISEGYATGPDDISPDWSPEQCPPEPMEPASPAPTPTSLRAPRTQRTPGRSPAAAIEEPWGREGPALLLLSRFSQAPDPSGALVTGPALYGLLTYVTGAPGPPSPRALRILSRLTCNPACLEAFVRSYGAALLRAWLVLGVAPDDWPAPRARPTLHSRHRELGERLLQNLTVQAESPFGVGALTHLLLSGSPEDRVACALTLPFICRKPSLWRRLLLEQGGLRLLLAALTRPAPHPLFLFFAADSLSCLQDLVSPTVSPAVPQAVPMDLDSPSPCLYEPLLGPAPVPAPDLHFLLDSGLQLPAQRAASATASPFFRALLSGSFAEAQMDLVPLRGLSPGAAWPVLHHLHGCRGCGAALGPVPPPGQPLLGSEAEEALEAAGRFLLPGLEEELEEAVGRIHLGPQGGPESVGEVFRLGRPRLAAHCARWTLGSEQCPRKRGLALVGLVEAAGEEAGPLTEALLAVVMGIELGARVPA

SEQ ID NO: 107096 - protein, 1030 aa, Artificial Sequence
  derived and/or modified sequence
MVTLGAGVRLFTGVYPVVLNQIRATSEASAITRTTMPAPELTSTSRAEDTRDTGVQLRKRKIPQARHSRKRQRTFSFRSLGSAARSGAESEARAKMAAAKPTLTDSLSFCLAQLAAAAGEALGGEKDPATNETPLSRALLALRTRHIKAAGGIERFRARGGLRPLLALLRRAAAAGSAPSQAGPGSAPSSAASGASSPAPASGPAPSAVSSSSPTPPVRLRKTLDLALSILADCCTEGACRTEVRRLGGILPLVTILQCMKTDSIQNRTARALGNLAMEPESCGDIHCAGAVPLLVESLTACQDSQCLQSVVRALRNLADSPQHRLALAQQGAVRPLAELLATAPDAALTLALVRALLELSRGCSRACAEQLSLGGGLGPLVSLASHPKRAVREGTILILANLCAQGLIRPALGNAGGVEVLVDELRQRRDPNGASPTSQQPLVRAVCLLCREAINRARLRDAGGLDLLMGLLRDPRASAWHPRIVAALVGFLYDTGALGRLQALGLVPLLAGQLCGEAGEEEEEGREAASWDFPEERTPERAQGGSFRSLRSWLISEGYATGPDDISPDWSPEQCPPEPMEPASPAPTPTSLRAPRTQRTPGRSPAAAIEEPWGREGPALLLLSRFSQAPDPSGALVTGPALYGLLTYVTGAPGPPSPRALRILSRLTCNPACLEAFVRSYGAALLRAWLVLGVAPDDWPAPRARPTLHSRHRELGERLLQNLTVQAESPFGVGALTHLLLSGSPEDRVACALTLPFICRKPSLWRRLLLEQGGLRLLLAALTRPAPHPLFLFFAADSLSCLQDLVSPTVSPAVPQAVPMDLDSPSPCLYEPLLGPAPVPAPDLHFLLDSGLQLPAQRAASATASPFFRALLSGSFAEAQMDLVPLRGLSPGAAWPVLHHLHGCRGCGAALGPVPPPGQPLLGSEAEEALEAAGRFLLPGLEEELEEAVGRIHLGPQGGPESVGEVFRLGRPRLAAHCARWTLGSEQCPRKRGLALVGLVEAAGEEAGPLTEALLAVVMGIELGARVPA

SEQ ID NO: 107097 - protein, 579 aa, Artificial Sequence
  derived and/or modified sequence
MKTDSIQNRTARALGNLAMEPESCGDIHCAGAVPLLVESLTACQDSQCLQSVALGLVPLLAGQLCGEAGEEEEEGREAASWDFPEERTPERAQGGSFRSLRSWLISEGYATGPDDISPDWSPEQCPPEPMEPASPAPTPTSLRAPRTQRTPGRSPAAAIEEPWGREGPALLLLSRFSQAPDPSGALVTGPALYGLLTYVTGAPGPPSPRALRILSRLTCNPACLEAFVRSYGAALLRAWLVLGVAPDDWPAPRARPTLHSRHRELGERLLQNLTVQAESPFGVGALTHLLLSGSPEDRVACALTLPFICRKPSLWRRLLLEQGGLRLLLAALTRPAPHPLFLFFAADSLSCLQDLVSPTVSPAVPQAVPMDLDSPSPCLYEPLLGPAPVPAPDLHFLLDSGLQLPAQRAASATASPFFRALLSGSFAEAQMDLVPLRGLSPGAAWPVLHHLHGCRGCGAALGPVPPPGQPLLGSEAEEALEAAGRFLLPGLEEELEEAVGRIHLGPQGGPESVGEVFRLGRPRLAAHCARWTLGSEQCPRKRGLALVGLVEAAGEEAGPLTEALLAVVMGIELGARVPA

SEQ ID NO: 107098 - DNA, 2808 bp, Artificial Sequence
  derived and/or modified sequence
atggccgccgccaagcccaccctgaccgacagcctgagcttctgcctggcccagctggccgccgccgccggcgaggccctgggcggcgagaaggaccccgccaccaacgagacccccctgagcagagccctgctggccctgagaaccagacacatcaaggccgccggcggcatcgagagattcagagccagaggcggcctgagacccctgctggccctgctgagaagagccgccgccgccggcagcgcccccagccaggccggccccggcagcgcccccagcagcgccgccagcggcgccagcagccccgcccccgccagcggccccgcccccagcgccgtgagcagcagcagccccaccccccccgtgagactgagaaagaccctggacctggccctgagcatcctggccgactgctgcaccgagggcgcctgcagaaccgaggtgagaagactgggcggcatcctgcccctggtgaccatcctgcagtgcatgaagaccgacagcatccagaacagaaccgccagagccctgggcaacctggccatggagcccgagagctgcggcgacatccactgcgccggcgccgtgcccctgctggtggagagcctgaccgcctgccaggacagccagtgcctgcagagcgtggtgagagccctgagaaacctggccgacagcccccagcacagactggccctggcccagcagggcgccgtgagacccctggccgagctgctggccaccgcccccgacgccgccctgaccctggccctggtgagagccctgctggagctgagcagaggctgcagcagagcctgcgccgagcagctgagcctgggcggcggcctgggccccctggtgagcctggccagccaccccaagagagccgtgagagagggcaccatcctgatcctggccaacctgtgcgcccagggcctgatcagacccgccctgggcaacgccggcggcgtggaggtgctggtggacgagctgagacagagaagagaccccaacggcgccagccccaccagccagcagcccctggtgagagccgtgtgcctgctgtgcagagaggccatcaacagagccagactgagagacgccggcggcctggacctgctgatgggcctgctgagagaccccagagccagcgcctggcaccccagaatcgtggccgccctggtgggcttcctgtacgacaccggcgccctgggcagactgcaggccctgggcctggtgcccctgctggccggccagctgtgcggcgaggccggcgaggaggaggaggagggcagagaggccgccagctgggacttccccgaggagagaacccccgagagagcccagggcggcagcttcagaagcctgagaagctggctgatcagcgagggctacgccaccggccccgacgacatcagccccgactggagccccgagcagtgcccccccgagcccatggagcccgccagccccgcccccacccccaccagcctgagagcccccagaacccagagaacccccggcagaagccccgccgccgccatcgaggagccctggggcagagagggccccgccctgctgctgctgagcagattcagccaggcccccgaccccagcggcgccctggtgaccggccccgccctgtacggcctgctgacctacgtgaccggcgcccccggcccccccagccccagagccctgagaatcctgagcagactgacctgcaaccccgcctgcctggaggccttcgtgagaagctacggcgccgccctgctgagagcctggctggtgctgggcgtggcccccgacgactggcccgcccccagagccagacccaccctgcacagcagacacagagagctgggcgagagactgctgcagaacctgaccgtgcaggccgagagccccttcggcgtgggcgccctgacccacctgctgctgagcggcagccccgaggacagagtggcctgcgccctgaccctgcccttcatctgcagaaagcccagcctgtggagaagactgctgctggagcagggcggcctgagactgctgctggccgccctgaccagacccgccccccaccccctgttcctgttcttcgccgccgacagcctgagctgcctgcaggacctggtgagccccaccgtgagccccgccgtgccccaggccgtgcccatggacctggacagccccagcccctgcctgtacgagcccctgctgggccccgcccccgtgcccgcccccgacctgcacttcctgctggacagcggcctgcagctgcccgcccagagagccgccagcgccaccgccagccccttcttcagagccctgctgagcggcagcttcgccgaggcccagatggacctggtgcccctgagaggcctgagccccggcgccgcctggcccgtgctgcaccacctgcacggctgcagaggctgcggcgccgccctgggccccgtgcccccccccggccagcccctgctgggcagcgaggccgaggaggccctggaggccgccggcagattcctgctgcccggcctggaggaggagctggaggaggccgtgggcagaatccacctgggcccccagggcggccccgagagcgtgggcgaggtgttcagactgggcagacccagactggccgcccactgcgccagatggaccctgggcagcgagcagtgccccagaaagagaggcctggccctggtgggcctggtggaggccgccggcgaggaggccggccccctgaccgaggccctgctggccgtggtgatgggcatcgagctgggcgccagagtgcccgcctag

SEQ ID NO: 107099 - DNA, 3093 bp, Artificial Sequence
  derived and/or modified sequence
atggtgaccctgggcgccggcgtgagactgttcaccggcgtgtaccccgtggtgctgaaccagatcagagccaccagcgaggccagcgccatcaccagaaccaccatgcccgcccccgagctgaccagcaccagcagagccgaggacaccagagacaccggcgtgcagctgagaaagagaaagatcccccaggccagacacagcagaaagagacagagaaccttcagcttcagaagcctgggcagcgccgccagaagcggcgccgagagcgaggccagagccaagatggccgccgccaagcccaccctgaccgacagcctgagcttctgcctggcccagctggccgccgccgccggcgaggccctgggcggcgagaaggaccccgccaccaacgagacccccctgagcagagccctgctggccctgagaaccagacacatcaaggccgccggcggcatcgagagattcagagccagaggcggcctgagacccctgctggccctgctgagaagagccgccgccgccggcagcgcccccagccaggccggccccggcagcgcccccagcagcgccgccagcggcgccagcagccccgcccccgccagcggccccgcccccagcgccgtgagcagcagcagccccaccccccccgtgagactgagaaagaccctggacctggccctgagcatcctggccgactgctgcaccgagggcgcctgcagaaccgaggtgagaagactgggcggcatcctgcccctggtgaccatcctgcagtgcatgaagaccgacagcatccagaacagaaccgccagagccctgggcaacctggccatggagcccgagagctgcggcgacatccactgcgccggcgccgtgcccctgctggtggagagcctgaccgcctgccaggacagccagtgcctgcagagcgtggtgagagccctgagaaacctggccgacagcccccagcacagactggccctggcccagcagggcgccgtgagacccctggccgagctgctggccaccgcccccgacgccgccctgaccctggccctggtgagagccctgctggagctgagcagaggctgcagcagagcctgcgccgagcagctgagcctgggcggcggcctgggccccctggtgagcctggccagccaccccaagagagccgtgagagagggcaccatcctgatcctggccaacctgtgcgcccagggcctgatcagacccgccctgggcaacgccggcggcgtggaggtgctggtggacgagctgagacagagaagagaccccaacggcgccagccccaccagccagcagcccctggtgagagccgtgtgcctgctgtgcagagaggccatcaacagagccagactgagagacgccggcggcctggacctgctgatgggcctgctgagagaccccagagccagcgcctggcaccccagaatcgtggccgccctggtgggcttcctgtacgacaccggcgccctgggcagactgcaggccctgggcctggtgcccctgctggccggccagctgtgcggcgaggccggcgaggaggaggaggagggcagagaggccgccagctgggacttccccgaggagagaacccccgagagagcccagggcggcagcttcagaagcctgagaagctggctgatcagcgagggctacgccaccggccccgacgacatcagccccgactggagccccgagcagtgcccccccgagcccatggagcccgccagccccgcccccacccccaccagcctgagagcccccagaacccagagaacccccggcagaagccccgccgccgccatcgaggagccctggggcagagagggccccgccctgctgctgctgagcagattcagccaggcccccgaccccagcggcgccctggtgaccggccccgccctgtacggcctgctgacctacgtgaccggcgcccccggcccccccagccccagagccctgagaatcctgagcagactgacctgcaaccccgcctgcctggaggccttcgtgagaagctacggcgccgccctgctgagagcctggctggtgctgggcgtggcccccgacgactggcccgcccccagagccagacccaccctgcacagcagacacagagagctgggcgagagactgctgcagaacctgaccgtgcaggccgagagccccttcggcgtgggcgccctgacccacctgctgctgagcggcagccccgaggacagagtggcctgcgccctgaccctgcccttcatctgcagaaagcccagcctgtggagaagactgctgctggagcagggcggcctgagactgctgctggccgccctgaccagacccgccccccaccccctgttcctgttcttcgccgccgacagcctgagctgcctgcaggacctggtgagccccaccgtgagccccgccgtgccccaggccgtgcccatggacctggacagccccagcccctgcctgtacgagcccctgctgggccccgcccccgtgcccgcccccgacctgcacttcctgctggacagcggcctgcagctgcccgcccagagagccgccagcgccaccgccagccccttcttcagagccctgctgagcggcagcttcgccgaggcccagatggacctggtgcccctgagaggcctgagccccggcgccgcctggcccgtgctgcaccacctgcacggctgcagaggctgcggcgccgccctgggccccgtgcccccccccggccagcccctgctgggcagcgaggccgaggaggccctggaggccgccggcagattcctgctgcccggcctggaggaggagctggaggaggccgtgggcagaatccacctgggcccccagggcggccccgagagcgtgggcgaggtgttcagactgggcagacccagactggccgcccactgcgccagatggaccctgggcagcgagcagtgccccagaaagagaggcctggccctggtgggcctggtggaggccgccggcgaggaggccggccccctgaccgaggccctgctggccgtggtgatgggcatcgagctgggcgccagagtgcccgcctag

SEQ ID NO: 107100 - DNA, 2904 bp, Artificial Sequence
  derived and/or modified sequence
atgcacagaccccacgtgcccggctgcgccgccatcaagttcagaagcctgggcagcgccgccagaagcggcgccgagagcgaggccagagccaagatggccgccgccaagcccaccctgaccgacagcctgagcttctgcctggcccagctggccgccgccgccggcgaggccctgggcggcgagaaggaccccgccaccaacgagacccccctgagcagagccctgctggccctgagaaccagacacatcaaggccgccggcggcatcgagagattcagagccagaggcggcctgagacccctgctggccctgctgagaagagccgccgccgccggcagcgcccccagccaggccggccccggcagcgcccccagcagcgccgccagcggcgccagcagccccgcccccgccagcggccccgcccccagcgccgtgagcagcagcagccccaccccccccgtgagactgagaaagaccctggacctggccctgagcatcctggccgactgctgcaccgagggcgcctgcagaaccgaggtgagaagactgggcggcatcctgcccctggtgaccatcctgcagtgcatgaagaccgacagcatccagaacagaaccgccagagccctgggcaacctggccatggagcccgagagctgcggcgacatccactgcgccggcgccgtgcccctgctggtggagagcctgaccgcctgccaggacagccagtgcctgcagagcgtggtgagagccctgagaaacctggccgacagcccccagcacagactggccctggcccagcagggcgccgtgagacccctggccgagctgctggccaccgcccccgacgccgccctgaccctggccctggtgagagccctgctggagctgagcagaggctgcagcagagcctgcgccgagcagctgagcctgggcggcggcctgggccccctggtgagcctggccagccaccccaagagagccgtgagagagggcaccatcctgatcctggccaacctgtgcgcccagggcctgatcagacccgccctgggcaacgccggcggcgtggaggtgctggtggacgagctgagacagagaagagaccccaacggcgccagccccaccagccagcagcccctggtgagagccgtgtgcctgctgtgcagagaggccatcaacagagccagactgagagacgccggcggcctggacctgctgatgggcctgctgagagaccccagagccagcgcctggcaccccagaatcgtggccgccctggtgggcttcctgtacgacaccggcgccctgggcagactgcaggccctgggcctggtgcccctgctggccggccagctgtgcggcgaggccggcgaggaggaggaggagggcagagaggccgccagctgggacttccccgaggagagaacccccgagagagcccagggcggcagcttcagaagcctgagaagctggctgatcagcgagggctacgccaccggccccgacgacatcagccccgactggagccccgagcagtgcccccccgagcccatggagcccgccagccccgcccccacccccaccagcctgagagcccccagaacccagagaacccccggcagaagccccgccgccgccatcgaggagccctggggcagagagggccccgccctgctgctgctgagcagattcagccaggcccccgaccccagcggcgccctggtgaccggccccgccctgtacggcctgctgacctacgtgaccggcgcccccggcccccccagccccagagccctgagaatcctgagcagactgacctgcaaccccgcctgcctggaggccttcgtgagaagctacggcgccgccctgctgagagcctggctggtgctgggcgtggcccccgacgactggcccgcccccagagccagacccaccctgcacagcagacacagagagctgggcgagagactgctgcagaacctgaccgtgcaggccgagagccccttcggcgtgggcgccctgacccacctgctgctgagcggcagccccgaggacagagtggcctgcgccctgaccctgcccttcatctgcagaaagcccagcctgtggagaagactgctgctggagcagggcggcctgagactgctgctggccgccctgaccagacccgccccccaccccctgttcctgttcttcgccgccgacagcctgagctgcctgcaggacctggtgagccccaccgtgagccccgccgtgccccaggccgtgcccatggacctggacagccccagcccctgcctgtacgagcccctgctgggccccgcccccgtgcccgcccccgacctgcacttcctgctggacagcggcctgcagctgcccgcccagagagccgccagcgccaccgccagccccttcttcagagccctgctgagcggcagcttcgccgaggcccagatggacctggtgcccctgagaggcctgagccccggcgccgcctggcccgtgctgcaccacctgcacggctgcagaggctgcggcgccgccctgggccccgtgcccccccccggccagcccctgctgggcagcgaggccgaggaggccctggaggccgccggcagattcctgctgcccggcctggaggaggagctggaggaggccgtgggcagaatccacctgggcccccagggcggccccgagagcgtgggcgaggtgttcagactgggcagacccagactggccgcccactgcgccagatggaccctgggcagcgagcagtgccccagaaagagaggcctggccctggtgggcctggtggaggccgccggcgaggaggccggccccctgaccgaggccctgctggccgtggtgatgggcatcgagctgggcgccagagtgcccgcctag

SEQ ID NO: 107101 - DNA, 2808 bp, Artificial Sequence
  derived and/or modified sequence
atggctgcagcaaagcccaccctgacggacagtctgtcgttctgcctcgcccagcttgctgctgccgccggagaggccctcgggggagaaaaggatcctgctactaacgagacccctctcagtcgagccttgctggctctgagaacacgccatatcaaggctgccgggggcatcgaacgttttcgggcccgtggaggactgcgccctctcctggctctgctgagacgggccgcagcagccggctccgccccctcacaggccggaccaggatcagcgccctcttccgcagccagtggggcgagctcccccgcccccgcatccggacctgcaccttctgctgtgtcatcatccagccccacccctccggtgcggctcagaaaaacactggacctggcactttcgattttggccgattgctgtaccgaaggtgcctgtaggactgaggtgcggcggctgggcgggatcctccccttggtcacaattttgcaatgcatgaagacagattctattcagaacagaacagcgagagcactgggaaatcttgctatggagcccgagagctgtggtgatatccattgtgccggagccgtgccgctgctggtggaaagtctgacggcatgtcaagactcacagtgtctgcaatcggtggtgcgggctctgagaaatcttgcagatagtccacagcacaggctggccctggcacagcagggcgctgtaagacccttggcggaactccttgccacagcccccgatgccgccctgacccttgccttggtacgggcccttctggagctaagtaggggctgttctcgagcatgcgccgagcagctatctttggggggcggcctggggcctcttgtgagcctggcatcccatccgaaacgcgccgttcgagaagggacaatactgattctcgcaaatctgtgcgcacagggactcatccggccggcccttggcaacgccggtggggtggaggtgctagtggacgagctccggcagcgccgcgaccccaacggagcttcaccaactagtcagcagcccctcgtgcgcgccgtgtgccttctctgtcgagaagcgattaaccgagcacgcctgagagacgctggcgggctggacttgctcatgggtctcctcagggacccaagagcctctgcctggcaccctaggattgtagccgcccttgtcggctttctctacgacacaggagctctggggcggcttcaagctctcggcttggtcccgctgctcgctggccagctgtgtggagaggctggtgaggaggaggaggagggacgcgaggccgctagctgggacttccctgaagaaaggacaccagagcgcgcccaggggggatcttttaggagcctcagaagttggctgatatccgaaggatacgcgacagggcctgatgacatttcgcccgactggagtcctgagcaatgccctcccgagcctatggaacctgcctcccccgcccctaccccaacttcccttagggcgccccgcactcagcgaaccccaggtaggagccctgctgcagccatcgaagagccctgggggcgggaagggcctgctctcctgctgctcagtcgattttcccaagcacctgatcctagtggcgccttggtcacaggtcccgcactgtatggacttctcacatatgtgacaggtgctccgggaccgccttcaccacgcgcgctgagaatcctgtccaggctcacctgcaaccccgcttgtctggaagcttttgttcggtcatatggagcggccttacttagggcttggctcgtcctgggcgtggcccctgacgactggccggcgcccagggctagacccacactgcacagtaggcatagagaactaggtgagcggctgttacaaaaccttaccgtacaggccgagtcaccgtttggcgtgggcgctctgactcacttgctgttgagtggatcaccagaagaccgtgtcgcatgcgcccttactttacctttcatatgccgcaagccgtcattgtggcggcgcctgctactcgaacagggaggactgcgcctcttattagctgcccttactaggcctgcaccccaccccctgttcctcttttttgccgctgattcactgagctgcctgcaagacctggtgtcaccgaccgtctcccccgcagtacctcaggcggtccctatggatttggatagtccaagtccatgtctgtacgaaccactgctgggcccagctccagtgccggctccagatctgcactttctcctcgattccggattgcagcttcctgcccagcgcgcggcctccgcgaccgcatctccattctttagggccttgttgtctggctcctttgctgaagctcagatggatttagtgcctctccgggggctaagccctggagccgcatggcccgtgctccaccacctgcatggttgccggggctgcggtgctgccttaggccctgtgcctccacctggacaacctctgctcggaagcgaggccgaggaggccctcgaggccgccggaaggttcttattgcccggtctggaggaagagcttgaggaggctgtgggcagaatccaccttgggcctcagggagggcctgagagtgtcggagaagtgttccgtctaggaagaccaagactggccgcacactgcgcgcggtggacgctgggatctgaacaatgcccccggaagagagggctggccctggtgggactcgtggaagcagcgggagaggaagccgggcctctgaccgaagccttgctggctgtcgttatgggcatcgagcttggggctagggttccggcttag

SEQ ID NO: 107102 - DNA, 3093 bp, Artificial Sequence
  derived and/or modified sequence
atggttaccttaggggccggagtacgcttatttactggcgtgtatcccgtggtgctgaaccagataagagcgactagcgaggcttctgctatcacccggacaacgatgcccgccccggagttgacctccacctcaagagccgaagacacccgagatactggtgtgcagctaaggaaaaggaagataccgcaggctcgacatagccggaagcgccaacgcactttcagcttccgatccctaggcagtgcagctcgcagcggcgccgagtccgaggcacgcgctaaaatggctgcagcaaaacctactctcactgacagccttagcttttgcttagcgcagttagctgctgctgccggtgaagccctgggcggagagaaagatccggcaacgaatgaaacccctctgagtcgcgcacttctcgcgctcaggacgcgacatattaaggctgccggggggattgagcggttccgcgcgcggggcgggctgcgccctctactggccctgctgaggagggcggccgctgccgggtctgccccatcccaggcagggccggggagcgcaccctcgagtgccgcaagcggggcctcatctcccgcacctgcttctggccctgctccatctgctgttagctcttcctcaccaacccctcccgtcagactgagaaagaccctggatctggcgctgtccattttagcagattgttgtactgaaggagcttgccggacagaggtgcgaaggctcggcggcattttgcctttggtgactatcctgcaatgcatgaaaactgattctatccagaaccggactgctcgggctctgggcaatctcgcaatggaacctgaatcatgtggcgacatccactgtgcaggtgcagtccctctgctggtggagtctttgaccgcatgtcaggattcccaatgcctccaaagtgtggttagggccctgagaaatctggccgattcaccacagcataggctcgccctggcacagcagggtgcagtccgtccgcttgcggagctgctggccaccgcacctgacgcagcccttaccctggctcttgttcgggccctgctggagttgtctcgtggctgtagtagagcctgcgcagaacagctgtccttaggaggaggattgggaccactcgtgtctttggcctcacatccaaagcgcgccgtcagggaggggactattctcatattggccaacctgtgtgcgcaagggctaatcaggcccgcccttggcaacgcaggcggtgttgaagtcttggtcgatgagttacgccaaagaagggacccaaatggcgcctcccccactagccagcagcccctagtccgggcagtttgcctcctatgcagagaggccattaatagggcacggctgcgcgacgcagggggcctggaccttttgatggggttgttgcgggatccccgggccagcgcttggcatccgcggatagtcgccgctctagtgggatttttatacgacaccggagccctggggagactgcaggctctggggctggtgcctctgctggcggggcagctatgcggggaggcaggagaggaggaggaggagggtagggaggctgcgtcctgggattttcccgaagagaggactccagagcgagcgcagggggggtccttcaggtccctcaggagctggttaatttctgagggttacgctacaggaccagacgacattagtcccgattggagtcccgagcagtgtccccccgaaccaatggagcccgcctccccggcgcctacccccacgtccctccgcgcacctcgcactcaacggacccctggccgctccccagcggctgcaatcgaggagccttggggtcgggaaggccccgcgttacttctgcttagtaggtttagccaggctcccgacccaagcggggcactggtaactgggcccgcgctttatggactgttgacatacgtcacgggggcccccggacctccgtcgccaagggcgctccgaattctgagcagactcacttgcaatcccgcttgccttgaagccttcgtcagatcatatggggcggccctgctccgcgcttggttggtcctgggggtggctcctgacgactggcctgccccacgagcacgccccactctgcactccagacaccgggagctgggagagcgcttactacagaatttaacagtgcaggcagaaagccccttcggggttggtgctttgacgcatcttctgctttcaggcagcccggaagatagagttgcttgcgcgctgactctgcctttcatttgtagaaaaccctctctgtggcgcaggttactgctcgagcaaggcggactgagattactgttagccgctcttacacgccctgcccctcatccgctctttctgtttttcgccgccgattctctctcctgccttcaagatctagtgagcccaacagttagtccagccgttccacaggctgtcccaatggaccttgactctccatcaccttgcctgtatgagccactcctcggtccagcaccagtcccagcccctgacctgcactttctcctggattcaggattgcagctgccagctcagagggcagctagcgctaccgccagcccattttttcgcgcactcctcagcgggtcatttgctgaggcccaaatggacctggtgcctctcaggggactgtcacccggtgctgcttggcctgtacttcatcatctgcatggctgtcgaggctgcggcgccgctctgggcccagtgcctccaccaggccagccactgctcggctcagaagctgaagaggccctcgaggctgctggccggtttttgctcccggggcttgaagaggagctggaagaggccgtcgggcgcattcacttgggtccacagggtggacctgaatctgtcggcgaggtgttccgtctgggtaggccccgcctcgcagcccattgcgcgaggtggacactcggttcagagcaatgtccccgaaaacgcggactggctctcgtgggcctcgtagaagccgcaggtgaggaagccggccccctgacagaggccttgctggccgtggtgatgggtattgaactgggcgcaagggtgccagcctag

SEQ ID NO: 107103 - DNA, 2904 bp, Artificial Sequence
  derived and/or modified sequence
atgcacaggccacacgtccctggctgcgccgcaattaaatttagatccctagggagcgccgctagaagtggcgccgagtctgaggctcgtgcgaaaatggcggccgctaagcctaccctcaccgattccctgagcttctgcctggcccagctggccgcagccgctggcgaagctttaggcggggagaaagatcccgcgactaacgagacacctcttagtagagccttgcttgccttacggactaggcacatcaaagctgccggtggcatcgaacgctttagggctcgcggagggttgcgccccttgctcgcactgcttcgccgagctgctgccgccggatccgccccttcccaggccgggccgggcagtgccccatctagtgctgctagcggggcatcctcaccagcacccgcatccgggccagccccaagcgcagttagcagttcaagccccaccccgccggtccgcttgaggaagaccctggaccttgccctgagtatcctggccgattgttgtacagaaggagcgtgtaggacggaagtgcgcaggctcggcgggatactgccgctggtgactattctgcaatgcatgaagacagactccatacaaaatcgaaccgcaagggccctgggcaacctggctatggagcctgagtcctgcggcgatattcattgtgccggagccgttccgctgctggttgaatcactcaccgcttgccaagacagtcagtgtcttcagtccgtagtcagagccctaaggaacctcgcagacagtcctcagcatcggcttgccctggcacaacagggagcggtccggcccttggccgaactgctggccacagctccggatgccgcactcaccctggcgctcgtgcgcgctcttttggagctcagccgtggttgctcccgcgcttgcgccgagcaactctcacttgggggggggttgggccccctcgtgtccctggccagtcaccctaaaagggccgttagggaaggaaccattctgatcttggccaatttgtgtgcacagggcctgatcaggcctgctttggggaatgctggaggcgtggaggtgctggtggatgaactgaggcagagaagggaccccaatggggccagccccacctcccagcagccgttagtgcgagcagtttgccttttgtgccgggaagcgattaatcgcgcccgactgagagatgcaggaggcctggatcttctgatgggtctgctccgagatccgcgggcctcagcgtggcaccctcgaatcgttgcagcattggtcggtttcctctacgatactggcgccctcggacgcttacaggcacttggcctcgtccctctgttggcaggccaactctgcggcgaggccggagaggaggaagaagaaggacgcgaagcggcctcctgggacttcccggaggagcggacccccgagcgtgcacagggaggttccttccggtctctccggtcttggctcattagtgagggctatgctactgggccagacgacataagtcctgattggtcaccagagcagtgccccccagaaccaatggaaccagcctcgcccgcacctaccccaacatctcttcgcgcaccacggacacagcggacacccggccggagcccagcagctgctattgaggaaccgtggggccgggaaggcccagccctgctgcttctttccaggttctcgcaggcacccgatccttccggtgctctggtgaccggacccgccctgtacggccttctgacttatgtgaccggagcaccaggacccccctctccccgggcattgcgcatcctttcccgcctgacctgtaacccagcctgccttgaggccttcgtgcgttcatacggggccgcacttctgcgtgcctggttagttctgggagttgctcctgatgattggcctgcaccccgggccaggcccaccctgcacagccgacacagggagctcggggagcgcttgctacagaacctgaccgtccaggcagaaagcccattcggtgtgggggcattaacgcatctcctgctgtctggttcccctgaagatagagtggcctgtgcgttgaccctgcccttcatttgccgaaagccttcgctctggcggcgtctcttgttggagcagggcggactccgcctgctgctggccgccctgacgcgacccgccccccatccactgttcctcttcttcgccgccgacagcctgagttgtcttcaggatttggtatcacccaccgtgtcaccggcagtcccacaggccgtgcccatggatctggactccccaagcccatgcctgtacgagcccttgctgggaccggcccccgtccctgcccccgatctgcactttctgctggacagcggcttacagctaccggcccagcgagcagcctcagctaccgcctctccgttctttcgtgccctgttaagcggaagtttcgcagaagcccagatggatttagtaccgctgcgcggcctaagcccaggcgcagcctggcctgtcctgcaccacttgcacggatgcaggggctgtggggccgccctgggaccagtcccaccacctggtcagcctctcctgggatcagaggctgaagaggctctagaggcggcagggcgcttcctgctccctggactagaggaagaacttgaggaagctgttgggcgtatccatttaggccctcaaggcggtccggagagcgtcggcgaggtgtttagactcggccgcccccgattggccgctcattgtgcaaggtggaccctcggttccgagcaatgccccagaaagcggggcttagccctggtgggtctggtggaagccgcgggtgaggaggcaggtcccttgaccgaagctctgctggctgtggtgatgggaatcgaactcggcgctcgcgttcccgcctag

SEQ ID NO: 107104 - DNA, 2808 bp, Artificial Sequence
  derived and/or modified sequence
atggctgctgccaagcccaccctgacagacagcctgtccttctgcctggcccagctggccgctgctgctggggaggccctgggcggggagaaggaccctgccaccaatgagacccccctgagccgggccctgctggccctgcggaccaggcacatcaaggctgctgggggcatcgagcgcttccgggcccggggcggcctgcggcccctgctggccctgctgcggcgggctgctgctgctggcagcgcccccagccaggccggccctggcagcgcccccagcagcgctgccagcggggccagcagccctgccccagccagcggccctgcccccagcgctgtgagcagcagcagccccaccccacctgtgcggctgaggaagaccctggacctggccctgagcatcctggccgactgctgcacagaaggagcctgcaggacagaggtgcggcggctgggcggcatcctgcccctggtgaccatcctgcagtgcatgaagacagacagcatccagaacagaacagcccgggccctgggcaacctggccatggagcctgagagctgtggggacatccactgtgccggggctgtgcccctgctggtggagagcctgacagcctgccaggacagccagtgcctgcagagcgtggtgcgggccctgaggaacctggccgacagcccccagcaccggctggccctggcccagcagggcgctgtgcggcccctggccgagctgctggccacagccccagatgctgccctgaccctggccctggtgcgggccctgctggagctgagccggggctgcagccgggcctgtgccgagcagctgagcctgggcggcggcctgggccccctggtgtccctggccagccaccccaagagagctgtgcgggagggcaccatcctgatcctggccaacctgtgtgcccagggcctcatccggcctgccctgggcaatgctgggggcgtggaggtgctggtggatgagctgcggcagaggcgggaccccaacggggccagccccaccagccagcagcccctggtgcgggctgtgtgcctgctgtgccgggaggccatcaacagagcccggctgagagatgctgggggcctggacctgctgatgggcctgctgcgggacccccgggccagcgcctggcacccccgcatcgtggccgccctggtgggcttcctgtatgacacaggagccctgggccgcctgcaggccctgggcctggtgcccctgctggccggccagctgtgtggggaggccggggaggaggaggaggagggccgggaggccgcctcctgggacttccctgaggagaggaccccagagcgggcccagggcggcagcttccgcagcctgcgctcctggctgatcagcgagggctacgccactggaccagatgacatcagcccagactggagccctgagcagtgccccccagagcccatggagcccgccagccctgcccccacccccaccagcctgcgggcccccaggacccagaggaccccaggccgcagccctgctgctgccatcgaggagccctggggccgggagggccctgccctgctgctgctgagccgcttcagccaggccccagaccccagcggggccctggtgacaggccctgccctgtatggcctgctgacctacgtgactggagcccctggcccccccagcccccgggccctgcgcatcctgagccggctgacctgcaacccagcctgcctggaggcctttgtgcgctcctatggagctgccctgctgcgggcctggctggtgctgggcgtggccccagatgactggccagccccccgggcccggcccaccctgcacagccgccaccgggagctgggggagcggctgctgcagaacctgactgtgcaggccgagagcccctttggagtgggcgccctgacccacctgctgctgagcggcagccctgaggacagagtggcctgtgccctgaccctgcccttcatctgcaggaagcccagcctgtggaggcggctgctgctggagcagggcggcctgcggctgctgctggccgccctgaccaggcctgccccccaccccctcttcctgttctttgctgctgacagcctgagctgcctgcaggacctggtgagccccaccgtgtccccagctgtgccccaggccgtgcccatggacctggacagccccagcccctgcctgtatgagcccctgctgggccctgcccctgtgcctgccccagacctgcacttcctgctggacagcggcctgcagctgcctgcccagagagctgccagcgccacagccagccccttcttccgggccctgctgagcggcagctttgctgaggcccagatggacctggtgcccctgcggggcctgagccctggagctgcctggcctgtgctgcaccacctgcacggctgccggggctgtggggccgccctgggccctgtgcccccacctggccagcccctgctgggcagcgaggccgaggaggccctggaggccgccggccgcttcctgctgcccggcctggaggaggagctggaggaggccgtgggccgcatccacctgggcccccagggcggccctgagagcgtgggggaggtgttccggctgggccggccccggctggccgcccactgtgcccgctggaccctgggcagcgagcagtgccccaggaagaggggcctggccctggtgggcctggtggaggccgccggggaggaggccggccccctgacagaggccctgctggccgtggtgatgggcatcgagctgggcgcccgggtgcctgcctag

SEQ ID NO: 107105 - DNA, 3093 bp, Artificial Sequence
  derived and/or modified sequence
atggtgaccctgggcgctggggtgcggctcttcaccggggtgtaccctgtggtgctgaaccagatccgggccaccagcgaggccagcgccatcaccaggaccaccatgcctgcccctgagctgaccagcaccagcagagctgaggacacccgggacacaggagtgcagctgaggaagaggaagatcccccaggcccggcacagcaggaagaggcagaggaccttctccttccgcagcctgggcagcgctgcccggagcggggctgagagcgaggcccgggccaagatggccgccgccaagcccaccctgacagacagcctgtccttctgcctggcccagctggccgctgctgctggggaggccctgggcggggagaaggaccctgccaccaatgagacccccctgagccgggccctgctggccctgcggaccaggcacatcaaggccgccggcggcatcgagcgcttccgggcccggggcggcctgcggcccctgctggccctgctgcggcgggctgctgctgctggcagcgcccccagccaggccggccctggcagcgcccccagcagcgctgccagcggggccagcagccctgccccagccagcggccctgcccccagcgctgtgagcagcagcagccccaccccacctgtgcggctgaggaagaccctggacctggccctgagcatcctggccgactgctgcacagagggcgcctgcaggacagaggtgcggcggctgggcggcatcctgcccctggtgaccatcctgcagtgcatgaagacagacagcatccagaacagaacagcccgggccctgggcaacctggccatggagcctgagagctgtggggacatccactgtgccggggctgtgcccctgctggtggagagcctgacagcctgccaggacagccagtgcctgcagagcgtggtgcgggccctgaggaacctggccgacagcccccagcaccggctggccctggcccagcagggcgctgtgcggcccctggccgagctgctggccacagccccagatgctgccctgaccctggccctggtgcgggccctgctggagctgagccggggctgcagccgggcctgtgccgagcagctgagcctgggcggcggcctgggccccctggtgtccctggccagccaccccaagagagctgtgcgggagggcaccatcctgatcctggccaacctgtgtgcccagggcctcatccggcctgccctgggcaatgctgggggcgtggaggtgctggtggatgagctgcggcagaggcgggaccccaatggagccagccccaccagccagcagcccctggtgcgggctgtgtgcctgctgtgccgggaggccatcaacagagcccggctgagagatgctgggggcctggacctgctgatgggcctgctgcgggacccccgggccagcgcctggcaccccagaattgtggccgccctggtgggcttcctgtatgacaccggggccctgggccgcctgcaggccctgggcctggtgcccctgctggccggccagctgtgtggggaggccggggaggaggaggaggagggccgggaggccgcctcctgggacttccctgaggagaggaccccagagcgggcccagggcggcagcttccgcagcctgcgctcctggctgatcagcgagggctacgccaccggcccagatgacatcagcccagactggagccctgagcagtgccccccagagcccatggagcccgccagccctgcccccacccccaccagcctgcgggcccccaggacccagaggaccccaggccgcagccctgctgctgccatcgaggagccctggggccgggagggccctgccctgctgctgctgagccgcttcagccaggccccagaccccagcggggccctggtgactggacctgccctgtatggcctgctgacctacgtgactggagcccctggcccccccagcccccgggccctgcgcatcctgagccggctgacctgcaacccagcctgcctggaggcctttgtgcgctcctatggagctgccctgctgcgggcctggctggtgctgggcgtggccccagatgactggccagccccccgggcccggcccaccctgcacagccgccaccgggagctgggggagcggctgctgcagaacctgactgtgcaggccgagagccccttcggcgtgggcgccctgacccacctgctgctgagcggcagcccagaagatagagtggcctgtgccctgaccctgcccttcatctgcaggaagcccagcctgtggaggcggctgctgctggagcagggcggcctgcggctgctgctggccgccctgaccaggcctgccccccaccccctcttcctgttctttgctgctgacagcctgagctgcctgcaggacctggtgagccccaccgtgtccccagctgtgccccaggccgtgcccatggacctggacagccccagcccctgcctgtatgagcccctgctgggccctgcccctgtgcctgccccagacctgcacttcctgctggacagcggcctgcagctgcctgcccagagagctgccagcgccacagccagccccttcttccgggccctgctgagcggcagctttgctgaggcccagatggacctggtgcccctgcggggcctgagccctggggccgcctggcctgtgctgcaccacctgcacggctgccggggctgtggggccgccctgggccctgtgcccccacctggccagcccctgctgggcagcgaggccgaggaggccctggaggccgccggccgcttcctgctgcccggcctggaggaggagctggaggaggccgtgggccgcatccacctgggcccccagggcggccctgagagcgtgggggaggtgttccggctgggccggccccggctggccgcccactgtgcccgctggaccctgggcagcgagcagtgccccaggaagaggggcctggccctggtgggcctggtggaggccgccggggaggaggccggccccctgacagaggccctgctggccgtggtgatgggcatcgagctgggcgcccgggtgcctgcctag

SEQ ID NO: 107106 - DNA, 2904 bp, Artificial Sequence
  derived and/or modified sequence
atgcaccggccccacgtgcccggctgtgccgccatcaagttccgcagcctgggcagcgctgcccggtctggagctgagagcgaggcccgggccaagatggctgctgccaagcccaccctgacagacagcctgtccttctgcctggcccagctggccgctgctgctggggaggccctgggcggggagaaggaccctgccaccaatgagacccccctgagccgggccctgctggccctgcggaccaggcacatcaaggctgctgggggcatcgagcgcttccgggcccggggcggcctgcggcccctgctggccctgctgcggcgggctgctgctgctggcagcgcccccagccaggccggccctggcagcgcccccagcagcgctgccagcggggccagcagccctgccccagccagcggccctgcccccagcgctgtgagcagcagcagccccaccccacctgtgcggctgaggaagaccctggacctggccctgagcatcctggccgactgctgcacagaaggagcctgcaggacagaggtgcggcggctgggcggcatcctgcccctggtgaccatcctgcagtgcatgaagacagacagcatccagaacagaacagcccgggccctgggcaacctggccatggagcctgagagctgtggggacatccactgtgccggggctgtgcccctgctggtggagagcctgacagcctgccaggacagccagtgcctgcagagcgtggtgcgggccctgaggaacctggccgacagcccccagcaccggctggccctggcccagcagggcgctgtgcggcccctggccgagctgctggccacagccccagatgctgccctgaccctggccctggtgcgggccctgctggagctgagccggggctgcagccgggcctgtgccgagcagctgagcctgggcggcggcctgggccccctggtgtccctggccagccaccccaagagagctgtgcgggagggcaccatcctgatcctggccaacctgtgtgcccagggcctcatccggcctgccctgggcaatgctgggggcgtggaggtgctggtggatgagctgcggcagaggcgggaccccaacggggccagccccaccagccagcagcccctggtgcgggctgtgtgcctgctgtgccgggaggccatcaacagagcccggctgagagatgctgggggcctggacctgctgatgggcctgctgcgggacccccgggccagcgcctggcacccccgcatcgtggccgccctggtgggcttcctgtatgacacaggagccctgggccgcctgcaggccctgggcctggtgcccctgctggccggccagctgtgtggggaggccggggaggaggaggaggagggccgggaggccgcctcctgggacttccctgaggagaggaccccagagcgggcccagggcggcagcttccgcagcctgcgctcctggctgatcagcgagggctacgccactggaccagatgacatcagcccagactggagccctgagcagtgccccccagagcccatggagcccgccagccctgcccccacccccaccagcctgcgggcccccaggacccagaggaccccaggccgcagccctgctgctgccatcgaggagccctggggccgggagggccctgccctgctgctgctgagccgcttcagccaggccccagaccccagcggggccctggtgacaggccctgccctgtatggcctgctgacctacgtgactggagcccctggcccccccagcccccgggccctgcgcatcctgagccggctgacctgcaacccagcctgcctggaggcctttgtgcgctcctatggagctgccctgctgcgggcctggctggtgctgggcgtggccccagatgactggccagccccccgggcccggcccaccctgcacagccgccaccgggagctgggggagcggctgctgcagaacctgactgtgcaggccgagagcccctttggagtgggcgccctgacccacctgctgctgagcggcagccctgaggacagagtggcctgtgccctgaccctgcccttcatctgcaggaagcccagcctgtggaggcggctgctgctggagcagggcggcctgcggctgctgctggccgccctgaccaggcctgccccccaccccctcttcctgttctttgctgctgacagcctgagctgcctgcaggacctggtgagccccaccgtgtccccagctgtgccccaggccgtgcccatggacctggacagccccagcccctgcctgtatgagcccctgctgggccctgcccctgtgcctgccccagacctgcacttcctgctggacagcggcctgcagctgcctgcccagagagctgccagcgccacagccagccccttcttccgggccctgctgagcggcagctttgctgaggcccagatggacctggtgcccctgcggggcctgagccctggagctgcctggcctgtgctgcaccacctgcacggctgccggggctgtggggccgccctgggccctgtgcccccacctggccagcccctgctgggcagcgaggccgaggaggccctggaggccgccggccgcttcctgctgcccggcctggaggaggagctggaggaggccgtgggccgcatccacctgggcccccagggcggccctgagagcgtgggggaggtgttccggctgggccggccccggctggccgcccactgtgcccgctggaccctgggcagcgagcagtgccccaggaagaggggcctggccctggtgggcctggtggaggccgccggggaggaggccggccccctgacagaggccctgctggccgtggtgatgggcatcgagctgggcgcccgggtgcctgcctag

SEQ ID NO: 107107 - DNA, 2808 bp, Artificial Sequence
  derived and/or modified sequence
atggccgccgccaagcccaccctgaccgacagcctgagcttctgcttggcccagttggcggccgccgccggggaagcactaggaggcgaaaaggaccccgcaactaacgagacaccattgtccagggctctcctcgcattacggaccagacacatcaaggcagcgggtggcattgagcgttttagagccagaggggggttgcggcctctcctggcactcctacggagagcagccgccgcaggatccgcaccatctcaagctggcccagggtctgcaccgagctctgctgcctcaggtgctagctctccagcccccgcctccggccccgcccctagtgccgtatcgtctagtagccctacccctccagtgaggttgaggaagactttggacctcgctctcagcatactcgccgattgttgtactgagggggcatgtaggacagaggtgcgaaggttgggcggtatactaccactggtcaccattctccagtgcatgaagaccgatagcatacagaatagaaccgcgagagccctgggaaatctggctatggagcctgaatcttgtggtgacatacattgtgccggagctgtacctttgctggtagagtctttgacggcgtgccaagattctcaatgcctgcagagcgtggtgcgcgctctccgcaacttggccgattctccgcagcaccgactcgctctagctcagcagggtgcagttcgcccactggcggaactgcttgctactgcaccagacgctgccctcacccttgcgttggttagagctctcctggaactgtctagaggatgctcacgcgcctgtgcagagcagctgtccttaggtggtgggctgggacctttggtgagcttggcatcccatccaaagcgtgccgtgagggagggcacaattttaattttagccaacctgtgcgctcaggggcttatccgaccagccctcggtaacgccgggggtgtggaggtcctcgtcgatgaattgaggcaacgccgggaccctaatggcgccagtccaacctcccagcagcctcttgtgagagccgtttgccttttgtgcagggaggcgattaaccgagcccggctgcgtgatgcaggcgggcttgatttgctgatgggactgctgcgagaccctagggcctccgcatggcacccccggatcgtagctgccctggtaggttttctgtatgacaccggtgcactaggacggctgcaggcacttgggttagtgcccctcttggctggccagctgtgtggggaggctggggaggaggaggaggagggccgggaggcagctagttgggactttcccgaggagcggacccctgaaagagctcagggggggtcattcagatccctgaggagttggctgatcagcgagggctatgctacaggccccgatgacatctctccggactggtccccagagcagtgtcccccagaacctatggagcctgcttcccccgcacctactcccacaagtctgagggcgccacgcacgcaacggacccctggcagatctcctgccgctgccattgaggagccctgggggcgggaggggccagctcttttgctgttgagtagattttcccaggctcctgatccgtctggcgccctcgtgaccggccctgccctgtatggactcctgacatatgtaactggtgcacccggtccgccctctccccgggccctccgcatactctcccgccttacatgcaatccagcctgtttggaagccttcgtacggtcatacggtgccgcgctcctgcgcgcctggctcgtcctgggcgtggcacctgacgattggccagcccctcgcgctcgacccacccttcacagccggcaccgcgagctgggcgagcgcttgctgcagaacctgacggtgcaggctgaatcaccttttggagtgggcgctctcactcaccttttgctgtctggctcgccagaggatcgggtcgcatgcgccctcacactcccattcatctgtagaaaacccagcctctggagaaggctgcttctcgaacagggaggtcttcgattgttactcgctgccttgactcgccccgccccacatccgttgtttctgttctttgccgctgactccctatcatgcctccaggaccttgtaagtcccacagtttcaccagctgttccccaggcagtgcccatggatctagattccccgagcccttgcctgtatgagcctttgctcggccccgctcctgttccagcccctgaccttcatttcttgcttgattccgggctccagctccctgcgcaaagggctgcctcagctacagcatcacccttcttccgggccctgctgtcaggttccttcgctgaggcacagatggacctggtgcccctgagggggctttccccaggcgccgcatggccggtactgcaccacctgcacggatgccgcgggtgtggagccgccttgggacccgtcccgcctccaggacaaccactgctcgggtcagaggctgaggaggccctcgaagccgctggaaggttcttattgccgggcttggaggaggagctggaagaagctgtggggcgtatacaccttggccctcagggcggacccgagagcgtgggggaagtgttccggctgggtcggccccgcctggctgctcattgcgctaggtggacattaggatccgagcaatgcccccggaagcgtggcctagctctagtggggctcgtcgaagccgctggtgaggaggccggcccgctaacagaggccctcctcgctgtggttatgggaatcgagcttggggctagggtcccagcttag

SEQ ID NO: 107108 - DNA, 3093 bp, Artificial Sequence
  derived and/or modified sequence
atggtgaccctgggcgccggcgtgcggctgttcaccggcgtgtacccagtggttttaaaccaaattcgggcaaccagtgaggcatctgccataacaagaaccactatgccggctccagagttgaccagcacctcaagagccgaagacacccgcgacacaggcgtgcagctaagaaaacgcaagatcccacaggcacgccactctcgcaaacggcagcggaccttcagtttcaggagtttaggatccgcagccagatctggtgccgaatccgaagccagagccaaaatggctgccgccaagcccacactcaccgattcgctgtcattttgtctcgcccagctggctgcagctgctggagaagcgttgggaggcgagaaagaccccgccactaacgagacacccctatcccgcgctctgcttgcattgaggacacggcacattaaagctgcgggcgggatcgagcggttcagagccagagggggcctgagacccctcttagcgctgcttcgcagggcagccgcagccgggagcgctcccagtcaggctggccccggatcagccccctccagtgctgcaagtggggcttcgagtccggcaccggcgagtgggcccgccccttccgccgtgtcttcctctagccctacaccaccggttcggctgcggaagactctagacctggccttatcaatcctggcggattgttgtactgagggagcttgccggacggaagtcagacgtctggggggcattctcccattagtcacgatcctgcaatgcatgaagaccgactctattcagaatcggaccgctagggctctgggcaatctggccatggaaccagaatcttgcggcgatatccattgcgccggtgccgtgcccctgctggttgaatccctgaccgcttgccaggacagccaatgtctccaatccgtagtacgtgcacttcgcaaccttgccgacagtcctcagcacaggctcgccttagctcagcagggcgccgttagacccctcgccgaactattggctactgctcccgacgccgcactcactctggctctcgttagggctctattggagctcagccgtggatgttcccgcgcatgtgccgagcagttatctctaggtgggggtttagggcctctggtctctcttgcctcccacccaaagcgcgcggtccgcgagggcactattctgatcctcgcaaacctatgtgctcagggcctgataagacccgctctggggaacgccgggggggtggaagtcctcgttgatgagctccgacagcgccgggatccaaatggcgcttcccctacttcacaacaacccctcgtccgcgctgtttgcttgctgtgccgagaagcaataaatcgggcccgcttgagagatgcagggggcctcgaccttcttatggggctccttcgggatccccgcgcatccgcctggcaccctcgcattgttgcagcactggtcggtttcttgtatgacaccggcgccttgggtcggctccaagcattggggctggtgccactgctggctggccaactgtgtggggaggctggcgaggaggaagaagagggtcgtgaggcagctagctgggacttcccggaggaacgcacgcctgagcgagcacagggaggcagcttcaggtccctccgctcatggctgatatctgaaggatacgccactgggcccgatgatattagccctgattggtcgccagagcaatgcccccctgaacccatggagcctgcctcccctgcgccaactcctacttcgctgagagctcctcggactcagcgtaccccaggccggagtccggccgcagcgatcgaagaaccttgggggcgcgagggacctgcactgctgttgctgagccggttttcccaggctcccgatccctctggcgcgttggttacgggccccgccctgtatggcctgctaacctatgtaactggggctccgggccccccatcacctcgcgccctccgtatccttagccgtctaacctgcaatcctgcctgtctagaggcattcgtgagatcgtacggggccgccctgctccgcgcttggctggtgcttggagtggcccctgacgactggcccgccccccgcgcgcggcctactctccacagcagacatagggagctcggagagcggctgctacagaatcttacagtccaggctgagtcaccattcggggtgggggccctgacccacctcctgctctccggcagccctgaggaccgggtagcctgcgccttaactctcccttttatctgtcggaagccttcactttggcggcgacttcttctagagcagggtgggctgaggcttttactagcagctctgacgcgacccgccccacatcccctcttcctgttctttgccgcagattctctctcctgtctgcaggatctcgttagtccaacggtgtctccagctgtcccccaggctgtgccaatggacttggactcaccgtcaccctgcctgtatgagcccctgctggggcccgccccagtacctgcacccgatctgcattttcttctcgatagtggcctgcagttgccagcccagcgggccgcaagcgctaccgctagccccttcttccgcgctctcctttctggatcttttgctgaggcacagatggatctggtaccgctgcgaggcctttctccaggcgccgcatggcccgtgctgcatcatcttcatggctgcaggggctgtggtgctgcactcggacccgtacccccccctgggcagcctctgctcgggtctgaggctgaagaggcactcgaagccgctggtcgatttctgcttccagggctggaagaggaactggaagaggcagtggggcgcatccatctggggccacagggtgggcccgagtccgtgggcgaagtgtttcgtcttggacgcccgagactcgccgcccattgcgctagatggaccttgggctctgaacagtgcccacggaaacggggcctcgctctggtggggctcgttgaggccgctggtgaagaggccggacctcttactgaagccctgttggctgtcgtaatggggatagagctgggggccagggttcccgcttag

SEQ ID NO: 107109 - DNA, 2904 bp, Artificial Sequence
  derived and/or modified sequence
atgcaccggccccacgtgcccggctgcgccgccatcaagttccggagcctgggatccgcagcccgttccggcgccgaatccgaggcgcgcgctaagatggccgcagccaagcctaccctgacagattcattgtcattttgtctcgcccagctggcagcagctgctggagaggcactcggaggcgaaaaggatcctgccactaacgagacccccttatcccgcgctctgttagctttacgcacccgacatattaaggctgcgggcggtatcgaacgttttagagctcggggaggtctccggcccctgttggctctgctgcggagggccgctgctgctggatctgctccatctcaggccgggccaggcagtgctccttcttccgccgccagcggcgcatctagcccagcacctgcctcgggtccagcacctagtgccgtgtccagcagtagccctaccccacctgttcgactccgcaagactcttgaccttgccctgtcgattctggctgattgctgcacagaaggagcctgtcgcaccgaagtaaggcgcctgggcggcattctccctctcgtcaccattttgcagtgtatgaagacagattccattcagaaccgaacggcacgggcgctggggaacctcgctatggagccagaatcatgtggcgatatccattgcgcaggtgccgtacctctgcttgtggagtctttaaccgcatgccaagattcgcagtgtctccagtctgtcgtaagggcactgcgtaacctggcagattcaccacagcatcgactggcattggcacaacagggcgcggtgcgacctctagcagagctcttggctactgcgcccgacgcagctctgactttagcactggttagggctctcttagaattgtcaagaggctgtagccgggcctgtgccgagcagctgagcctgggcggtggcctggggcctttagttagtctggcgagccacccaaagagggcagtgcgcgagggaacaattctcattctggcaaacctgtgcgcccaagggctgattcgtccagctctcggcaatgccggcggggtcgaagtcctggtcgatgaactgcgtcaaaggcgagatcctaacggggcctccccgacttcacaacagcctttagtgagagccgtatgcctcctttgcagagaagcaattaatagagcgcgtctgcgcgatgccggcggactcgacctgctgatgggactgctgcgggaccctagggcaagcgcttggcatccaaggatagttgccgctttagtgggcttcctctacgatacaggggcgttggggaggttacaggccctagggctggtccctctgctcgccggacagttgtgcggcgaagcaggggaggaggaagaagagggacgtgaagcagccagctgggacttccctgaggaaagaactcccgaacgtgcccaagggggttcttttcgcagcctgcgttcttggctgatatccgaaggttatgctacaggacctgatgatattagtcccgattggagcccagagcagtgcccccctgaacctatggagccagcttcaccggctcctacaccaacctcgttaagagccccgagaacccagaggacaccaggccgttcacccgcagcagcaattgaggaaccctggggacgtgagggccccgcgttgctgctactgtcccgttttagccaggccccagaccccagtggcgctttagtcactggccctgcactgtacggattgctcacctacgttactggcgctcccggtcctcctagtccccgcgctctaagaatcctaagtaggctgacttgtaatcccgcgtgcttggaggcattcgtgcggagctacggagcggccctattacgcgcctggttagtcctgggcgtggccccggacgactggccagctccccgcgcccgccctactcttcattctcgacaccgtgagctaggagagagactgctgcagaatctcacggtgcaagcagagagcccgttcggcgtgggagctctcacccatcttctcctttctggcagccctgaggaccgggtcgcttgtgcactaaccttgccatttatctgcagaaaaccctccctatggcggaggctacttctggaacagggcggattacgtttgttgcttgccgccctgactaggcctgctccccatccgttatttctgttctttgcagctgattcactaagctgccttcaagaccttgtgagtccgacagtttcacctgccgtgcctcaggccgtgcccatggacctcgattctccctcgccttgcctgtacgagcccctgctggggcctgcaccagttcctgcacctgatctgcacttcttactggatagtgggctgcagctgcccgcacagcgggccgcgtctgccacagcatcaccattctttcgtgctttgttgtccggctcattcgccgaggcccagatggacttggtcccgcttaggggactgtctcctggcgctgcctggcccgtgctgcaccacctccacggctgtcgaggatgcggagccgctcttggcccggtgccaccccccggtcagccgctactcgggtccgaagcggaggaggcactggaggccgcaggtcggtttctcttgcccggcttggaagaggaattggaagaagctgtcggtcgcatccacctgggccctcaaggagggccggagagcgttggagaagtgttcaggctcggaagaccacgactggccgcacactgcgctcgttggacactagggtctgaacagtgcccaagaaagcggggcttggccctagttggattggtcgaggcagccggagaggaagccgggcccctaacggaggcacttctcgcagtggtgatgggaattgagttaggggcccgcgtgccagcatag

SEQ ID NO: 107110 - DNA, 2808 bp, Artificial Sequence
  derived and/or modified sequence
atggcggctgccaagccaacactcactgattcattgtctttctgtctggcacagctcgccgcagctgccggtgaggctctgggcggtgagaaggatcccgctacgaacgagacacctctgtcccgggctctactggctctgcgcacccgccatatcaaggcagccggtggaatcgaaagatttcgagccagaggtggtctgcggcctctgctggcgctccttcggagagctgctgctgcaggttctgccccttcccaggcgggacccggaagtgccccatccagcgctgcatccggggcttcctcgcccgctcctgctagcggccctgccccatcagccgttagcagctctagcccaactccaccagtgagactgcggaagacattggacctcgccctgtcaattcttgcggactgctgtaccgagggcgcatgccgaacagaagtccgaagactggggggaatactccctctggttactattctacagtgtatgaaaaccgactctatccaaaaccgcaccgctcgggctcttgggaatctagctatggagccagagtcatgtggggatatacactgcgctggggcagtgcccctccttgtggagagtctcacagcgtgccaagattcgcaatgtctgcagagtgtggtgcgggcattgcgaaacctggccgattccccccagcacagacttgcactggcccagcagggtgccgtcaggccactcgcggagctgctcgccaccgcccctgatgcagcattgacacttgccctggtgcgggcattgctggagctgagccgtggatgcagcagagcatgtgctgagcagttatccctggggggaggtctcggtcctctggtgtcactggcctcccacccgaagcgagctgtgcgtgagggcaccatactgattctcgctaacctctgtgcacaaggcctcatccgacctgctcttggaaatgccggaggcgttgaggtactggtggatgaacttcggcaacgccgagatccaaatggcgcaagcccaaccagccagcagccactcgttcgcgcagtatgtctcctgtgcagggaggcaatcaatagggccaggcttagggacgcgggaggcctggatctgctgatgggcctcctgagagatccccgtgcatcagcgtggcatccaaggatcgtcgccgctctggtcggcttcctgtacgacacgggcgctcttgggagactacaggcactggggctagtgcctcttttagccggacaactatgcggcgaagcaggagaagaagaggaagagggccgtgaggccgctagttgggacttcccagaagagagaactcccgaacgcgctcagggaggtagcttccggtcactgagaagctggctgattagcgaagggtatgccactggtcccgacgatatcagtcctgattggtccccagagcagtgcccccctgagcccatggaacctgccagcccagcgcctacccctacaagcctgcgcgctccaagaacacagcgaacaccgggacgctctccagccgcagccatcgaggaaccctggggtcgcgaaggcccagctttgttgcttttgagtcgatttagtcaggcaccagacccctccggcgctctcgtaactggacctgctctctatgggctgctgacatacgtcacgggagccccaggacctccatcaccccgagcgcttcggattttatccaggctgacttgtaaccccgcttgcctcgaggctttcgtgaggagctatggagcggcattgctaagggcctggctggtactgggggtggccccagacgattggcctgccccaagagcccgtccaaccctccattccagacaccgcgagctaggtgaacgcctgctgcagaatctgacagttcaggcagagtccccattcggagttggcgcactaacacatcttttgttgagcggctcccctgaagatagagttgcctgtgccctgactttgccatttatctgtcgcaaaccatctctgtggaggcgccttctccttgaacaagggggacttcgactgctcctcgcagccctgacacgtccagctccacatccgctttttctgtttttcgcagccgattccttaagctgtttgcaagatctggtgtcccccaccgtgtcaccggctgtaccccaggctgttcctatggacttggactcaccaagcccatgtctttatgagccactcctgggacctgccccagtccctgcgcctgaccttcactttctgctggattccggactgcagctgcctgcccagagggcggcatccgccactgctagtcctttcttccgcgcattactgagcggatcttttgcagaagcgcagatggacttggtccctctgcgaggtctctcacccggagcagcatggcccgtgctgcaccatctgcatggctgcagaggttgtggtgccgcattaggcccagtgcccccaccaggacagcctcttctggggagcgaggccgaagaggccttggaagcggctggtaggtttctgttgcccggactcgaggaggaattagaagaagcggtgggacgcattcatttaggcccacaaggagggccagaatccgtaggggaggtgttcaggctgggtagacctagactggccgctcattgcgccaggtggaccctgggatctgaacagtgccctagaaagagagggctggctctcgtggggttggtggaggcagccggagaggaagctgggcctctgactgaagctttactggcagttgtaatgggaatagaactgggcgcacgcgtcccagcctag

SEQ ID NO: 107111 - DNA, 3093 bp, Artificial Sequence
  derived and/or modified sequence
atggtcactctgggcgcaggagtgcgactgtttaccggagtgtaccctgtggtactcaaccaaatccgcgctacgagtgaagcttccgctataacgaggacaaccatgccagcacctgaactgacaagcacttctcgcgctgaagatacacgggacacaggcgtgcaactcagaaagcgcaagatcccccaggctagacactcccggaagcgacaaagaaccttcagttttagatcactgggtagtgcagcccgttcaggcgctgagagtgaggccagagccaaaatggccgcagccaaacctaccctcactgattctttgtccttttgtctagctcagttggcagctgccgctggagaggccctcggcggagagaaagacccggcaacgaacgagacacccttatccagagctctgctggcccttaggacccggcatattaaagccgctggtggtatagagaggttcagagctcggggagggctgagacctctgctggctctgcttcggagagccgcagcagcgggttccgctcccagtcaagcgggtccgggatccgcccctagttccgcagcttctggcgcttcgtccccagcccctgcttcaggaccagccccatccgctgtgtccagttcttcacccacccccccagtgcgcctccgcaagacattagatctcgcactgtccattctggccgactgttgcactgaaggggcttgccgaacagaggttaggcgcctcggaggaattcttcccctggtgactatcctgcagtgcatgaagacagactctatccagaacagaactgcccgagccctcggtaacctggcgatggaacctgagtcgtgcggagatatccattgcgccggtgctgtgcctttgttagtggagagcctcacagcatgccaggactctcagtgcttgcaatccgtggtacgtgcgctgcggaatctggccgatagcccccaacatagactggcactggctcagcaaggcgcagtacgccctttggcagagttgctcgctactgcacctgatgctgctctgacactcgctttggtacgggctcttctggaactgtcccgcggttgttcgcgcgcttgcgcagagcagctgtccttaggagggggactggggcctctggtgagcctggcctctcacccgaaacgcgcagtgcgcgagggcacaatcttgattttggctaatttgtgcgcgcaaggattaatccggcctgctctaggaaacgcaggtggggtcgaagttctggttgatgaattacggcagcgaagggaccccaacggtgcctctcccacctcacagcaacctctcgtccgggcagtgtgtcttctctgcagagaagctattaaccgcgctcggctccgcgatgctggcggtcttgacctgttaatgggacttctgagagaccccagggcctctgcctggcatcctaggatcgtcgctgctcttgtgggctttctgtacgacacaggggctttgggcagactgcaggctctgggactagtgccattactcgctgggcaattgtgcggggaagccggtgaggaagaggaggagggaagagaggcagccagttgggacttccccgaggaacgaacacccgagcgcgctcaggggggatcgtttaggagcctgcggtcttggttaatttccgaaggatatgccaccgggcctgacgatatcagccccgactggtctcctgagcagtgtccccctgagcccatggagccggcttctccagccccaactccgacttcactgcgcgctcctcggacacagcgcacccccggaaggtctccagcagctgctattgaagaaccatgggggcgagagggccctgcactcctgctgctcagccgcttctcccaggcgccagatccgtccggggcactggtgacaggacctgcactttacggcctgctgacttacgtcaccggtgctcctgggccaccttcccctcgggctctgcgtattctgagcaggcttacctgtaacccggcatgtctcgaggcattcgtcagatcgtacggtgctgcactcctgagagcttggttagtactgggagtcgctcccgatgattggcctgccccacgggctcggccaactcttcactcgcgacaccgagagctcggtgagaggcttctgcagaatctgaccgtccaggccgaaagtcctttcggcgtcggagctcttacacatctcctgctgtctggatcacccgaggacagagtcgcctgcgcacttacccttcccttcatctgtcggaagcccagcttatggcggaggttactgttggagcaggggggtcttcgtcttctcctggccgctcttacacggccagctccccacccactgttcctgttttttgcagccgatagcctatcatgcctccaagacttagtctcgccaactgtgtcccctgccgtaccacaggcagtgcctatggacctggattctccaagtccctgcctttacgagcccctacttggccctgcccctgtccccgcacccgatctgcactttttattagattcagggcttcaactgcccgcacagagggcagctagtgccacagcttccccattcttccgagccctgctttccggctctttcgccgaggctcagatggacctggtgccgctgagaggactcagcccaggtgccgcatggccagtgctgcatcatcttcatggatgtagggggtgtggcgctgcactgggccctgtaccgcctccaggccagccattattggggagcgaggcagaggaggcccttgaagcagccggtaggttcctgttgccaggcctcgaagaggagctggaggaggccgtggggcgtattcatctaggccctcagggtggcccagagtcggtgggcgaagtattccggttaggcagaccacgacttgccgctcattgtgcccgttggactttggggagcgaacagtgcccaagaaaaaggggcctagctctggtggggctggtggaggctgcaggggaggaggctgggccactgactgaagcattactggccgtagtgatgggaattgagttgggggcaagagtgccagcctag

SEQ ID NO: 107112 - DNA, 2904 bp, Artificial Sequence
  derived and/or modified sequence
atgcaccgcccacacgtgccaggatgcgctgcgatcaagttccgctctcttggttcagctgccaggtccggtgctgaaagcgaggctagagctaaaatggcagctgccaaaccaacactgacagacagcctgtcgttttgtctggcccagctcgcagcagccgctggcgaagctctcgggggagagaaggacccagcgacaaacgaaactcctctgagcagagcactcctggcactccggacccgccacattaaagcagctggcggaatcgagaggttccgcgcacgagggggattgaggccactgctggcactgcttcggcgagcagccgcagccggatcagcgccttctcaagctggcccagggtctgccccttcctctgcagctagcggagccagcagccctgctcctgcatctggcccagctccctccgctgtgagctcttctagtccgaccccccctgttcgacttaggaaaaccttggatctcgccctatccatcctagcagattgttgtacagaaggcgcttgtaggacggaggtgaggcggttgggcggtattctgccactggttactattctgcagtgcatgaagaccgattctattcaaaataggactgccagggcgctcggaaatttggccatggagcccgagtcctgtggtgatatacactgcgccggtgctgttcctctgctggtggaatcccttacagcctgccaggactcccagtgtctacagagtgtggtccgggctctaaggaacctagccgatagtcctcaacacagacttgctctggcccagcagggtgcagtgcggccattagctgaacttctggccacggcaccagatgccgctctcaccctggccctggtaagggcgctcctcgagctgtccagaggttgttctagggcctgcgccgagcagctgtccctcggcggaggactgggaccacttgtgagtcttgcctcacaccccaaaagagccgttagggagggcaccattctgatcttagctaacctgtgcgctcagggtttgattaggcccgctctgggcaacgcagggggagttgaagtgcttgtggatgagctgcggcagaggagagatcccaacggggcaagcccaacatctcagcaacctctggtccgggcagtgtgcttgttgtgccgcgaagccattaaccgcgctaggctgagagatgcgggtggactggacctcttaatgggattgctgagggacccccgtgcctccgcgtggcacccccgaattgtggctgcactggtgggatttctctatgacacaggtgcactcgggaggctgcaggctctcgggctggtccctctgttggcagggcagttatgcggagaggctggcgaggaagaggaggaaggcagggaggcagcttcttgggactttcctgaggagcgaacacccgaaagagctcaaggcggtagtttccgatcgctcagatcctggctgatttccgaaggatatgccaccggcccagatgacatcagcccagactggagccctgaacagtgccccccagagccgatggagccagcaagtcccgcacctactccgacttcgctgcgcgcacctaggacacagcggacccctggcaggagcccagcagcagccatcgaggagccctggggtcgagagggtccagctcttctcctcttatccagattctcacaggccccagatcctagtggtgcactggtgaccggcccagctttgtacggtctgctcacctacgtcaccggcgcacccggtcctcccagcccaagagcccttcggattctgtccagattgacttgcaaccccgcatgtctggaagcgtttgttcgctcttacggagcggctctcctgagagcctggctcgtgctcggggtcgcacctgatgactggcccgctccccgtgcccgtccaacattacacagtaggcatagggagctgggagagcggctgctacagaatctgacagtacaagctgaaagtcctttcggcgtcggcgctttaacgcacttgttgctaagtggtagtccagaagacagggtcgcatgcgctctcactctcccatttatatgcagaaagccgtcactctggagacggctgctgctggagcaggggggacttcggttgctgcttgcagcgctgacacggccagcacctcacccgttgttcctgttttttgctgctgattcactcagctgcctccaggaccttgtttctccgaccgtgtcacccgctgtgccccaggcagtaccaatggacctcgactccccaagtccctgcctgtatgagcccctgctcggcccagcacccgttccagctcccgacttgcactttctccttgattctggcctgcagttgcccgcacagagggcggcttccgctacagcatccccattttttagagctctgctctcgggcagtttcgccgaggcccaaatggacttggtaccccttcgaggactgtctcccggagccgcatggcctgtgctgcaccacctgcacggctgcagggggtgcggcgcagcactgggtcccgtgcccccaccaggccagccccttctgggaagtgaggcagaggaggccctggaggccgcagggcgtttcctgctacctggcttggaagaggaactggaagaggcagtgggacggatacatttaggcccacaggggggtcctgagagtgtcggcgaggtgtttaggttaggtcggcctaggctcgctgcacactgcgcccgatggacactcggatccgagcaatgtccgcgaaaaaggggactggcactggtgggcctcgttgaggctgctggtgaggaggctggacccctgacagaggctctgttagccgtggttatgggtatagagctcggcgctagggtacctgcatag

SEQ ID NO: 107113 - DNA, 3612 bp, Artificial Sequence
  derived and/or modified sequence
tcctctgaccgagcgagggctccccgtctgcggcgcggtcaggaccccgcactttcggcccggctcggggttctcggagtccgtcccaaggccgggccgcaccaccgctggggggcagcgaagcgagcctagaggagaaaaggcggtccccgccgagtgcacgccgggggcggggcacggcacgaaggctccgtggtcggacttctgggctgttcggaggccctggcccacctggagggccctggaagagtttccagcgcttcccgaggtaggcgtgagaagctcgacgcggaccacatctccctcatgcaccgcccgcacgtcccaggatgcgctgcgattaaggtactgccgcgcctcgtgtgcaaggacagacttccggggtcgagaactacaacttccgacttgcatcactgcggtggcgctaaacagcgtcagcgaggcggtgcccgacgatttccctgtcttccagttccgctccctgggatcagcggcgagaagcggggcggagtctgaggcccgagccaagatggcggctgcgaagccaaccctcacggactcgctctcgttctgcctcgcgcagctcgcggcggcggccggggaggctctgggtggggaaaaggacccagcgaccaacgagacacccctgagccgcgcgctcctagccctccgcacgcgccacatcaaggcagcggggggaatcgagcgcttccgggcacgcggcgggctccgccccctactcgcgctgctacggcgagcggctgcagcgggttccgccccgtcccaggcaggccccggctccgccccctcgtcggccgcgtcgggagcttctagccccgcccccgcgtcgggccccgccccctccgctgtgtcgtcgtctagtcctacgccgccagtgcgcctgcgcaagacgctggacttggcgctcagcatcctagccgattgctgtacggaaggggcgtgccggaccgaagtgcgcagactcggaggcatactccctttggtgaccattcttcagtgcatgaagacagacagcatccagaaccgaacggcccgtgccctggggaacttagccatggaacctgagagctgtggggacatccactgtgctggtgctgttcccctgcttgtggagagcctgacagcctgccaggactcgcagtgcctacagagcgtggtgcgtgccctccgtaacctggcagactcaccccagcaccgcctggccttggcacagcagggagcagtgcgtccgctggccgagctcctggccactgccccagatgctgcactgaccttagccctcgtccgtgccctcctggaactcagccgaggctgctcccgggcctgtgctgagcagctaagtctgggtgggggattgggcccactcgtcagcctggcttcccaccccaagcgggcagtacgcgagggaaccattctgatcctcgccaacctgtgtgcccagggcctgattcggcctgcactgggcaatgctggtggcgtggaggtgctggtagatgagctccggcagcgccgggatcctaatggagctagcccaacctcccagcagcccctggtgcgggctgtgtgcctcctatgtcgtgaggccatcaaccgggcccgactgcgggatgctggtggcttggatctactgatgggcctgctgcgggaccctcgtgcaagcgcatggcaccctcgtattgtggctgcccttgtggggtttctgtatgacactggggccctgggccggctgcaggctctgggacttgtgcctctcctggctgggcagctgtgtggtgaggctggtgaggaggaagaagagggaagagaagctgcttcctgggactttcctgaggagaggacccctgagcgggcacagggtggaagcttccggagcctcaggtcgtggctgatctccgagggctatgccacaggccctgatgacatctcccccgactggtctcctgagcagtgtccgccggagcccatggagccggccagccccgccccgaccccgacctcgctgcgggcaccacgcacccaacgcactccgggccgcagccccgccgccgccatcgaggagccttggggacgcgaagggccagccctgctgctgctgtcgcgcttttcccaggcccctgacccaagtggggcacttgtgaccggcccggcgctgtacggcctgctgacctatgtgaccggcgcaccgggcccgcccagcccacgtgcactgcgcattctgtcacgcctcacctgcaaccctgcctgcctcgaggccttcgtgcgcagctatggcgcggcgctgctgcgggcctggctggtgctgggggtggcgcctgacgattggccggcaccacgtgcccggcccactctccacagccggcaccgagagctgggggagaggctactgcagaacctgacggttcaggctgagtcgccctttggggttggggccctgacgcacctgctgctctctgggagccctgaggaccgagtggcctgcgcgctgaccctgcccttcatctgccggaagccctctctgtggcgccggctgcttctggagcagggtggtctccggctcctccttgcggcgctgacccggccggccccacacccgctcttcctcttctttgccgcggactccctttcctgcctccaagacctggtgtctcccactgtgagcccagctgtcccacaggcagtccccatggacctagactcaccttccccttgcctctatgaacctctgctgggcccagcccctgtcccagctcccgacctgcacttcctgctggactcaggcctccagctccctgcccagcgagcggcctcagccaccgcctcccctttcttccgggccctgctgtcaggcagctttgcagaagcccagatggacctggtgcccctgcgaggtctgtcgcctggtgcagcctggcctgtcctgcatcatttgcatggttgtcgggggtgtggggctgccctggggcccgtgcccccaccaggccagcccctgctgggttcagaggccgaggaggcactggaggctgctggccgtttcctactgcctgggctggaggaggagctggaagaggccgtgggccgcatccacctgggaccccagggtggcccggagtcagtgggtgaggtgttccgcctgggccggccccggctggctgcccactgtgcccgctggacactggggtcagagcagtgcccgaggaagcggggtctggccctggtggggcttgtggaggcagcaggtgaagaggcagggcccctgacggaggctttgctggctgtggtgatggggattgagttgggggcaagggtccctgcctagactgttgacgtcccctgggaaggggacccaaggatgaattggctgtgaaggatcctccctgagactggcaagggaggaggctgagcagaaggagtcatcatggaggagcggtgagaacatggaaccggactccaagatgacgatctaaagacccgggagcgagaagccaaggccaggttctgggtgtagggcccagagaagcagaacagcccagagccccaggtgcctggcctggcctagacctctggaattgagattaaacaatttggagttgg

SEQ ID NO: 107114 - DNA, 3433 bp, Artificial Sequence
  derived and/or modified sequence
gagactcttgccgcagtcccctcagcggtaaggcttttagcggtgtgagcgcgctggtgctggatcaggttggagctgacgctgaaagtcttaccacactaggcacaggcatagggccgaagcgatggtcacactcggggcaggagtacggcttttcaccggtgtgtacccagtggtgcttaaccagatcagagccacatcggaagcttctgccataacccggacaacgatgccagctcctgagctcacgagcacgtccagagcggaggacactcgggacaccggggtccagctccggaaacggaaaattccacaagcccgtcactctaggaagcggcagcgaacgttctcgttccgctccctgggatcagcggcgagaagcggggcggagtctgaggcccgagccaagatggcggctgcgaagccaaccctcacggactcgctctcgttctgcctcgcgcagctcgcggcggcggccggggaggctctgggtggggaaaaggacccagcgaccaacgagacacccctgagccgcgcgctcctagccctccgcacgcgccacatcaaggcagcggggggaatcgagcgcttccgggcacgcggcgggctccgccccctactcgcgctgctacggcgagcggctgcagcgggttccgccccgtcccaggcaggccccggctccgccccctcgtcggccgcgtcgggagcttctagccccgcccccgcgtcgggccccgccccctccgctgtgtcgtcgtctagtcctacgccgccagtgcgcctgcgcaagacgctggacttggcgctcagcatcctagccgattgctgtacggaaggggcgtgccggaccgaagtgcgcagactcggaggcatactccctttggtgaccattcttcagtgcatgaagacagacagcatccagaaccgaacggcccgtgccctggggaacttagccatggaacctgagagctgtggggacatccactgtgctggtgctgttcccctgcttgtggagagcctgacagcctgccaggactcgcagtgcctacagagcgtggtgcgtgccctccgtaacctggcagactcaccccagcaccgcctggccttggcacagcagggagcagtgcgtccgctggccgagctcctggccactgccccagatgctgcactgaccttagccctcgtccgtgccctcctggaactcagccgaggctgctcccgggcctgtgctgagcagctaagtctgggtgggggattgggcccactcgtcagcctggcttcccaccccaagcgggcagtacgcgagggaaccattctgatcctcgccaacctgtgtgcccagggcctgattcggcctgcactgggcaatgctggtggcgtggaggtgctggtagatgagctccggcagcgccgggatcctaatggagctagcccaacctcccagcagcccctggtgcgggctgtgtgcctcctatgtcgtgaggccatcaaccgggcccgactgcgggatgctggtggcttggatctactgatgggcctgctgcgggaccctcgtgcaagcgcatggcaccctcgtattgtggctgcccttgtggggtttctgtatgacactggggccctgggccggctgcaggctctgggacttgtgcctctcctggctgggcagctgtgtggtgaggctggtgaggaggaagaagagggaagagaagctgcttcctgggactttcctgaggagaggacccctgagcgggcacagggtggaagcttccggagcctcaggtcgtggctgatctccgagggctatgccacaggccctgatgacatctcccccgactggtctcctgagcagtgtccgccggagcccatggagccggccagccccgccccgaccccgacctcgctgcgggcaccacgcacccaacgcactccgggccgcagccccgccgccgccatcgaggagccttggggacgcgaagggccagccctgctgctgctgtcgcgcttttcccaggcccctgacccaagtggggcacttgtgaccggcccggcgctgtacggcctgctgacctatgtgaccggcgcaccgggcccgcccagcccacgtgcactgcgcattctgtcacgcctcacctgcaaccctgcctgcctcgaggccttcgtgcgcagctatggcgcggcgctgctgcgggcctggctggtgctgggggtggcgcctgacgattggccggcaccacgtgcccggcccactctccacagccggcaccgagagctgggggagaggctactgcagaacctgacggttcaggctgagtcgccctttggggttggggccctgacgcacctgctgctctctgggagccctgaggaccgagtggcctgcgcgctgaccctgcccttcatctgccggaagccctctctgtggcgccggctgcttctggagcagggtggtctccggctcctccttgcggcgctgacccggccggccccacacccgctcttcctcttctttgccgcggactccctttcctgcctccaagacctggtgtctcccactgtgagcccagctgtcccacaggcagtccccatggacctagactcaccttccccttgcctctatgaacctctgctgggcccagcccctgtcccagctcccgacctgcacttcctgctggactcaggcctccagctccctgcccagcgagcggcctcagccaccgcctcccctttcttccgggccctgctgtcaggcagctttgcagaagcccagatggacctggtgcccctgcgaggtctgtcgcctggtgcagcctggcctgtcctgcatcatttgcatggttgtcgggggtgtggggctgccctggggcccgtgcccccaccaggccagcccctgctgggttcagaggccgaggaggcactggaggctgctggccgtttcctactgcctgggctggaggaggagctggaagaggccgtgggccgcatccacctgggaccccagggtggcccggagtcagtgggtgaggtgttccgcctgggccggccccggctggctgcccactgtgcccgctggacactggggtcagagcagtgcccgaggaagcggggtctggccctggtggggcttgtggaggcagcaggtgaagaggcagggcccctgacggaggctttgctggctgtggtgatggggattgagttgggggcaagggtccctgcctagactgttgacgtcccctgggaaggggacccaaggatgaattggctgtgaaggatcctccctgagactggcaagggaggaggctgagcagaaggagtcatcatggaggagcggtgagaacatggaaccggactccaagatgacgatctaaagacccgggagcgagaagccaaggccaggttctgggtgtagggcccagagaagcagaacagcccagag

SEQ ID NO: 107115 - DNA, 3454 bp, Artificial Sequence
  derived and/or modified sequence
cactctaggaagcggcagcgaacgttctcggtaggtttaaccctcttcttcctctgaccgagcgagggctccccgtctgcggcgcggtcaggaccccgcactttcggcccggctcggggttctcggagtccgtcccaaggccgggccgcaccaccgctggggggcagcgaagcgagcctagaggagaaaaggcggtccccgccgagtgcacgccgggggcggggcacggcacgaaggctccgtggtcggacttctgggctgttcggaggccctggcccacctggagggccctggaagagtttccagcgcttcccgaggtaggcgtgagaagctcgacgcggaccacatctccctcatgcaccgcccgcacgtcccaggatgcgctgcgattaagttccgctccctgggatcagcggcgagaagcggggcggagtctgaggcccgagccaagatggcggctgcgaagccaaccctcacggactcgctctcgttctgcctcgcgcagctcgcggcggcggccggggaggctctgggtggggaaaaggacccagcgaccaacgagacacccctgagccgcgcgctcctagccctccgcacgcgccacatcaaggcagcggggggaatcgagcgcttccgggcacgcggcgggctccgccccctactcgcgctgctacggcgagcggctgcagcgggttccgccccgtcccaggcaggccccggctccgccccctcgtcggccgcgtcgggagcttctagccccgcccccgcgtcgggccccgccccctccgctgtgtcgtcgtctagtcctacgccgccagtgcgcctgcgcaagacgctggacttggcgctcagcatcctagccgattgctgtacggaaggggcgtgccggaccgaagtgcgcagactcggaggcatactccctttggtgaccattcttcagtgcatgaagacagacagcatccagaaccgaacggcccgtgccctggggaacttagccatggaacctgagagctgtggggacatccactgtgctggtgctgttcccctgcttgtggagagcctgacagcctgccaggactcgcagtgcctacagagcgtggtgcgtgccctccgtaacctggcagactcaccccagcaccgcctggccttggcacagcagggagcagtgcgtccgctggccgagctcctggccactgccccagatgctgcactgaccttagccctcgtccgtgccctcctggaactcagccgaggctgctcccgggcctgtgctgagcagctaagtctgggtgggggattgggcccactcgtcagcctggcttcccaccccaagcgggcagtacgcgagggaaccattctgatcctcgccaacctgtgtgcccagggcctgattcggcctgcactgggcaatgctggtggcgtggaggtgctggtagatgagctccggcagcgccgggatcctaatggagctagcccaacctcccagcagcccctggtgcgggctgtgtgcctcctatgtcgtgaggccatcaaccgggcccgactgcgggatgctggtggcttggatctactgatgggcctgctgcgggaccctcgtgcaagcgcatggcaccctcgtattgtggctgcccttgtggggtttctgtatgacactggggccctgggccggctgcaggctctgggacttgtgcctctcctggctgggcagctgtgtggtgaggctggtgaggaggaagaagagggaagagaagctgcttcctgggactttcctgaggagaggacccctgagcgggcacagggtggaagcttccggagcctcaggtcgtggctgatctccgagggctatgccacaggccctgatgacatctcccccgactggtctcctgagcagtgtccgccggagcccatggagccggccagccccgccccgaccccgacctcgctgcgggcaccacgcacccaacgcactccgggccgcagccccgccgccgccatcgaggagccttggggacgcgaagggccagccctgctgctgctgtcgcgcttttcccaggcccctgacccaagtggggcacttgtgaccggcccggcgctgtacggcctgctgacctatgtgaccggcgcaccgggcccgcccagcccacgtgcactgcgcattctgtcacgcctcacctgcaaccctgcctgcctcgaggccttcgtgcgcagctatggcgcggcgctgctgcgggcctggctggtgctgggggtggcgcctgacgattggccggcaccacgtgcccggcccactctccacagccggcaccgagagctgggggagaggctactgcagaacctgacggttcaggctgagtcgccctttggggttggggccctgacgcacctgctgctctctgggagccctgaggaccgagtggcctgcgcgctgaccctgcccttcatctgccggaagccctctctgtggcgccggctgcttctggagcagggtggtctccggctcctccttgcggcgctgacccggccggccccacacccgctcttcctcttctttgccgcggactccctttcctgcctccaagacctggtgtctcccactgtgagcccagctgtcccacaggcagtccccatggacctagactcaccttccccttgcctctatgaacctctgctgggcccagcccctgtcccagctcccgacctgcacttcctgctggactcaggcctccagctccctgcccagcgagcggcctcagccaccgcctcccctttcttccgggccctgctgtcaggcagctttgcagaagcccagatggacctggtgcccctgcgaggtctgtcgcctggtgcagcctggcctgtcctgcatcatttgcatggttgtcgggggtgtggggctgccctggggcccgtgcccccaccaggccagcccctgctgggttcagaggccgaggaggcactggaggctgctggccgtttcctactgcctgggctggaggaggagctggaagaggccgtgggccgcatccacctgggaccccagggtggcccggagtcagtgggtgaggtgttccgcctgggccggccccggctggctgcccactgtgcccgctggacactggggtcagagcagtgcccgaggaagcggggtctggccctggtggggcttgtggaggcagcaggtgaagaggcagggcccctgacggaggctttgctggctgtggtgatggggattgagttgggggcaagggtccctgcctagactgttgacgtcccctgggaaggggacccaaggatgaattggctgtgaaggatcctccctgagactggcaagggaggaggctgagcagaaggagtcatcatggaggagcggtgagaacatggaaccggactccaagatgacgatctaaagacccgggagcgagaagccaaggccaggttctgggtgtagggccca

SEQ ID NO: 107116 - protein, 495 aa, Artificial Sequence
  derived and/or modified sequence
MVKQLENGEINIEELKKNLEYTASLLEAVYIDETRQILDTEDELQELRSDAVPSEVRDWLASTFTQQARAKGRRAEEKPKFRSIVHAVQAGIFVERMFRRTYTSVGPTYSTAVLNCLKNLDLWCFDVFSLNQAADDHALRTIVFELLTRHNLISRFKIPTVFLMSFLDALETGYGKYKNPYHNQIHAADVTQTVHCFLLRTGMVHCLSEIELLAIIFAAAIHDYEHTGTTNSFHIQTKSECAIVYNDRSVLENHHISSVFRLMQDDEMNIFINLTKDEFVELRALVIEMVLATDMSCHFQQVKTMKTALQQLERIDKPKALSLLLHAADISHPTKQWLVHSRWTKALMEEFFRQGDKEAELGLPFSPLCDRTSTLVAQSQIGFIDFIVEPTFSVLTDVAEKSVQPLADEDSKSKNQPSFQWRQPSLDVEVGDPNPDVVSFRSTWVKRIQENKQKWKERAASGITNQMSIDELSPCEEEAPPSPAEDEHNQNGNLD

SEQ ID NO: 107117 - DNA, 1488 bp, Artificial Sequence
  derived and/or modified sequence
atggtgaagcagctagaaaacggcgaaattaacattgaggagctgaagaaaaacctggaatataccgcctccctgttagaagcagtgtacattgatgaaaccaggcaaatcctggatacggaagatgaactccaggagcttcggagcgacgctgtcccgtccgaggtccgtgactggctcgcatctacctttacccagcaagctcgagcgaagggaagaagagccgaggaaaaacctaagtttcggagcatagtgcacgcagtgcaagccggaattttcgtggaacgtatgttcagacgcacctatacatctgtcggacccacctattctacagcggtgttgaattgcctgaagaatctcgatctttggtgctttgacgttttcagcctgaatcaggccgctgacgaccatgcactgcgcaccatcgtgttcgagttgctcacccgccataacctgatatcaaggtttaaaataccaacagtttttttgatgtcctttctagacgcgctggagacagggtacggaaaatacaagaatccctaccataatcaaatccatgctgcagacgtgacacagactgtccactgcttccttctgcgcactgggatggttcattgtctcagcgagattgaactcctggcaatcatcttcgctgccgccattcacgactacgaacatacgggtaccaccaacagctttcatattcagaccaagtctgagtgcgccattgtgtacaatgacagatccgtccttgaaaatcatcacatttcaagcgtgttcagattgatgcaggacgatgagatgaacatatttattaatctgacaaaagatgagtttgtcgagctgcgcgcactggtgatagagatggtgttagcaactgatatgtcctgccatttccagcaggtgaagacaatgaaaaccgcactccaacagcttgaaagaatcgataaacccaaagccctctcactgctgctccacgccgcagatatctcccacccgactaagcagtggctggtgcattcgcggtggaccaaagcacttatggaggagttctttaggcaaggcgacaaggaggcggaactgggactccctttttctccgctctgcgatcgtacaagcactctcgtcgctcagtcccagattggattcatagacttcatcgtggagcctacgttctcagtactcacagacgttgctgaaaaaagtgtgcaaccacttgcagacgaagattccaagtcaaaaaaccagccgagcttccaatggcggcaaccctccctggatgtagaagtgggtgatccaaacccggacgtggtaagctttagatctacatgggtcaagagaatccaagagaacaagcagaagtggaaagagagagctgcctctggaatcacgaatcagatgtccatcgacgagctgagtccttgcgaagaggaagctcctcccagccccgccgaagacgagcacaatcaaaatggcaatctcgactag

SEQ ID NO: 107118 - DNA, 1488 bp, Artificial Sequence
  derived and/or modified sequence
atggtgaagcagctggagaatggagagatcaacatcgaggagctgaagaagaacctggagtacacagccagcctgctggaggccgtgtacattgatgagacccggcagatcctggacacagaagatgagctgcaggagctgcggagtgatgctgtgcccagcgaggtgcgggactggctggccagcaccttcacccagcaggcccgggccaagggcagaagagctgaggagaagcccaagttccgcagcatcgtgcatgctgtgcaggccggcatctttgtggagaggatgttccggaggacctacacctctgtgggccccacctacagcacagctgtgctgaactgcctgaagaacctggacctgtggtgctttgatgtgttcagcctgaaccaggccgcagatgaccacgccctgcggaccatcgtgtttgagctgctgaccaggcacaacctgatcagccgcttcaagatccccaccgtcttcctgatgtccttcctggatgccctggagaccggctacggcaagtacaagaacccctaccacaaccagatccatgctgctgatgtgacccagacagtgcactgcttcctgctgaggacaggcatggtgcactgcctgtctgaaattgagctgctggccatcatctttgctgctgccatccatgactatgagcacacaggcaccaccaacagcttccacatccagaccaagtcagaatgtgccatcgtgtacaatgacagatctgtgctggagaaccaccacatcagcagcgtcttccggctgatgcaggatgatgagatgaacatcttcatcaacctgaccaaggatgaatttgtggagctgcgggccctggtgattgagatggtgctggccacagacatgagctgccacttccagcaggtgaagaccatgaagacagccctgcagcagctggagagaattgacaagcccaaggccctgagcctgctgctgcatgctgctgacatcagccaccccaccaagcagtggctggtgcacagccgctggaccaaggccctgatggaggagttcttccggcagggcgacaaggaggccgagctgggcctgcccttcagccccctgtgtgacaggaccagcaccctggtggcccagagccagatcggcttcatcgacttcatcgtggagcccaccttctctgtgctgacagatgtggccgagaagtctgtgcagcccctggctgatgaggacagcaagagcaagaaccagcccagcttccagtggaggcagcccagcctggatgtggaggtgggggaccccaacccagatgtggtgtccttccgcagcacctgggtgaagaggatccaggagaacaagcagaagtggaaggagagagctgccagcggcatcaccaaccagatgagcattgatgagctgagcccctgtgaggaggaggccccacccagccctgcagaagatgagcacaaccagaatggaaacctggactag

SEQ ID NO: 107119 - DNA, 1488 bp, Artificial Sequence
  derived and/or modified sequence
atggtgaagcagctggagaacggcgagatcaacatcgaggagctgaaaaagaacctggagtatacagcctccttgcttgaggcagtgtacattgatgaaacgcgccaaatcctggacaccgaggacgagttacaggaactgcggagtgatgcagtgccatccgaagtgagagattggctagcctctacatttacccagcaggcccgcgccaaaggaagaagagcagaggagaaaccaaagtttcgctcgattgtgcatgctgtgcaggcaggcatatttgttgagcggatgtttcgccgcacgtatacctccgtgggaccaacatacagcactgcagtgctgaattgcctgaagaacctcgacctgtggtgttttgacgtgttcagcttgaaccaggccgcagatgaccacgccctgaggacaatagtgtttgagctgctgacaagacataacctcatttctcgattcaagatccctacggtgtttttaatgtctttcctggacgcgttagagacaggttacggcaaatacaagaatccctatcacaatcagatccacgccgctgatgtgacccagacggttcactgcttcctgttacggactggtatggtccactgcctttccgaaatcgagctccttgctattatcttcgctgccgcgattcacgattatgaacacactggtacaacgaacagcttccacatccaaaccaaaagtgaatgcgctattgtgtacaacgaccgctccgttctcgagaaccaccatatcagtagcgtctttcgcttaatgcaggacgacgaaatgaacatcttcattaacctaacaaaagacgaatttgtggagcttcgggcactcgtcattgaaatggtgctagcaaccgatatgagctgccatttccagcaagtgaaaacaatgaaaactgctctgcagcagctggagaggatcgacaagcccaaggccctctcccttctgctgcacgctgccgacatttcccaccccactaagcaatggctggtacactcccgctggacaaaagctctgatggaggagttcttccggcaaggggataaagaggccgagttggggctacccttcagcccgctctgtgacagaacgtccacacttgtcgcccagagtcaaattggattcatcgacttcattgttgaacccaccttctctgtattgaccgatgttgcagagaagtcagtacagcctctggctgatgaagacagcaagtccaaaaaccagccttctttccagtggagacagccgtcacttgatgtggaggtgggagacccaaatccggacgtggtttcctttagaagcacatgggtcaagcgaattcaggagaacaaacagaagtggaaggaacgggctgcctctggtatcacaaaccaaatgtcaattgacgagcttagcccttgcgaagaagaggctccgccatctcccgcagaagacgagcataatcaaaatggcaatctggactag

SEQ ID NO: 107120 - DNA, 1488 bp, Artificial Sequence
  derived and/or modified sequence
atggtgaaacaattggagaacggggaaatcaacattgaggagctgaagaagaatttggaatatactgcttccctgctggaggccgtctatatagatgaaaccagacagattctcgacactgaagacgagctccaggaactaaggtcagacgcagttccatcagaggtgcgagactggctggcctccacattcacacagcaggcccgagctaaaggtaggagagcggaagagaaaccgaaatttagatccatcgtgcatgcagtccaggccggtatttttgtcgagcggatgtttcggcgaacttatacctctgtggggccaacttacagcactgcggtgcttaactgtctgaaaaatctggacctctggtgctttgacgttttctccttaaaccaggctgccgacgaccatgccctccgaacaattgttttcgagctcttaacgagacacaacctgattagccggttcaagatcccgacggtctttcttatgtctttccttgacgcactggaaactggctacgggaaatataagaacccttaccacaaccaaatccacgccgctgacgtgactcagacagtccactgcttcctgcttagaaccggcatggtccactgcctcagcgaaatcgagctgcttgccattatatttgccgctgccatccacgactacgaacacaccggaactacaaactccttccacattcagaccaaaagtgaatgtgcgatagtgtataacgaccggagcgtcctggagaaccaccacataagctccgtctttagactcatgcaggacgacgagatgaacattttcataaacttaacgaaggacgagttcgtggaactacgtgctctggtgattgagatggtgttagctacggacatgagttgtcacttccagcaggtgaagactatgaaaaccgccctacaacaacttgagcggattgacaaacccaaggctctgtccctgctacttcacgcagccgatatttctcatccaaccaaacagtggctggtgcactcgcggtggacgaaagccctgatggaagagttcttccgccagggagataaggaggcagagctcggcctgccattttcccccttgtgcgatcgaactagtacactggtcgctcagtcacagatcggctttattgatttcattgtggagcccaccttttcggtgctgactgacgttgccgagaagtcggtccaaccactggccgatgaggattccaaaagcaagaatcaacctagcttccagtggcggcaaccgagtcttgatgttgaggtgggtgaccctaacccagacgtggtgagtttccgttccacatgggttaagagaatccaagaaaacaaacagaaatggaaggagcgtgccgcaagcggcattactaatcagatgagtatcgatgagctaagcccttgtgaggaagaagctcccccttcgcccgcagaggatgagcacaaccagaacgggaatctcgactag

SEQ ID NO: 107121 - DNA, 1488 bp, Artificial Sequence
  derived and/or modified sequence
atggtgaagcagctggagaacggcgagatcaacatcgaggagctgaagaagaacctggagtacaccgccagcctgctggaggccgtgtacatcgacgagaccagacagatcctggacaccgaggacgagctgcaggagctgagaagcgacgccgtgcccagcgaggtgagagactggctggccagcaccttcacccagcaggccagagccaagggcagaagagccgaggagaagcccaagttcagaagcatcgtgcacgccgtgcaggccggcatcttcgtggagagaatgttcagaagaacctacaccagcgtgggccccacctacagcaccgccgtgctgaactgcctgaagaacctggacctgtggtgcttcgacgtgttcagcctgaaccaggccgccgacgaccacgccctgagaaccatcgtgttcgagctgctgaccagacacaacctgatcagcagattcaagatccccaccgtgttcctgatgagcttcctggacgccctggagaccggctacggcaagtacaagaacccctaccacaaccagatccacgccgccgacgtgacccagaccgtgcactgcttcctgctgagaaccggcatggtgcactgcctgagcgagatcgagctgctggccatcatcttcgccgccgccatccacgactacgagcacaccggcaccaccaacagcttccacatccagaccaagagcgagtgcgccatcgtgtacaacgacagaagcgtgctggagaaccaccacatcagcagcgtgttcagactgatgcaggacgacgagatgaacatcttcatcaacctgaccaaggacgagttcgtggagctgagagccctggtgatcgagatggtgctggccaccgacatgagctgccacttccagcaggtgaagaccatgaagaccgccctgcagcagctggagagaatcgacaagcccaaggccctgagcctgctgctgcacgccgccgacatcagccaccccaccaagcagtggctggtgcacagcagatggaccaaggccctgatggaggagttcttcagacagggcgacaaggaggccgagctgggcctgcccttcagccccctgtgcgacagaaccagcaccctggtggcccagagccagatcggcttcatcgacttcatcgtggagcccaccttcagcgtgctgaccgacgtggccgagaagagcgtgcagcccctggccgacgaggacagcaagagcaagaaccagcccagcttccagtggagacagcccagcctggacgtggaggtgggcgaccccaaccccgacgtggtgagcttcagaagcacctgggtgaagagaatccaggagaacaagcagaagtggaaggagagagccgccagcggcatcaccaaccagatgagcatcgacgagctgagcccctgcgaggaggaggccccccccagccccgccgaggacgagcacaaccagaacggcaacctggactag

SEQ ID NO: 107122 - protein, 1486 aa, Artificial Sequence
  derived and/or modified sequence
MAYSWQTDPNPNESHEKQYEHQEFLFVNQPHSSSQVSLGFDQIVDEISGKIPHYESEIDENTFFVPTAPKWDSTGHSLNEAHQISLNEFTSKSRELSWHQVSKAPAIGFSPSVLPKPQNTNKECSWGSPIGKHHGADDSRFSILAPSFTSLDKINLEKELENENHNYHIGFESSIPPTNSSFSSDFMPKEENKRSGHVNIVEPSLMLLKGSLQPGMWESTWQKNIESIGCSIQLVEVPQSSNTSLASFCNKVKKIRERYHAADVNFNSGKIWSTTTAFPYQLFSKTKFNIHIFIDNSTQPLHFMPCANYLVKDLIAEILHFCTNDQLLPKDHILSVCGSEEFLQNDHCLGSHKMFQKDKSVIQLHLQKSREAPGKLSRKHEEDHSQFYLNQLLEFMHIWKVSRQCLLTLIRKYDFHLKYLLKTQENVYNIIEEVKKICSVLGCVETKQITDAVNELSLILQRKGENFYQSSETSAKGLIEKVTTELSTSIYQLINVYCNSFYADFQPVNVPRCTSYLNPGLPSHLSFTVYAAHNIPETWVHSYKAFSFTCWLTYAGKKLCQVRNYRNIPDKKLFFFLVNWNETINFPLEIKSLPRESMLTVKLFGIACATNNANLLAWTCLPLFPKEKSILGSMLFSMTLQSEPPVEMITPGVWDVSQPSPVTLQIDFPATGWEYMKPDSEENRSNLEEPLKECIKHIARLSQKQTPLLLSEEKKRYLWFYRFYCNNENCSLPLVLGSAPGWDERTVSEMHTILRRWTFSQPLEALGLLTSSFPDQEIRKVAVQQLDNLLNDELLEYLPQLVQAVKFEWNLESPLVQLLLHRSLQSIQVAHRLYWLLKNAENEAYFKSWYQKLLAALQFCAGKALNDEFSKEQKLIKILGDIGERVKSASDHQRQEVLKKEIGRLEEFFQDVNTCHLPLNPALCIKGIDHDACSYFTSNALPLKITFINANPMGKNISIIFKAGDDLRQDMLVLQLIQVMDNIWLQEGLDMQMIIYRCLSTGKDQGLVQMVPDAVTLAKIHRHSGLIGPLKENTIKKWFSQHNHLKADYEKALRNFFYSCAGWCVVTFILGVCDRHNDNIMLTKSGHMFHIDFGKFLGHAQTFGGIKRDRAPFIFTSEMEYFITEGGKNPQHFQDFVELCCRAYNIIRKHSQLLLNLLEMMLYAGLPELSGIQDLKYVYNNLRPQDTDLEATSHFTKKIKESLECFPVKLNNLIHTLAQMSAISPAKSTSQTFPQESCLLSTTRSIERATILGFSKKSSNLYLIQVTHSNNETSLTEKSFEQFSKLHSQLQKQFASLTLPEFPHWWHLPFTNSDHRRFRDLNHYMEQILNVSHEVTNSDCVLSFFLSEAVQQTVEESSPVYLGEKFPDKKPKVQLVISYEDVKLTILVKHMKNIHLPDGSAPSAHVEFYLLPYPSEVRRRKTKSVPKCTDPTYNEIVVYDEVTELQGHVLMLIVKSKTVFVGAINIRLCSVPLDKEKWYPLGNSII

SEQ ID NO: 107123 - DNA, 4461 bp, Artificial Sequence
  derived and/or modified sequence
atggcgtacagctggcagactgatcccaatccgaatgagagccacgagaaacagtacgagcaccaggagttcttgttcgtgaatcaaccccactcgtcttcccaagtgtccctggggttcgatcaaatcgtcgatgaaatatcgggaaaaatcccccactacgagtcggagatcgacgagaatacattcttcgtacctaccgcccccaagtgggacagcacagggcattccctgaatgaggcgcatcagatttcccttaatgagttcacatcaaagtccagggagcttagttggcatcaggtcagcaaagccccagcaattggcttcagtccatcggtgttgcctaaaccccagaataccaataaagaatgcagctggggctcaccaattggcaagcaccacggcgcagacgacagtcgcttctcgattctcgccccctcatttacatcactcgacaaaataaacctcgaaaaggaactggaaaacgaaaatcataactaccatatcggttttgaatcgtcaatccctccaacgaactcatcattttcctctgattttatgcctaaggaggaaaataagcgcagtggccatgtcaacattgtggaaccgtcacttatgctgttaaaagggagtcttcagccaggcatgtgggaatccacatggcagaaaaacattgaatcaattgggtgttctatccagctcgtggaggtgccccagtcctctaatacatccctggccagcttttgtaataaagtgaagaaaataagggagcggtatcacgccgctgacgtgaattttaatagcggtaagatttggtctaccaccactgcctttccttatcagctattctcgaagactaagtttaatattcatatctttattgataatagcacccagcccctgcacttcatgccctgtgctaattatctcgtgaaagatctaattgccgagattcttcatttttgcactaatgatcagttgctcccaaaggaccacatcttgagtgtgtgtggatctgaggaattcctgcaaaacgatcactgcctgggatctcataagatgtttcaaaaagacaaaagcgtcattcagctccatcttcagaaatctagagaggctcccggtaaattgtccagaaaacacgaggaagatcattcacagttctatctgaatcagcttctggagtttatgcacatctggaaagtgagcaggcagtgcctccttacgttgattcggaaatacgattttcatttgaaatacctcctgaagacgcaagagaacgtgtataacataatcgaagaggtcaaaaagatttgtagtgtacttggctgcgtggagaccaagcagatcacagacgctgtcaacgaactctcactgattctgcagcgcaagggggaaaacttctaccaatcatcggagacatcagctaagggtctaattgagaaggtgactacagaactgagcacgtctatataccagctcataaatgtttattgtaactccttttatgcagacttccagcctgtgaatgtgccaaggtgcacctcctatttgaatcctggtctgccgagtcacctctcctttacagtgtacgccgctcataatattcctgaaacttgggtccattcatacaaggccttcagttttacgtgttggctaacctacgcggggaagaagctatgtcaggtacgcaactatcgcaatattccggacaagaagctcttcttttttctggtgaattggaacgagacaataaacttcccactcgaaataaagtccctccccagggagtccatgctcactgtgaagctctttggtatcgcctgtgccaccaacaatgcgaacctgctggcctggacctgtttgcccctgttccccaaggagaaatctatcctgggatccatgttattctcaatgacactgcaatccgagccgcccgtggagatgatcaccccaggcgtttgggatgtgtcgcagccctcacctgttactttgcagattgactttcccgctacggggtgggagtacatgaaacctgattccgaagaaaataggtctaacctggaggaacctctaaaggagtgcatcaagcacatagcacgattgagccagaaacaaacacctttactcctttccgaggagaagaagagatacctctggttctaccggttttattgtaataacgagaattgttctcttcccctggtattgggttccgcccccggatgggacgaacgcaccgtgagtgagatgcatacaatcctgagacgctggactttcagccaacccctagaggccctcggtctgttgaccagctccttccctgaccaagagatccgcaaagttgccgtacagcagttggacaacttgttaaatgatgagctgcttgagtacttgccacagctagtgcaggcagttaagttcgagtggaatttggagtcacccttggtccagttactactccacagaagcctacaaagcatccaggttgcccacaggttgtattggcttctcaagaacgctgagaatgaagcatatttcaaaagctggtaccaaaagctgctcgctgctcttcagttctgcgcgggaaaggccctgaatgatgagttttccaaggagcagaagctgatcaagattctcggagacatcggagaaagagtaaaatccgcctccgatcaccaacggcaggaagtgcttaagaaggagatcggaaggctagaagaattcttccaggatgtgaacacatgccatctcccccttaacccagccctttgtatcaagggtatcgaccatgacgcctgctcatacttcacatcaaacgccttgccactcaagatcacatttatcaatgctaaccctatgggaaagaatatcagtatcattttcaaagccggggacgacctcaggcaggatatgctcgtgcttcagctgatacaagtgatggacaatatatggctccaggagggcctggacatgcaaatgatcatctacagatgcctctccaccggaaaggatcaaggactcgtacaaatggttcctgacgctgtgacattagccaaaatccataggcacagtgggttaataggacctttaaaggagaatacaataaaaaagtggttttcgcagcataatcatcttaaagccgattacgagaaggctttaaggaactttttttacagctgtgccggatggtgtgtggttactttcatcctgggcgtttgtgaccggcataacgacaatattatgctgacaaaatcagggcacatgtttcatattgacttcgggaaattcctggggcacgcccaaacatttggaggcattaaacgcgacagggcaccttttatctttacaagtgagatggagtatttcattactgaaggaggcaagaacccccagcatttccaagatttcgtggagctttgttgccgtgcctataatatcattagaaagcattctcagttactactgaatctgctggagatgatgctctacgctggactgccggagttatcaggaatccaggacctcaagtacgtctataataatttaaggccccaggacactgatttggaggctacatcgcacttcaccaagaagatcaaggagtctctagaatgcttccctgttaagctcaacaacttaattcacaccctggcccaaatgagtgcaattagccccgcgaagtccacatcacagacatttcctcaagaaagttgtcttctgtctacaacacggagcatcgagcgggccactatcctgggattcagtaaaaagtcatcaaacctttacctgatacaggtcacccacagcaataatgagacctccctgactgagaagtctttcgagcagttttcgaagctgcactcccagctgcagaaacagtttgcatcactgaccttgccagagttccctcactggtggcatctgcctttcaccaattccgatcaccgaagattcagggatcttaaccattacatggagcagatccttaatgtctctcacgaggttacgaacagcgattgtgtcttatcatttttcctgagcgaagcggtgcaacagaccgtggaggaatctagccccgtttacctcggcgaaaagtttccagataaaaaacctaaggtccagctggtgataagctacgaagatgtgaagttgacaatcctggttaagcatatgaaaaatatccatttgccagacggttccgcccctagcgcccacgtggagttctacctgcttccatacccttccgaggtcagaagaagaaaaacgaaatccgtgcctaaatgtacagacccaacatacaatgaaattgtggtgtatgatgaggttactgaactccagggtcacgttctgatgctcatagtcaaaagtaagactgttttcgttggggccatcaacatccgtttgtgctccgtgcccttggataaggaaaaatggtatccactggggaatagcatcatctag

SEQ ID NO: 107124 - DNA, 4461 bp, Artificial Sequence
  derived and/or modified sequence
atggcctacagctggcagacagaccccaaccccaatgaaagccatgagaagcagtatgagcaccaggagttcctgtttgtgaaccagccccacagcagcagccaggtgtccctgggctttgaccagatcgtggatgagatcagcggcaagatcccccactatgagagcgagattgatgagaacaccttctttgtgcccacagcccccaagtgggacagcacaggccacagcctgaatgaggcccaccagatcagcctgaatgagttcaccagcaagagccgggagctgtcctggcaccaggtgtccaaggccccagccatcggcttcagccccagcgtgctgcccaagccccagaacaccaacaaggaatgttcctggggcagccccatcggcaagcaccacggggctgatgacagccgcttcagcatcctggcccccagcttcaccagcctggacaagatcaacctggagaaggagctggagaatgaaaaccacaactaccacatcggctttgagagcagcatcccccccaccaacagcagcttcagcagtgacttcatgcccaaggaggagaacaagaggagcggccacgtgaacatcgtggagcccagcctgatgctgctgaagggcagcctgcagcccggcatgtgggagagcacctggcagaagaacatcgagagcatcggctgcagcatccagctggtggaggtgccccagagcagcaacaccagcctggccagcttctgcaacaaggtgaagaagatccgggagcgctaccacgccgcagatgtgaacttcaacagcggcaagatctggagcaccaccacagccttcccctaccagctgttcagcaagaccaagttcaacatccacatcttcatcgacaacagcacccagcccctgcacttcatgccctgtgccaactacctggtgaaggacctgattgctgagatcctgcacttctgcaccaatgaccagctgctgcccaaggaccacatcctgtctgtgtgtggcagcgaggagttcctgcagaatgaccactgcctgggcagccacaagatgttccagaaggacaagagcgtcatccagctgcacctgcagaagagccgggaggcccctgggaagctgagcaggaagcatgaggaggaccacagccagttctacctgaaccagctgctggagttcatgcacatctggaaggtgtcccggcagtgcctgctgaccctcatcagaaaatatgacttccacctgaagtacctgctgaagacccaggagaatgtgtacaacatcatcgaggaggtgaagaagatctgcagcgtgctgggctgtgtggagaccaagcagatcacagatgctgtgaatgagctgagcctcatcctgcagaggaaaggagagaacttctaccagagcagcgagaccagcgccaagggcctgattgagaaggtgaccacagagctgagcaccagcatctaccagctgatcaacgtgtactgcaacagcttctatgctgacttccagcctgtgaatgtgccccgctgcaccagctacctgaaccctggcctgcccagccacctgtccttcaccgtgtatgctgcccacaacatccctgagacctgggtgcacagctacaaggccttctccttcacctgctggctgacctacgccggcaagaagctgtgccaggtgaggaactacagaaacatcccagacaagaagctgttcttcttcctggtgaactggaatgagaccatcaacttccccctggagatcaagagcctgccccgggagagcatgctgactgtgaagctgtttggcatcgcctgtgccaccaacaatgccaacctgctggcctggacctgcctgcccctcttccccaaggagaagagcatcctgggctccatgctgttctccatgaccctgcagagcgagccccctgtggagatgatcaccccaggagtgtgggatgtgtcccagcccagccctgtgaccctgcagattgacttccctgccaccggctgggagtacatgaagccagacagcgaggagaacagaagcaacctggaggagcccctgaaggagtgcatcaagcacatcgcccggctgagccagaagcagacccccctgctgctgtctgaggagaagaagcgctacctgtggttctaccgcttctactgcaacaatgaaaactgcagcctgcccctggtgctgggcagcgcccctggctgggatgagaggacagtgtctgagatgcacaccatcctgcggcgctggaccttcagccagcccctggaggccctgggcctgctgaccagcagcttcccagaccaggagatcaggaaggtggccgtgcagcagctggacaacctgctgaatgatgagctgctggagtacctgccccagctggtgcaggccgtgaagtttgagtggaacctggagagccccctggtgcagctgctgctgcacaggagcctgcagagcatccaggtggcccaccggctgtactggctgctgaagaatgcagaaaatgaggcctacttcaagtcctggtaccagaagctgctggccgccctgcagttctgtgccggcaaggccctgaatgatgagttcagcaaggagcagaagctgatcaagatcctgggggacatcggggagcgggtgaagagcgccagtgaccaccagaggcaggaggtgctgaagaaggagatcggccgcctggaggagttcttccaggatgtgaacacctgccacctgcccctgaacccagccctgtgcatcaagggcatcgaccatgatgcctgcagctacttcaccagcaatgccctgcccctgaagatcaccttcatcaatgccaaccccatgggcaagaacatcagcatcatcttcaaggctggagatgacctgcggcaggacatgctggtgctgcagctgatccaggtgatggacaacatctggctgcaggagggcctggacatgcagatgatcatctaccgctgcctgagcacaggcaaggaccagggcctggtgcagatggtgcctgatgctgtgaccctggccaagatccaccgccacagcggcctgattggccccctgaaggagaacaccatcaagaagtggttcagccagcacaaccacctgaaggctgactatgagaaggccctgaggaacttcttctacagctgtgccggctggtgtgtggtgaccttcatcctgggcgtgtgtgacagacacaatgacaacatcatgctgaccaagagcggccacatgttccacatcgactttgggaagttcctgggccacgcccagacctttggaggcatcaagagggaccgggcccccttcatcttcaccagcgagatggagtacttcatcacagagggcggcaagaacccccagcacttccaggactttgtggagctgtgctgccgggcctacaacatcatcaggaagcacagccagctgctgctgaacctgctggagatgatgctgtatgccggcctgcctgagctgagcggcatccaggacctgaagtatgtgtacaacaacctgcggccccaggacacagacctggaggccaccagccacttcaccaagaagatcaaggagagcctggagtgcttccctgtgaagctgaacaacctgatccacaccctggcccagatgtctgccatcagccctgccaagagcaccagccagaccttcccccaggagagctgcctgctgagcaccaccaggagcattgaaagagccaccatcctgggcttcagcaagaagagcagcaacctgtacctgatccaggtgacccacagcaacaatgagaccagcctgacagagaagagctttgagcagttcagcaagctgcacagccagctgcagaagcagtttgccagcctgaccctgcctgagttcccccactggtggcacctgcccttcaccaacagcgaccaccggcgcttccgggacctgaaccactacatggagcagatcctgaatgtgtcccatgaggtgaccaacagcgactgtgtgctgtccttcttcctgtctgaggccgtgcagcagacagtggaggagagcagccctgtgtacctgggggagaagttcccagacaagaagcccaaggtgcagctggtgatctcctatgaagatgtgaagctgaccatcctggtgaagcacatgaagaacatccacctgcctgatggcagcgcccccagcgcccacgtggagttctacctgctgccctaccccagcgaggtgagaagaaggaagaccaagtctgtgcccaagtgcacagaccccacctacaatgagatcgtggtgtatgatgaggtgacagagctgcagggccacgtgctgatgctgattgtgaagagcaagacagtgtttgtgggcgccatcaacatccggctgtgcagcgtgcccctggacaaggagaagtggtaccccctgggcaacagcatcatctag

SEQ ID NO: 107125 - DNA, 4461 bp, Artificial Sequence
  derived and/or modified sequence
atggcctacagctggcagaccgaccccaaccccaacgagagccacgagaagcagtatgagcatcaagagttcctgtttgtgaaccagccccattcatctagtcaggtttcccttggctttgaccagatcgtggatgaaatttccgggaagataccacactatgagtctgaaatcgatgagaataccttcttcgtcccgacagcacccaaatgggatagtactgggcatagcctgaacgaggcccaccaaatctccctcaacgaatttaccagtaagtcccgggaactatcttggcatcaggtgtcaaaagcacctgctattggtttttctcctagtgtcctgcctaaaccccagaatacgaacaaggagtgttcttgggggagcccaatcggaaagcatcacggggccgacgatagtcggttctcaatcttagcaccttcatttacttctcttgataaaatcaacctagaaaaagagttagagaatgaaaaccacaattaccatataggcttcgaaagttcaataccgcccaccaactcttccttcagtagcgacttcatgcccaaggaagagaacaaaagatctggacatgtcaatatcgtggagcctagtctgatgctgttaaaagggtcactgcagccaggcatgtgggagtcaacctggcagaagaatattgaaagcatagggtgttctatccagctggtcgaggttcctcaaagttcaaatacctcactcgctagcttctgtaacaaggtcaaaaagatacgggagaggtaccacgccgcagatgtcaacttcaattccggcaaaatttggtctactacgacagcgtttccctaccaacttttctctaagacaaaattcaacattcatattttcattgacaatagcacccagcctttacacttcatgccctgcgctaactacctggtaaaggaccttatagccgagattctgcatttctgtactaacgaccagctcctcccaaaggaccacattctctctgtgtgtggatctgaggagttcctgcagaacgaccactgcctggggtcacataaaatgttccaaaaagacaagagcgtaatccaactccatctacaaaagagcagagaggcgccaggcaagctctccaggaaacatgaggaggaccactcacagttttatcttaaccagttgttagagttcatgcacatttggaaagtgtcacgccaatgtcttcttaccctgatcaggaaatatgacttccatcttaaatatctgctcaagacacaggagaacgtgtataatatcattgaggaagtgaaaaagatctgctccgttttgggatgcgttgagactaagcaaataacagatgccgtgaatgagctgagtctgatcctccaaaggaaaggcgaaaacttctatcagtcctcggagacctccgcaaagggcctgatagagaaggtcacaaccgaactgtctacctctatctaccagctgattaacgtgtactgtaactccttttacgccgattttcagcctgtcaatgtgccaaggtgtacatcatacttgaacccgggcttaccatcacatttgtccttcactgtctatgctgcccacaacatcccagagacctgggtgcattcttacaaggcattcagcttcacatgttggctcacctatgctggtaagaaactttgccaggtacgaaactaccggaatataccggataagaagttgttctttttcttggtgaattggaacgaaaccattaacttccccctagaaatcaagtctttacccagagagagcatgttgacagttaagctttttgggatcgcttgcgcgacgaacaatgcgaatctattggcctggacttgtctacctctgtttccgaaggaaaagtctattctgggtagtatgctgtttagtatgaccttacagtccgagcctccagtcgaaatgattacgccaggcgtatgggatgtttcacaaccaagcccagtgaccctgcagatcgactttcctgcaactgggtgggagtatatgaagcccgactccgaagagaatcggtcaaatctcgaggagcccctcaaggagtgtatcaaacacatagctagactatcacagaaacagactcctctgctgctcagcgaggagaaaaagagatacctgtggttttacaggttttactgtaacaatgagaattgttcgcttcctctggttcttgggtctgcacccggctgggacgagagaactgtaagcgagatgcacaccatcctgcggcgctggacatttagtcagccacttgaagcgctcggactgcttacaagttcctttcccgatcaggagatcagaaaggtcgctgttcaacagctcgacaatttactgaatgatgagttgctcgagtatctgcctcagctggttcaagcagtcaagttcgaatggaatcttgaatccccgctggtccagctgctcctgcatagatctctgcaatccattcaagtagcacaccgactctattggctgctcaagaacgccgaaaacgaagcttattttaaaagctggtaccagaagcttctggcagccctgcaattttgcgccggtaaagctctgaacgacgagttttccaaagaacagaaattgatcaaaatcttgggggacataggcgaacgcgtaaaatcggcctcggatcaccaaaggcaggaggtgctgaaaaaagaaattggacgcctcgaggagttttttcaggatgtgaacacttgtcatttacctctgaatcccgcgttgtgtataaaaggtatcgatcatgacgcatgctcctacttcacatctaatgccttacccctgaagataaccttcatcaatgctaatcctatgggcaaaaatatatctattatcttcaaggcaggcgacgatctcaggcaagacatgctggtgttgcaactcatccaggtgatggacaatatttggctacaagaaggcttggatatgcaaatgatcatttaccggtgcctgtctacagggaaagatcaggggctggttcagatggtccccgatgctgtgaccctcgcaaagattcacaggcactctgggctgattggtcctttgaaggagaacacaattaaaaagtggttcagtcagcacaaccatctaaaggctgattacgagaaagcacttagaaatttcttttactcttgcgccgggtggtgtgtggtgacatttatactgggcgtctgcgatcgccataatgataatataatgcttacaaagagtggtcacatgttccatatcgattttggtaaattcctcgggcacgctcagacatttggaggcatcaagcgtgacagagctccctttatttttacaagcgagatggagtacttcatcactgagggaggaaaaaatcctcaacactttcaggatttcgttgagctatgctgtcgcgcttataatattatccggaagcacagccagctgctattaaatctactggaaatgatgctgtacgcgggacttccagaactttctggcatccaagatctgaaatacgtttataataacctgaggcctcaggacacggacctggaggcaacaagccacttcactaagaagattaaagagagtttagagtgttttcctgtgaagctgaataatttgattcatacactcgctcagatgagtgccattagtcccgctaagagtacaagtcagacattcccccaggaatcttgcttgctaagtacaaccaggtctattgaaagagccacaatattgggatttagcaaaaaaagcagcaatctttacctgatccaggttacccatagcaataacgagactagcctgacagagaagagttttgagcagttttctaaactgcattctcagcttcaaaagcagttcgcgagtctgactctgcctgagtttcctcattggtggcatctgcccttcacaaactcagatcatagaagatttagagatttaaaccactatatggaacagatactcaacgtatcccacgaggttaccaactccgattgtgtgctttcctttttcttgtcggaggccgttcagcagacagtggaagagtcctcccctgtgtatttaggcgaaaagtttccagacaagaaacctaaggttcagctggtgatctcttacgaagatgtcaagctgaccatccttgtgaaacacatgaaaaacattcatttgcccgacgggtctgccccctcagcccacgtggaattttacctgctcccgtacccctcagaagtgagaagaagaaaaacaaaaagtgtgcccaaatgtacagacccgacatataacgaaattgtggtgtacgacgaggtcactgagctgcaggggcacgtcctgatgctgatcgtgaagtcaaagacagtgtttgtgggtgctatcaacattaggctgtgctccgttcccctggataaagagaagtggtatcccctcggtaacagcatcatatag

SEQ ID NO: 107126 - DNA, 4566 bp, Artificial Sequence
  derived and/or modified sequence
ggagcagagtcaaccctctcagttacataaaataaaaaatggcatattcttggcaaacggatccaaatcctaatgaatcacacgaaaagcagtatgaacaccaagaatttctctttgtaaatcaaccccattcttctagccaagtcagtctgggttttgatcagatagtagatgagatcagtggcaaaattccacactacgagagtgaaattgatgaaaacaccttttttgtgcccactgcaccaaaatgggactcaacagggcattcattaaatgaagcacaccaaatatccttgaatgaattcacttctaaaagccgtgaactctcctggcatcaagttagcaaagcaccagcaattggttttagtccttctgtgttaccaaaacctcaaaatacgaataaagaatgctcctggggaagccccataggaaaacatcatggtgctgatgattccagattcagtattttagctccatcattcacaagtttggataaaattaatctagagaaagaattagaaaatgaaaatcataactaccatataggatttgaaagtagcattcctccaacaaattcatccttctcaagtgacttcatgccgaaagaagagaataaaaggagtggacatgtgaacattgtggaaccatctttgatgcttttgaaaggctctcttcaacccggaatgtgggaaagtacatggcagaagaatatagagtcaataggttgttccattcagctagtggaagtacctcaaagcagcaatacgagtctggcctctttttgcaacaaagtaaaaaaaatcagagaaagatatcatgcagctgatgttaatttcaattctgggaagatctggagcactactacagcatttccgtatcagctcttttctaagaccaagtttaatatacatatttttattgataactcaacacaacctcttcattttatgccatgtgctaattatcttgtcaaagatctaattgcagaaattctgcatttttgcacaaatgaccagctactccccaaagatcatattctaagtgtatgtggctctgaagaatttttacaaaacgaccactgtttggggagccacaaaatgtttcaaaaagataaatctgttattcagctccacctgcagaaaagtagggaagctccaggaaagctatctcgaaagcatgaagaggaccacagtcagttttatctgaatcaacttctagaatttatgcatatttggaaagtatccagacaatgtctcttaacactcatcagaaaatatgacttccacctgaaatacctattgaaaacccaggaaaacgtgtataatattattgaagaagttaaaaaaatatgcagtgttctagggtgtgtggaaaccaaacaaattacagatgcagtaaatgaactaagtctaattcttcagagaaaaggagagaatttttatcaaagttcagagacttcagcaaaaggcttgatagagaaggtaacaactgaactatccacatccatctaccagctaatcaatgtctactgtaacagcttttatgcagattttcagcctgtaaatgtacctagatgcacttcctatctaaatcccgggcttccttcccacctcagcttcacagtgtatgcagcacacaacattccagaaacctgggtgcacagctacaaagcgttttcttttacctgttggcttacatatgctggaaagaagctgtgccaagtgagaaactacagaaatattccagacaagaaattattttttttcttggtcaactggaatgaaacgatcaattttccccttgaaataaagtcacttccaagggaatccatgctcactgtaaaactgtttgggattgcctgtgcaaccaacaatgcaaatttactggcgtggacttgtcttccactgtttccaaaagaaaaatccattctcgggtctatgctgttcagcatgacattacagagtgagcctcccgtagaaatgataactccaggagtgtgggatgtaagtcagccatccccggtgaccctgcagattgattttccagctactgggtgggagtatatgaaacctgattctgaagagaatagaagtaatcttgaagagccactaaaggagtgtataaaacatattgccagactttcacagaaacagactcccctactactctctgaagaaaagaaaagatatttatggttttatcgcttctactgcaataatgaaaactgctcccttcctttagtcctgggtagtgcccctggatgggatgaaaggactgtttcagaaatgcataccattttgagaagatggacattttctcaacctttagaggctcttgggcttttgacttccagttttccagatcaagaaattcgtaaagtggcagttcaacaattagacaacctcttgaatgatgaactactggaatatctcccacagctagttcaggctgtcaagtttgaatggaaccttgagagtcctttagtgcaacttctactccaccgctccttgcagagcatccaggttgcccatcgtctttactggctgctaaaaaatgcagaaaatgaagcttattttaaaagctggtatcagaagctactagctgctctccaattctgtgcaggtaaagccttgaatgatgagttttccaaggagcagaaacttatcaaaattctgggagatattggggaaagagtcaagtctgccagtgaccatcaaagacaggaggtactgaagaaagaaattggcagactagaagagttctttcaagatgtaaatacttgtcatcttcctctgaaccctgccctatgtataaaagggattgatcacgatgcatgttcatattttacatctaatgctttgccattgaagattactttcatcaatgctaatccgatgggcaaaaacatcagcattatttttaaggctggagatgatcttcgtcaggatatgcttgttctgcagcttattcaagtgatggacaatatttggctgcaggaaggcttggatatgcaaatgatcatttatagatgtctatccacaggaaaagaccaaggattggtgcagatggtacctgatgctgtgaccctagcaaagattcatcgccattctggactgataggaccattgaaagaaaatacaattaaaaagtggttcagtcagcacaaccacttaaaggcagattatgaaaaggccttgaggaactttttctactcctgtgctggctggtgtgtggtaacattcatcctgggagtatgtgaccgtcacaatgataatatcatgctgacaaagtcgggccacatgtttcatattgactttggaaaattcttaggtcatgcacaaacatttggagggataaaaagggaccgagctcctttcatttttacttcagagatggaatactttattacagagggtgggaaaaacccacagcattttcaagattttgtggaactttgctgtcgtgcttataatattatcagaaagcacagccaactgctcttgaacctgctggaaatgatgctgtatgcaggactgcctgagctaagtggaattcaagacctgaaatatgtgtataataatcttcgtccacaagacacagacctggaagcaacaagtcattttaccaagaaaataaaggaaagtctggagtgtttccctgttaaattgaataacttgatccacacacttgcacaaatgtcagccataagccctgccaaatctacttcacagacttttcctcaggaatcctgtttgctgagtacaactaggtcgattgaaagagcaacaattttagggttcagcaagaaatccagtaatctgtatctgatccaggtgacacacagcaacaacgaaacaagcctgacagaaaaatcatttgagcagttttcaaaacttcacagccaacttcagaagcagtttgcatcactgactctcccagagtttcctcattggtggcacctaccttttacaaattcagatcacagaagattcagagatctaaatcattacatggaacagatattaaatgtatcacatgaagttacaaacagtgattgtgtacttagctttttcctctctgaggctgtgcaacaaacagttgaagaatcatcacctgtgtacctaggtgagaagtttccagacaagaagcctaaggtgcagttagtcatatcctacgaggatgtgaagctgaccatactagtgaaacacatgaaaaacattcatctcccagatggctctgcgcccagtgcacatgttgaattttatcttttaccatatcccagtgaagttcgtaggaggaaaacaaaatctgttccaaaatgtacggaccccacttacaatgaaattgtagtatatgatgaagtcacagagctccaaggacatgtcttaatgcttattgtgaagagtaaaactgtatttgtgggagcaattaacatccgactctgtagtgtcccactcgataaagaaaaatggtatccattaggaaacagtataatttgaccattgctatgaacatatgcattattcattaactacttgtatttttttcacttctgggcctctgaat

SEQ ID NO: 107127 - DNA, 4461 bp, Artificial Sequence
  derived and/or modified sequence
atggcttattcctggcaaactgaccccaatccaaacgagtcacacgagaaacagtacgaacaccaggagttcctttttgtcaatcagccgcatagcagcagccaagtcagtctaggcttcgatcagattgtagacgagattagtggcaagatcccacattatgagagtgaaatcgacgagaacaccttctttgtaccaacagcccctaagtgggacagtaccggccacagcctgaacgaggcacaccaaattagcctgaatgagttcactagcaaaagccgggagctcagctggcatcaggttagcaaggctcctgccatcgggttcagtccttctgtgctcccaaagcctcagaacactaacaaggaatgctcttggggatcacctataggaaaacaccatggagctgatgactctcggttcagtatcctggcaccgtcctttacctctcttgataagatcaatctcgaaaaagagctagaaaacgaaaatcacaattatcacataggattcgaatcgtccattccacctaccaatagctccttctccagcgacttcatgcctaaggaggagaacaaacgcagtggtcacgttaatatcgtggagccatctctgatgctgttgaaggggtctctccaaccgggaatgtgggagtcaacctggcaaaagaatatcgagagcattggctgctccatccagctcgtcgaggtcccccagagtagtaacacttcactggcttcattttgcaacaaagtgaaaaagatcagggagaggtaccacgcagccgatgttaactttaactcaggcaagatctggagtaccacgactgcattcccctaccagttattttccaagaccaaatttaatatccacatcttcattgacaatagcacccagccccttcacttcatgccatgcgccaattacctggtgaaggacctcatcgcagaaatcctccacttttgtaccaatgaccagctgctgccaaaagaccacattctcagcgtatgtggctccgaggagttcctgcagaatgaccactgtctgggcagccacaaaatgttccaaaaggataaaagcgtgatccaactgcatttgcagaaatccagggaagcacctggcaagctcagtcgaaaacacgaagaggatcactcccaattctacctcaaccagctgctggagtttatgcacatctggaaggtaagccggcaatgcctattgactcttattcgcaagtacgatttccatctgaagtacctgctgaagactcaggaaaatgtctacaacataatcgaagaagtgaaaaagatctgtagcgtccttggatgtgtagaaacaaaacaaataacagacgccgtgaacgaactttcactgatcctccaacggaaaggcgagaatttttatcagtcatctgagacctcagctaaaggtctgattgaaaaggtaacaacagaattgagtactagcatttatcaactgatcaatgtttactgcaatagcttttatgccgacttccaaccggtaaacgtccctaggtgcacctcctatttaaatcccggtcttccttcccatctttcatttaccgtgtacgccgcacataacattcctgagacttgggttcactcttacaaagcattctccttcacctgttggttaacatacgccggtaagaagctgtgtcaggtgaggaactacaggaatatccctgacaaaaaattgttcttttttttagtcaattggaacgaaactatcaatttcccacttgagatcaaatccctccccagggagagcatgctgacagtgaaactatttgggatcgcatgtgccacaaacaatgctaacttgttggcatggacttgcctgcctctgtttcccaaggagaagtccattctgggatctatgctgtttagcatgaccctgcaatccgaaccccctgtggaaatgatcacccccggagtgtgggacgtctcccaaccttctcccgttacacttcagatcgattttcccgcaactgggtgggaatacatgaaacctgacagcgaagaaaatcgctctaacctcgaggagcccctgaaggaatgcattaagcatatcgcccgacttagtcaaaagcagacccctctgctcctgagtgaggaaaaaaaacggtatctctggttttaccgcttttattgcaacaacgagaactgctccctgcctcttgtgctgggctctgcgcctgggtgggacgagcggacggtgtctgagatgcatactatcctgcgcaggtggacttttagccaacctctggaggcattaggtctccttaccagcagttttcccgaccaggaaattcgcaaggtggcggtacaacagttggataatctcctcaatgatgaactgttagagtacttgccacaactggtgcaggctgtgaaatttgagtggaatcttgaatctcccctggttcagctgctgctacatcggagcctacagtcaattcaggttgcccatagattgtactggttattaaagaatgctgagaacgaagcctactttaagtcgtggtaccagaaactgctggccgctcttcagttttgcgctggtaaggcacttaatgatgaattttctaaagagcagaagctgattaagatcttgggtgatatcggcgagcgcgtaaagagcgcttccgatcaccagcgacaggaagtgctgaagaaggagatcggcagacttgaagaattctttcaggacgtcaacacatgccacctgccactgaacccagcactttgtataaaaggcattgatcacgacgcctgcagctacttcacatcaaacgcactacctctgaaaatcacctttattaacgccaaccccatgggaaaaaacatttcgatcatatttaaagctggggatgatttgcgccaggatatgctggttctgcagctgatacaggtgatggacaatatatggctacaagagggtctggacatgcagatgatcatatatcggtgcctcagtacaggcaaggatcaaggacttgttcaaatggtgccagatgcagtcacacttgccaaaatccatcgccattcaggactgattgggcctctgaaagaaaatacaatcaaaaagtggtttagccagcacaatcatctcaaggctgactacgagaaagcactgcggaactttttctactcttgcgccggttggtgcgtggtaacctttattcttggcgtctgcgatagacataacgataatatcatgctgacaaaatcaggccatatgttccacatcgattttggcaaatttctggggcatgcgcagaccttcgggggaataaagagagatagagcaccctttattttcacatccgaaatggagtacttcataactgaggggggaaagaatccacagcatttccaggattttgtcgagctctgctgtcgggcttataacataatacggaagcactcgcaactcttactgaatttgctcgagatgatgctgtacgccggtctgcctgaattgagcggcattcaggacctcaagtatgtctacaacaacctcaggccacaggatactgatctcgaagcgacttcccatttcactaagaagatcaaggagagcctggagtgttttccagtaaaattgaacaatctgatccataccctggcccaaatgtccgctatttcaccggcaaagtcaacctcacagacctttccccaggagagttgcctgctctccacaactagatctattgagcgagcgactatcctgggcttctccaagaaatcctccaacctgtacctgatccaggtgacacactctaacaacgagacatccctgactgagaagagcttcgagcagttttccaaactgcacagccagctccagaagcagttcgcctcactgactctgcccgaattcccgcactggtggcacttaccattcaccaattcggatcatcgtcgctttagagacctgaaccactacatggagcagatactgaacgtgtcccatgaggttacaaattccgactgcgtactgtcttttttcctcagcgaagctgtgcagcagacagtggaagagagcagtcctgtgtatctgggtgaaaagttccctgacaaaaagcccaaagtgcagttggtcatatcctatgaagatgtcaagctcaccattctggtgaagcatatgaaaaacatacatctgcccgatggttcagccccatcggcccacgtggaattctacctattgccttacccaagcgaagttagacgtcgaaagactaagtctgtccccaaatgcacagatcctacttacaacgagatcgtcgtttacgacgaggtcaccgagcttcagggccacgtgctcatgctgattgtgaaaagcaaaaccgtctttgtcggcgctataaacatcagactctgttctgtacctctggataaagaaaaatggtatccccttggcaattccattatctag

SEQ ID NO: 107128 - DNA, 4461 bp, Artificial Sequence
  derived and/or modified sequence
atggcctacagctggcagaccgaccccaaccccaacgagagccacgagaagcagtacgagcaccaggagttcctgttcgtgaaccagccccacagcagcagccaggtgagcctgggcttcgaccagatcgtggacgagatcagcggcaagatcccccactacgagagcgagatcgacgagaacaccttcttcgtgcccaccgcccccaagtgggacagcaccggccacagcctgaacgaggcccaccagatcagcctgaacgagttcaccagcaagagcagagagctgagctggcaccaggtgagcaaggcccccgccatcggcttcagccccagcgtgctgcccaagccccagaacaccaacaaggagtgcagctggggcagccccatcggcaagcaccacggcgccgacgacagcagattcagcatcctggcccccagcttcaccagcctggacaagatcaacctggagaaggagctggagaacgagaaccacaactaccacatcggcttcgagagcagcatcccccccaccaacagcagcttcagcagcgacttcatgcccaaggaggagaacaagagaagcggccacgtgaacatcgtggagcccagcctgatgctgctgaagggcagcctgcagcccggcatgtgggagagcacctggcagaagaacatcgagagcatcggctgcagcatccagctggtggaggtgccccagagcagcaacaccagcctggccagcttctgcaacaaggtgaagaagatcagagagagataccacgccgccgacgtgaacttcaacagcggcaagatctggagcaccaccaccgccttcccctaccagctgttcagcaagaccaagttcaacatccacatcttcatcgacaacagcacccagcccctgcacttcatgccctgcgccaactacctggtgaaggacctgatcgccgagatcctgcacttctgcaccaacgaccagctgctgcccaaggaccacatcctgagcgtgtgcggcagcgaggagttcctgcagaacgaccactgcctgggcagccacaagatgttccagaaggacaagagcgtgatccagctgcacctgcagaagagcagagaggcccccggcaagctgagcagaaagcacgaggaggaccacagccagttctacctgaaccagctgctggagttcatgcacatctggaaggtgagcagacagtgcctgctgaccctgatcagaaagtacgacttccacctgaagtacctgctgaagacccaggagaacgtgtacaacatcatcgaggaggtgaagaagatctgcagcgtgctgggctgcgtggagaccaagcagatcaccgacgccgtgaacgagctgagcctgatcctgcagagaaagggcgagaacttctaccagagcagcgagaccagcgccaagggcctgatcgagaaggtgaccaccgagctgagcaccagcatctaccagctgatcaacgtgtactgcaacagcttctacgccgacttccagcccgtgaacgtgcccagatgcaccagctacctgaaccccggcctgcccagccacctgagcttcaccgtgtacgccgcccacaacatccccgagacctgggtgcacagctacaaggccttcagcttcacctgctggctgacctacgccggcaagaagctgtgccaggtgagaaactacagaaacatccccgacaagaagctgttcttcttcctggtgaactggaacgagaccatcaacttccccctggagatcaagagcctgcccagagagagcatgctgaccgtgaagctgttcggcatcgcctgcgccaccaacaacgccaacctgctggcctggacctgcctgcccctgttccccaaggagaagagcatcctgggcagcatgctgttcagcatgaccctgcagagcgagccccccgtggagatgatcacccccggcgtgtgggacgtgagccagcccagccccgtgaccctgcagatcgacttccccgccaccggctgggagtacatgaagcccgacagcgaggagaacagaagcaacctggaggagcccctgaaggagtgcatcaagcacatcgccagactgagccagaagcagacccccctgctgctgagcgaggagaagaagagatacctgtggttctacagattctactgcaacaacgagaactgcagcctgcccctggtgctgggcagcgcccccggctgggacgagagaaccgtgagcgagatgcacaccatcctgagaagatggaccttcagccagcccctggaggccctgggcctgctgaccagcagcttccccgaccaggagatcagaaaggtggccgtgcagcagctggacaacctgctgaacgacgagctgctggagtacctgccccagctggtgcaggccgtgaagttcgagtggaacctggagagccccctggtgcagctgctgctgcacagaagcctgcagagcatccaggtggcccacagactgtactggctgctgaagaacgccgagaacgaggcctacttcaagagctggtaccagaagctgctggccgccctgcagttctgcgccggcaaggccctgaacgacgagttcagcaaggagcagaagctgatcaagatcctgggcgacatcggcgagagagtgaagagcgccagcgaccaccagagacaggaggtgctgaagaaggagatcggcagactggaggagttcttccaggacgtgaacacctgccacctgcccctgaaccccgccctgtgcatcaagggcatcgaccacgacgcctgcagctacttcaccagcaacgccctgcccctgaagatcaccttcatcaacgccaaccccatgggcaagaacatcagcatcatcttcaaggccggcgacgacctgagacaggacatgctggtgctgcagctgatccaggtgatggacaacatctggctgcaggagggcctggacatgcagatgatcatctacagatgcctgagcaccggcaaggaccagggcctggtgcagatggtgcccgacgccgtgaccctggccaagatccacagacacagcggcctgatcggccccctgaaggagaacaccatcaagaagtggttcagccagcacaaccacctgaaggccgactacgagaaggccctgagaaacttcttctacagctgcgccggctggtgcgtggtgaccttcatcctgggcgtgtgcgacagacacaacgacaacatcatgctgaccaagagcggccacatgttccacatcgacttcggcaagttcctgggccacgcccagaccttcggcggcatcaagagagacagagcccccttcatcttcaccagcgagatggagtacttcatcaccgagggcggcaagaacccccagcacttccaggacttcgtggagctgtgctgcagagcctacaacatcatcagaaagcacagccagctgctgctgaacctgctggagatgatgctgtacgccggcctgcccgagctgagcggcatccaggacctgaagtacgtgtacaacaacctgagaccccaggacaccgacctggaggccaccagccacttcaccaagaagatcaaggagagcctggagtgcttccccgtgaagctgaacaacctgatccacaccctggcccagatgagcgccatcagccccgccaagagcaccagccagaccttcccccaggagagctgcctgctgagcaccaccagaagcatcgagagagccaccatcctgggcttcagcaagaagagcagcaacctgtacctgatccaggtgacccacagcaacaacgagaccagcctgaccgagaagagcttcgagcagttcagcaagctgcacagccagctgcagaagcagttcgccagcctgaccctgcccgagttcccccactggtggcacctgcccttcaccaacagcgaccacagaagattcagagacctgaaccactacatggagcagatcctgaacgtgagccacgaggtgaccaacagcgactgcgtgctgagcttcttcctgagcgaggccgtgcagcagaccgtggaggagagcagccccgtgtacctgggcgagaagttccccgacaagaagcccaaggtgcagctggtgatcagctacgaggacgtgaagctgaccatcctggtgaagcacatgaagaacatccacctgcccgacggcagcgcccccagcgcccacgtggagttctacctgctgccctaccccagcgaggtgagaagaagaaagaccaagagcgtgcccaagtgcaccgaccccacctacaacgagatcgtggtgtacgacgaggtgaccgagctgcagggccacgtgctgatgctgatcgtgaagagcaagaccgtgttcgtgggcgccatcaacatcagactgtgcagcgtgcccctggacaaggagaagtggtaccccctgggcaacagcatcatctag

SEQ ID NO: 107129 - protein, 220 aa, Artificial Sequence
  derived and/or modified sequence
MDSSLPECRHIGKGIRAKVERNFLFSRDLKAGLPRPSKPGKERIPEPALGATVLISAAPFFVLFLIPVESNSPRHRSLLQILLSFASGGLLGDAFLHLIPHALEPHSHHTLEQPGHGHSHSGQGPILSVGLWVLSGIVAFLVVEKFVRHVKGGHGHSHGHGHAHSHTRGSHGHGRQERSTKEKQSSEEEEKETRGVQKRRGGSTVPKDGPVRPQNAEEEK

SEQ ID NO: 107130 - protein, 374 aa, Artificial Sequence
  derived and/or modified sequence
MARGLGAPHWVAVGLLTWATLGLLVAGLGGHDDLHDDLQEDFHGHSHSADLSSSIFCPLPYPRGVELSPASLSTSDLAQFCFRWAPGRCFLHLIPHALEPHSHHTLEQPGHGHSHSGQGPILSVGLWVLSGIVAFLVVEKFVRHVKGGHGHSHGHGHAHSHTRGSHGHGRQERSTKEKQSSEEEEKETRGVQKRRGGSTVPKDGPVRPQNAEEEKRGLDLRVSGYLNLAADLAHNFTDGLAIGASFRGGRGLGILTTMTVLLHEVPHEVGDFAILVQSGCSKKQAMRLQLLTAVGALAGTACALLTEGGAVGSEIAGGAGPGWVLPFTAGGFIYVATVSVLPELLREASPLQSLLEVLGLLGGVIMMVLIAHLE

SEQ ID NO: 107131 - DNA, 1125 bp, Artificial Sequence
  derived and/or modified sequence
atggccaggggactcggtgcgccgcactgggtcgccgtcggcctgctgacttgggcaacgctcgggctgctcgttgccggattgggcgggcacgatgacctccatgacgatctgcaggaagattttcatggtcactcacacagtgccgacctgtcttcttctatattttgtcctctcccttacccacgaggagttgaactgagccctgcaagcctatccaccagcgatcttgcccagttctgcttcagatgggccccaggtcgctgttttctccatcttattccccatgccctggagcctcattcacaccataccctcgaacagcccggtcatgggcacagccactctggacagggccccattctgtccgtcgggctgtgggtgttgtccggcatcgtcgcatttctggtcgttgaaaagttcgtgcggcacgtcaaaggcggccacggtcacagtcacggacacggacatgcacattctcacacacgcggatcccacggacatggcagacaggaacgatcaacaaaagagaagcagagctcagaggaggaggagaaggaaacaagaggagtgcaaaagcgacgggggggctctaccgtgcccaaggacggacccgtgcgtccccagaacgctgaagaagaaaaaagagggctcgacttgcgcgtatccggatatctgaatctggcagccgacctggctcacaattttactgatggcctggcaattggggcatcttttcgtggagggcgtggtttggggatactgaccaccatgacggtcctgctccacgaggtgccacatgaggtaggagattttgcaatactcgtgcagtcaggctgcagtaagaaacaagcaatgagactacagttactaacagccgtcggtgcactagccggcaccgcttgcgctctgctgacagaaggtggagcagtgggttccgagattgccggtggtgcaggcccaggttgggtcctgcctttcacggctgggggtttcatctacgttgccactgtgagcgtcctccccgaacttcttcgggaggcctctccactgcaaagtctgctggaggtgttgggcctgctaggaggggtgatcatgatggtgctcattgctcacctagagtag

SEQ ID NO: 107132 - DNA, 1125 bp, Artificial Sequence
  derived and/or modified sequence
atggcccggggtctaggcgcacctcattgggtggccgtggggctcctaacatgggccactctagggttactcgtcgcaggacttggtggccatgatgatcttcatgatgatcttcaggaggacttccatgggcactcacatagtgcagatctaagcagctctatcttttgcccactgccatatcctaggggcgtggaactctctcctgccagcctgtccacaagcgacttggcgcagttttgctttaggtgggctcccggtaggtgtttcctccacctgataccacacgccctggagccccattcccatcacacattggaacagccaggacacggccactcacactcgggtcaagggcccatcttgagcgtaggcctgtgggttctgtctggcatagtcgcatttctcgttgtggaaaaattcgtgaggcacgtgaagggaggccacgggcatagtcacggacatgggcatgctcactcacatacccggggttctcatggccatgggcgtcaggagaggtcaactaaagaaaaacagagcagcgaagaggaggaaaaggagacccgcggtgtgcagaagcgtcggggaggctccaccgtgccaaaggacggacctgttcggcctcagaacgccgaggaagaaaaaaggggactggacctacgagtgagtggctatcttaatctcgctgcggacttggctcataattttactgatggtttggctatcggcgcctcattcagagggggaagaggccttggaattttgacaactatgacagtgctcctgcacgaggtgccccatgaagtcggagacttcgcaattcttgtccagtccggatgctccaagaaacaagctatgcggctccagttgctgaccgctgttggagcactggctggcactgcttgcgccctgctgaccgaggggggtgccgttggctctgagatcgccggtggtgccggccctggttgggtcctgccgttcactgctggaggcttcatctacgtggctacagtgtccgtgttgcctgagcttctgcgagaggctagtcccctgcagtcccttcttgaggttctgggccttctcgggggagtgatcatgatggtactcattgcccaccttgaatag

SEQ ID NO: 107133 - DNA, 1125 bp, Artificial Sequence
  derived and/or modified sequence
atggcgaggggactgggtgccccccactgggtggccgtcggtctgctgacatgggctactctgggcctgctggtcgccggcctgggcggccatgatgacctacatgacgacctgcaagaagatttccacggccattcccacagtgcggacctgagctcatcaatcttttgccctcttccatatccgaggggagttgagctctctcctgcgagtctcagcacatccgatttggcgcaattttgctttagatgggcacccggccgatgttttctgcacctgatcccgcatgcgctcgagccacactcccaccacaccctggagcagcctggacacggacactcacattctggtcagggcccgatcttaagcgtgggactctgggtgctgagcggcattgtggcattcttggttgtcgagaagtttgtaaggcatgtaaaagggggccacggccactctcatgggcacgggcatgcccactcccacaccaggggaagccacggccacgggcgccaggaacggtctactaaagagaaacagagttccgaggaggaagaaaaagagacaagaggggtccaaaagcgccggggcggaagcaccgtgccaaaagacggtcctgtgcggccacagaatgcagaggaggagaagcgcggcctcgacttgcgtgtgtctggctatttgaacctggctgcagacctggcccataatttcactgatggcctcgcaatcggcgcaagcttccgcggtggacgagggctgggtatcttgacgactatgaccgtccttctgcacgaggttccccacgaggtgggtgatttcgccattctggtacaaagtggatgttccaaaaagcaggcaatgcgacttcagctgttgaccgctgtaggagctctcgccggcacagcctgtgctctgctcaccgaaggaggagcagtgggatctgaaattgctggcggagcaggtcctgggtgggtgctgccatttaccgcagggggctttatctacgtggccactgtgtccgtcctgcctgagctgctgcgcgaggcaagcccattgcagagtcttctggaagttctcgggctgctgggcggcgttattatgatggtgctaatcgcacatttggagtag

SEQ ID NO: 107134 - DNA, 1125 bp, Artificial Sequence
  derived and/or modified sequence
atggcccgcggtcttggtgctccacattgggttgccgtggggctgcttacctgggcgactctcggtcttttggtggcaggccttggaggccacgacgatctgcatgatgacctccaggaagattttcatggccacagccattccgccgacctgtcgtcaagcattttctgccccctcccatatccgaggggggtagaactgtcacccgccagcctctccactagcgacttggcccagttctgctttcgctgggctccgggtcgatgtttccttcatctgattcctcatgcactggagccacattctcaccataccttagaacagcctggtcatggacactcccattctggacaaggaccaattctgtccgtcggactgtgggttttatccggaattgttgcctttctggtggttgagaagttcgtacggcacgtgaagggcgggcatgggcacagccacggccatgggcatgcacactcccatactcggggctctcacggtcatgggcgacaggagagatccacgaaggagaaacagagtagtgaggaggaagaaaaggagacacgcggcgtccagaagcgtagaggggggagcaccgtcccaaaagatggacctgttcggccacagaatgctgaagaggagaaacgcggtctggatctcagagtttcggggtacttaaatctggcagccgaccttgcgcataacttcaccgatggtctggccatcggagcctcctttcgcggaggccgagggttgggaatcctaactactatgacagtccttcttcatgaggttcctcacgaggtcggtgacttcgctatactcgtgcaaagcggctgctcaaagaaacaggccatgagactgcaactgttgacagcggttggtgctctagctggtaccgcctgcgcccttctcacagagggcggagcagtgggatcggaaatagccggaggcgcaggccccggatgggtgttgccttttacggccggaggttttatctacgttgcgactgtatccgttctgcccgaactcttgagagaagcatcgcctctccaaagcctcctggaggtgttgggactactgggcggcgtgattatgatggtgttaattgcacaccttgagtag

SEQ ID NO: 107135 - DNA, 1125 bp, Artificial Sequence
  derived and/or modified sequence
atggcccggggcctcggtgcgccgcattgggtggctgtgggtttacttacctgggcgacgttgggcctgctggtggccggccttggagggcacgatgacctgcacgacgatctgcaggaggatttccacggacatagccactctgctgacctgagctctagcattttctgccctctgccttaccccagaggagtggaactctcaccagcatcactatcaactagtgacctggcccagttctgcttccggtgggctcccggacgctgctttctgcatctaatcccccacgcccttgagccacacagccaccacacccttgaacagcccggacatgggcactcccattccggccagggcccaattctaagtgttggactgtgggtgttatcaggcatcgtggcgtttctcgtggtcgaaaaattcgtgcggcatgtgaagggcggtcatggccactctcacgggcatgggcatgcccattctcacactcgcggctcgcatgggcacggacggcaagagagatcaaccaaagagaagcagtctagcgaggaagaggaaaaagaaacaagaggcgtccaaaagcgccgcggcgggtcgacggtgccgaaggacggccccgttcggccacagaacgccgaagaagaaaagaggggactggacttgagggtgagcggataccttaatctggccgcagaccttgctcacaacttcactgatggtcttgctattggcgccagcttccgtggcggccgcgggttgggaatcctcactactatgacagtactccttcacgaggtgccccacgaagttggcgactttgctatcctcgtgcagagcgggtgcagtaagaaacaggccatgcggctgcagctgctgactgcggtaggggcactcgccggcaccgcctgcgctcttctgactgaaggtggcgccgtggggtccgaaatcgcaggcggggccggcccagggtgggttctgccttttacagctggaggttttatctacgttgccactgtgtctgtgctccccgagctgctccgtgaggcttctccactacagagcctgctcgaggtgctgggcctcctaggaggtgtgatcatgatggtactgatcgcccatctggagtag

SEQ ID NO: 107136 - DNA, 1125 bp, Artificial Sequence
  derived and/or modified sequence
atggcccgtggactcggtgccccacattgggtggccgtcgggctgctgacctgggcgaccctgggcctgcttgtggcagggctgggaggacacgacgacctgcacgacgatttgcaggaagactttcatggccacagtcattccgctgacctcagctcttccatcttttgtcccctgccataccccagaggagtcgagttatccccagcctctctctccacctccgatctggcccagttttgcttccgctgggcaccaggtcgctgctttctccatctgataccacacgctctggaacctcacagccaccacactttggagcagccaggacacggacattcgcactctgggcaaggccctatcctgtcagttggcttgtgggtactttccggaatcgttgcctttttagtagtggagaagtttgttcggcacgtgaaaggcggacatgggcactctcatggccacggacacgcccattcccatactagagggtctcatggacatggtcggcaggagaggagcaccaaggagaagcagtccagcgaagaagaagagaaagaaacaagaggagtccagaagcggagggggggctctacggtgcctaaggacgggcccgtcagaccacagaacgcagaagaggaaaaaagaggcctggatctgagagtgtctggctatctaaatctcgcagccgacctggcacataatttcaccgatggattagccatcggggcatcctttcgtggcggcagaggcctgggcatactaactaccatgacagtgttgctgcatgaggtgcctcacgaagtaggagactttgccatcctagtacagagtggatgctcgaagaagcaggccatgcggcttcagctgcttacagccgtaggggcactcgcgggtactgcttgcgccctgctgactgagggcggcgcagtgggaagcgagatcgctggcggcgcaggccctggatgggttctgcctttcacagcaggcggcttcatatacgtggctaccgtgtccgtgctgccagagcttctcagagaagcaagccccttgcagtccctgttagaggtcctggggctactgggaggagtcattatgatggttctgattgcgcatctggagtag

SEQ ID NO: 107137 - DNA, 1125 bp, Artificial Sequence
  derived and/or modified sequence
atggcccggggcctgggcgccccccactgggtggccgtgggcctgctgacctgggccaccctgggcctgctggtggccggcctgggcggccatgatgacctgcatgatgacctgcaggaggacttccacggccacagccacagcgctgacctgagcagcagcatcttctgccccctgccctacccccggggcgtggagctgagccctgccagcctgagcaccagtgacctggcccagttctgcttccgctgggcccctggccgctgcttcctgcacctgatcccccacgccctggagccccacagccaccacaccctggagcagcccggccacggccacagccacagcggccagggccccatcctgtctgtgggcctgtgggtgctgagcggcatcgtggccttcctggtggtggagaagtttgtgcgccacgtgaagggcggccacggccacagccacggccacggccacgcccacagccacacccggggcagccacggccacggccggcaggagaggagcaccaaggagaagcagagcagcgaggaggaggagaaggagacccggggcgtgcagaagaggcggggcggcagcacagtgcccaaggatggccctgtgcggccccagaatgctgaggaggagaagaggggcctggacctgcgggtgtctggctacctgaacctggccgctgacctggcccacaacttcacagatggcctggccatcggggccagcttccggggcggccggggcctgggcatcctgaccaccatgacagtgctgctgcacgaggtgccccatgaggtgggggactttgccatcctggtgcagagcggctgcagcaagaagcaggccatgaggctgcagctgctgacagctgtgggcgccctggccggcacagcctgtgccctgctgacagagggcggcgctgtgggcagcgagattgctgggggcgccggccctggctgggtgctgcccttcaccgctgggggcttcatctacgtggccaccgtgtctgtgctgcctgagctgctgcgggaggccagccccctgcagagcctgctggaggtgctgggcctgctgggcggcgtcatcatgatggtgctgattgcccacctggagtag

SEQ ID NO: 107138 - DNA, 1125 bp, Artificial Sequence
  derived and/or modified sequence
atggcccggggcctgggcgccccccactgggtggccgtgggcctgctgacatgggccacccttgggttgctcgttgcgggccttggcgggcatgatgaccttcacgacgatctccaggaggacttccacggtcattcccatagcgccgacttaagcagcagcatcttttgccccctaccatacccccgcggcgttgaactgtctcctgcatccttgtcaacttccgatttagcccaattctgttttcgctgggccccagggaggtgtttcctgcacctgatccctcatgccctggagccccactctcatcacacccttgagcagccagggcatggtcactctcactccggacaaggtccaatcctgagtgttggcttgtgggtcctaagcggaatagtggcttttctggtggtggaaaaatttgttaggcacgtaaaaggcggtcatggacactctcatgggcacggacacgctcactctcacacccgaggttcgcatgggcacggacgtcaggagagatcgaccaaagagaagcagtcaagcgaggaggaagagaaggagactaggggcgtccagaaaaggaggggaggctccacggttccaaaggatgggccagttaggcctcagaatgctgaagaggagaagcgtgggcttgacctgagagtgagcgggtatctgaatttggcagccgatctggcccacaactttacagatggactcgctatcggcgcgtcgttcaggggtgggagagggcttggcatcctcaccactatgaccgtgctactgcatgaggtcccgcacgaagtcggcgattttgcaatcctggtgcagagcggttgttccaaaaaacaggctatgaggctacagttgctgaccgccgtgggggctttggccggaacagcttgtgcactgctcacagagggtggagccgtgggctccgagatcgcagggggggcggggcccggctgggtgctcccgttcactgccggcgggtttatttacgtcgccaccgtgtcggtactgccagagttgctccgggaagcatcaccactccagtccctgctggaggtcctcgggctgcttggcggggtgataatgatggtactgatcgcccaccttgagtag

SEQ ID NO: 107139 - DNA, 1125 bp, Artificial Sequence
  derived and/or modified sequence
atggcccggggcctgggcgccccccactgggtggccgtgggcctgctcacatgggcaacattaggcctcttggtcgctgggctcggcggacacgatgatttgcacgatgatttgcaggaggatttccatggccacagccatagcgccgacctctcttcctcgattttttgtccactgccgtaccctcggggtgtggagttgtcccctgcatctctcagtacaagtgacctcgcacaattttgtttccggtgggcacccggccggtgctttttgcatctgatccctcacgcattagagccccactctcaccacacactggagcagcccggacatggacacagccattctggacaggggccaattctgtcagtgggcttgtgggtcctctctggtatcgttgccttcctggtagtcgaaaagtttgtgcggcacgttaagggtggccacggacattcacatggacacggccatgcacactcgcatacacgcgggagccacggacacggtcgccaggagcggtcaacgaaggagaaacaatcctcagaggaggaggagaaagagacccgcggggtccagaaaaggcggggcggaagcactgtgccaaaggacggacccgtgcgaccacaaaatgcagaggaagagaagcgtggactggatttgagagtttcaggatatctgaacttggcagcagatcttgcccataattttactgatgggctagccattggtgcttcgtttcgggggggaagaggtctgggtatcctcactacaatgactgtactgctccacgaggttccacacgaagtgggagacttcgccatcctcgttcagtcgggatgttccaaaaagcaggcaatgcgtctgcagctgttaacagccgtgggcgcacttgctgggacagcctgcgccctgttgactgaaggaggcgccgtgggaagtgagatagctggaggcgctgggccaggttgggtgctcccatttaccgctggcggattcatctacgtggccacggtgagtgtccttcctgagctcctgcgggaggctagcccattgcagagtctgttagaggtcctgggacttctcggaggagttattatgatggtactcatcgcccacctcgagtag

SEQ ID NO: 107140 - DNA, 1125 bp, Artificial Sequence
  derived and/or modified sequence
atggcccggggcctgggcgccccccactgggtggccgtgggcctgttaacgtgggcgacgctcggcctcctggtagctggattaggggggcatgatgatctgcatgacgacctgcaggaggactttcacggacatagccacagcgccgatctatcttcctctatcttctgccctctcccatatccccggggcgtggagctcagtcctgccagcctgagcacaagtgatctagctcagttttgtttccggtgggctcctggtcgttgctttctacacctgatcccacacgcccttgagccccacagccatcacacccttgagcagcctggccacggtcattcccattcaggccagggccccatcttgagcgtggggctgtgggtcctgtccggcatcgttgcctttttggttgttgaaaagttcgtccgccacgtgaaaggaggccatggccactcccacgggcacggtcatgctcactcccacacaagggggagccatgggcacgggcgccaggagcgctctacaaaagaaaagcagtcaagcgaagaagaggagaaagaaacacgcggtgttcaaaagcgaagaggcggctcaacggtgccaaaagatggtccagtgaggccccagaacgccgaggaagaaaagcgtggactggaccttagggtttccggatatcttaacctggccgcagacctcgcgcataatttcactgacggactagccatcggggccagttttaggggcgggcgcgggctgggtattctcacaaccatgactgttctgctccacgaggtgccccacgaggttggggactttgccattctggttcagtccgggtgctccaagaaacaggcgatgaggctgcagttgttgacagcagtgggcgcccttgcggggactgcatgtgcgctcctcacagaggggggcgcggtggggagcgagatagctggaggggctgggcccggctgggtgctgccctttacggctggaggattcatttatgtcgccacagtgtccgtcctccccgaactcctgagagaggcatctcctctgcaaagtctcttggaggtgctgggacttttaggaggggtgattatgatggtacttatcgcacacttggaatag

SEQ ID NO: 107141 - DNA, 1125 bp, Artificial Sequence
  derived and/or modified sequence
atggcccggggcctgggcgccccccactgggtggccgtgggcctgctgacctgggccaccttaggcctgctggttgctgggctgggggggcacgacgatttgcatgacgacctacaggaggattttcatggccacagtcatagcgctgatctgtcttcgagcattttttgcccactgccatacccaagaggcgtcgagctgtcaccagccagcctttccacttcagatcttgcccagttttgctttcgatgggccccaggcaggtgctttctgcatctgatcccccacgcattggagccgcattcgcaccacacgctggaacaacccgggcatggccattcacacagtggacagggtcctattctgagcgtgggactgtgggtacttagcggtattgttgcgtttttggtggtggagaaatttgttcgccacgtgaagggtggtcacgggcattcccatgggcatggccatgcccactcacatacccgcggtagccatggccatgggagacaagagaggagtaccaaggaaaagcagtccagcgaggaggaggagaaagaaacaagaggagtacagaaaagacgcggagggtcaactgtgccaaaagacggccctgtgagaccacaaaacgccgaggaagagaaaagaggcttggaccttagggtgagcggttatctcaatttagccgctgatctggcccataacttcacagatggccttgctataggtgcctccttccgcgggggacgcgggctcggcattttgacaaccatgactgtactactccacgaggtcccacacgaggtcggggatttcgctattctcgttcagtctgggtgcagcaagaagcaggctatgcgtcttcaactcctgaccgcagttggcgccctggccgggaccgcgtgcgctctgctcactgaggggggtgcagtcggttcagagattgccggtggcgctggcccgggctgggtattgcccttcactgccggagggttcatttatgtggcaaccgtctcagttctgcctgaactgctgagagaagcaagcccccttcagagtcttctggaagtgctgggtttgcttggcggagtgattatgatggtccttatcgcccacctcgagtag

SEQ ID NO: 107142 - DNA, 1125 bp, Artificial Sequence
  derived and/or modified sequence
atggcccggggcctgggcgccccccactgggtggccgtgggcctgttgacttgggcgactctgggtctgctggtcgctggtctgggaggacatgacgatctgcacgatgatctgcaggaggactttcatggacacagccattcggccgatctgagttcgtcaatcttctgtcccctgccttatcctcgtggggtggaactgagcccagcgtctcttagtacgagtgacttggcacaattctgcttccgctgggcccctggtagatgcttcctgcaccttatcccacatgccttggaaccacactcacaccacactcttgaacagcctggccatgggcattcacatagtggtcagggccccatactgtcggtggggctctgggtgctgtcagggatcgtggcatttctggtggtggaaaaatttgtccgccatgttaaaggggggcatggtcacagccatggccacggtcacgctcactctcacacaagaggtagccacggccacggcagacaggagcgtagcactaaggaaaaacagagttccgaagaggaagagaaagagacaaggggagtgcagaagcgcagaggcggctccacggtgccaaaagatgggcccgtgagaccgcaaaatgccgaggaggaaaaacggggactagatctgcgggtgtccggctacctgaacctggccgctgacctggcccataacttcaccgacggtttagcaatcggggcctcttttcggggcggccgggggctgggcatactgactacgatgaccgtgttactgcacgaggttccacacgaagtcggggactttgcgatcctggttcagtctggatgttcgaagaagcaggctatgaggcttcaactgttaactgcagtgggtgcccttgccggaacggcgtgtgctctcctcacagaaggcggagcagtggggtcagaaatcgctggcggagcgggtcccggatgggtgctcccgttcactgccgggggttttatctatgtggcgaccgtgtctgtgttgccagagttgctgcgagaagcaagtcctttacagtctctcctggaggtgctgggcttgctggggggcgtgattatgatggtcctgatcgcacatcttgagtag

SEQ ID NO: 107143 - DNA, 1125 bp, Artificial Sequence
  derived and/or modified sequence
atggcccggggcctgggcgccccccactgggtggccgtgggcctgctgacctgggccacgctcgggctattagtcgccggcctgggagggcacgacgatctgcacgacgatctccaggaagattttcatggtcattcccatagcgccgatctgtccagctctatcttctgcccccttccatacccaagaggcgtggagctatcaccagcttctctcagtacctctgacttagctcaattctgtttccgctgggcccctggaaggtgttttctccacctaattccccacgctctcgaacctcacagccaccatacgcttgaacagcctgggcatgggcatagccattcagggcagggacctattttgtcagtcgggctgtgggttctgagtggtatcgtcgcctttctcgtagtcgagaagtttgtgcgccatgtgaagggcggacatggacactcacacggccacggtcacgctcattctcacacacgtggctcacatggtcacgggaggcaagagaggtctactaaggagaagcagtcaagcgaagaggaggaaaaggaaaccaggggggtgcagaaacggcgtggcggcagtacagtgcctaaggatggcccggtgcgcccccagaacgccgaagaagaaaagcgcgggcttgatctgcgggttagcggatatcttaatctggcagccgatctggctcataatttcacggatggcctggcaatcggagctagcttccggggaggacgcggactggggatactcacaacgatgacggtcttgcttcatgaggtaccccacgaagtgggagattttgccatactggtgcagtccggctgcagtaaaaagcaagccatgagactccaactcctgacagcagtgggcgctcttgccggcactgcatgcgccctcctgacagagggcggcgcggttggatctgagatcgcagggggagccggacctggatgggtgctgcctttcaccgcaggtggattcatttacgtggccactgtgagcgtgcttcctgaattactcagagaagccagtcctctgcagtcactattggaagtactgggcctcttgggtggcgtaataatgatggtgttgatcgcccacctggagtag

SEQ ID NO: 107144 - DNA, 1125 bp, Artificial Sequence
  derived and/or modified sequence
atggcaagaggattgggcgcaccccattgggttgcggtgggcctgttgacatgggccacgcttggtctcctggtcgccggacttgggggacacgacgatctgcacgacgacttgcaagaggatttccacggtcactctcacagcgcagatctttcatcgtccattttctgcccactcccctatccaagaggcgtggagctgagccctgccagtctcagcacttcggatctcgcgcagttctgttttagatgggccccaggcagatgttttctgcacctgatcccacacgcgcttgagccccattcccaccacacacttgagcagccgggtcacgggcactctcacagcggccagggacccatccttagtgtgggtttgtgggtgctgagtgggatcgtggcattcctagtggtcgagaagttcgtgcgccacgtgaagggaggccacgggcactcacacggccatgggcacgcccactcgcacacgagaggtagtcacggacacggaaggcaggagagaagcactaaggagaagcaatcctccgaggaagaagaaaaggagacaaggggtgtccagaaaagaagaggagggagtacagtaccaaaggacggacccgtgaggcctcagaacgcagaagaggagaaacgaggcctcgatctgagagtgagcgggtacctaaacctggccgctgacctggcccacaacttcaccgacggattagctattggagccagcttccggggtggcagaggtctgggcatcctgactacaatgacagtgctgttgcacgaggtgcctcatgaggttggcgattttgcaatcttagtgcagtccgggtgtagcaagaaacaagctatgaggctgcagctgcttaccgccgtgggggctctggccggaactgcttgcgccctgctcacagaggggggtgctgtcggatcggaaattgccggaggcgctggaccaggatgggttctgccctttactgccggagggtttatctacgttgccacagtttcggtccttccagagttgttgagggaagcaagtcccctgcaatccctgctggaagttttagggctgttgggtggtgtcatcatgatggttctcatagcccacttggagtag

SEQ ID NO: 107145 - DNA, 1125 bp, Artificial Sequence
  derived and/or modified sequence
atggcgagaggcctgggcgctcctcactgggttgccgtcggactgctcacttgggctaccctgggcttgttagttgccggactgggaggtcatgatgatctgcatgacgacctacaggaggatttccacgggcactcacatagtgccgatcttagcagcagtatcttttgtcctctgccttacccaaggggggtagagctgtcccctgctagcttatccacctccgaccttgcgcagttttgctttcgctgggccccaggtagatgttttctgcacctgatccctcatgcactggaaccccactcccaccacactctggaacaacctggccacggccactcacacagcgggcagggcccaattctctcggtgggcctttgggttctgtcagggatcgtagcgttcctggtcgttgaaaaattcgttcgtcacgtcaaggggggacacggtcactctcacgggcatggccacgcccactcccacacgaggggctcccatggacatgggcgtcaggaaaggtcaacaaaagaaaagcaatcttctgaagaggaggagaaagagaccagaggagtgcaaaagcggagagggggtagtaccgttcccaaggacggtcccgtaaggcctcagaacgccgaggaggagaagagaggcctggacctaagggtgtctggttatctgaacctggctgctgatctggcacacaattttaccgacggactggcaatcggcgcttcatttcgcggaggtcggggtctcggcatcttgaccaccatgactgtgctgctgcatgaggtgccacacgaggtgggggacttcgcgatactcgtccagagtggctgctccaaaaagcaggccatgcgcttacagctgcttactgcagtgggagcccttgccggtaccgcttgcgctttactaacagagggtggggctgtggggtcagagatagcaggaggagcgggaccaggatgggtgctccccttcaccgccggaggctttatctacgttgcgactgttagtgtgctgcctgaacttcttcgcgaagcctctcctctgcagagtctgctggaggtgctaggattgcttgggggagttatcatgatggtgctgattgcccaccttgaatag

SEQ ID NO: 107146 - DNA, 1125 bp, Artificial Sequence
  derived and/or modified sequence
atggcacggggactgggtgcccctcactgggtggcagtcgggctgttgacatgggccacactgggtctcttggtcgccggactcgggggacatgacgatctgcacgatgacctgcaggaagacttccatggtcactcacacagtgccgacttaagtagtagtattttctgcccactgccatacccacgcggagtcgagcttagcccagcctccctttccacgtctgacttggcgcagttctgcttcagatgggccccaggtaggtgcttcctgcaccttatcccccacgctctggagcctcactctcaccatacactggagcagccaggtcacggacactcacactccggtcaggggcctatattgtccgtgggactttgggtgttgtccggaatcgttgcatttctggtcgtagagaagtttgtgagacatgtgaaaggcggacacggccattctcatggacatggccacgcccactctcacacccgtggctcgcacgggcatggaaggcaggagagatctactaaagaaaaacaatcctcagaagaagaagagaaggaaacacgaggtgtgcaaaagaggcgaggcggaagtaccgtccctaaagatggcccagtgcggcctcagaacgcggaagaagaaaagcgaggcttggacctgagagtgtccggatacctcaacctggcggcagatctcgcacacaacttcactgatggactagccataggtgcctcattccggggtggaaggggcctcggcatcttgaccacaatgaccgtgctgctgcacgaggtacctcacgaggtcggagactttgcaattctggtacagtctgggtgctccaaaaaacaggccatgcggcttcaacttctcaccgccgtgggcgctctagcaggcacggcttgtgctctcttgaccgaggggggtgcggtaggaagcgaaatcgccggtggcgctggcccaggatgggtactccctttcacggctgggggatttatctatgtggccactgtgagtgttctcccagagctgctacgtgaagcatctcccctgcagagccttctggaggttcttggattactcggcggtgttattatgatggtactcatcgcgcacctggagtag

SEQ ID NO: 107147 - DNA, 1125 bp, Artificial Sequence
  derived and/or modified sequence
atggctcgtggactgggcgctccacactgggtggccgtaggattgctcacttgggcaacactcggactccttgtggctggtttaggaggtcacgatgacctgcatgatgatctccaggaggactttcatggacactctcattcggctgacctgagtagctccatcttctgccctctgccttatcccaggggcgtcgaactctcccccgcatcactgtccacatctgacctggcccagttttgttttagatgggccccaggtcgatgcttcttgcatctcatcccacatgctctagaaccgcacagtcatcacaccctcgaacagccaggacatggccactcgcactcaggccagggacccatcctaagtgtcggattgtgggtgctctctgggatcgtggcattcctggtggtggaaaaatttgtacggcacgtcaagggcggacacggacattcgcatgggcatggacacgcccactctcacacccggggtagtcacggccacggacgccaagaaaggtctacgaaagaaaaacagagtagcgaggaggaggaaaaagaaacccggggagttcagaagcgccgagggggttccacagtgccgaaagacggacccgtgcggcctcagaatgcagaggaagagaaacggggactggatttgcgagtgagcggttatctgaacttggccgctgatttggctcacaattttacagatggtctcgccattggagccagcttcaggggtggtaggggtctgggtattctcaccactatgaccgtattgctccatgaggtcccacacgaggtaggcgactttgcaatcctcgtacagagcggatgtagtaaaaagcaagcaatgagattgcagcttctgactgcggtgggcgcattagctggcacagcctgtgcactgcttaccgaggggggagctgtaggaagcgaaattgcagggggtgccggacctggttgggttctgccattcaccgccggtggattcatctatgtggctacagtatccgtactgccagagctgctgcgcgaggcctcccctctccagagtttgctagaggtcttgggcctgttgggcggagtgatcatgatggtgctgatagcccacctcgagtag

SEQ ID NO: 107148 - DNA, 1125 bp, Artificial Sequence
  derived and/or modified sequence
atggccaggggcctgggcgcaccccattgggtcgctgtcggactgctgacttgggccacactcggactcctggtagctggcttaggtggccatgacgacctgcatgatgatctgcaggaagatttccacggccattcacattctgcagacttatcctcttccatattttgccctctcccttaccctagaggcgtcgaactatcccctgcttctctgagtacgtcagacctcgcccaattctgcttccgatgggcccctgggcgatgtttcttgcatctgattccccatgccctcgagccacactctcatcacactctggagcaaccgggtcacggtcattctcatagcggacaggggccaattctgtccgtcggcctctgggtcttgtccggaattgttgccttcctcgttgtggaaaaattcgtgagacatgtcaaagggggacacggacattcccatgggcacggacacgcccactctcatacaagagggtctcatggccatgggcgacaggagagaagcactaaggagaaacagagcagcgaagaggaagaaaaggaaacacgcggtgtccaaaagagacgcggagggagtaccgtacccaaagatggaccagtacgaccccagaacgctgaggaagagaagagaggcctggacctcagagtgtctgggtacctcaatctggctgcagacctggcgcataattttacagacggcctggctatcggagccagctttcgtggcggacgtggcctgggcatactcacaactatgacagttttgttacacgaggttccacatgaggtaggcgactttgccattttggtccagtctgggtgctctaaaaagcaggcgatgcgactgcagctcctcacagcagtcggggcactggccggtaccgcctgtgcgctgctgaccgaggggggtgccgtcgggagcgagatcgctggcggagccggtccgggatgggttctgcccttcaccgctggtggatttatatacgtggctacagtgtctgttctgcccgagcttctcagagaggcttccccactgcagagtctgctggaagttctgggacttttgggaggcgtcattatgatggtgttgatagcccacctggagtag

SEQ ID NO: 107149 - DNA, 1125 bp, Artificial Sequence
  derived and/or modified sequence
atggcccgtggactgggggcacctcattgggtcgccgtcggcctactcacatgggccacacttggacttctggtcgcaggactcggcggacatgatgacctgcatgatgacctgcaggaagactttcatggtcacagtcacagtgccgacctaagctcctctatcttctgcccactgccatatccacggggagtcgagctctcacccgcttccttgtcaacgtctgaccttgcccagttctgcttcaggtgggcacccggtagatgttttctccaccttattccgcacgccctagaaccgcatagtcaccacaccctggagcagcctggtcatgggcacagtcacagtggacaggggccaatccttagtgttggtctctgggtgctcagcggtattgtggcgtttctggttgtcgaaaagtttgtaagacatgttaaaggcggacatggccattcccatggacatggtcatgcccactcccatacgagaggctcccatggccatggccgtcaggagcgcagtacgaaagaaaagcagagtagcgaggaggaggaaaaggagacacggggagtacagaaacggcgaggcggatcaacagtgccgaaggatgggcctgtgcgtccccagaacgccgaagaagaaaagcgaggcctggacctgagggtcagtggttaccttaaccttgccgctgacctcgcacacaacttcaccgacggcctggcaattggcgctagctttcggggagggcgtggcctaggaatcctgaccacaatgaccgtcttgctacatgaggtccctcacgaagtcggcgactttgcgatccttgtgcaatcaggttgcagtaagaagcaagctatgagacttcagctactgaccgccgtcggcgctctcgccggaaccgcctgcgcactgctgaccgagggcggagcggtgggctctgagatcgctggcggagccggtcctggctgggtcctcccatttaccgcaggcggattcatttacgtcgccactgtctccgtcctgcctgagcttttgcgggaggcatctcccctgcagtccctcctggaagtgctgggactgctgggaggcgttatcatgatggtgctaatcgcccacctggagtag

SEQ ID NO: 107150 - DNA, 1314 bp, Artificial Sequence
  derived and/or modified sequence
ctgttctcgcgggatctaaaggcgggactgccacgtccaagcaaaccgggaaaggagaggatcccggagccgcgtgatggccagaggcctgggggccccccactgggtggccgtgggactgctgacctgggcgaccttggggcttctggtggctggactcgggggtcatgacgacctgcacgacgatctgcaagaggacttccatggccacagccacagtgctgatctcagcagctccattttttgtcctcttccttatccccgtggagtcgaactctccccggcatcgctctctacttcagatcttgctcagttttgcttccggtgggctcctgggagatgcttcctgcacctcattcctcatgctcttgaacctcattctcaccacactctggagcaacccggacatggacactcccacagtggccagggccccattctgtctgtgggactgtgggttctcagtggaattgttgcctttcttgtcgtggagaaatttgtgagacatgtgaaaggaggacatggtcacagtcatggacatggacacgctcacagtcatacacgtggaagtcatggacatggaagacaagagcgttctaccaaggagaagcagagctcagaggaagaagaaaaggaaacaagaggggttcagaagaggcgaggagggagcacagtacccaaagatgggccagtgagacctcagaacgctgaagaagaaaaaagaggcttagacctgcgtgtgtcggggtacctgaatctggctgctgacttggcacacaacttcactgatggtctggccattggggcttcctttcgagggggccggggactagggatcctgaccacaatgactgtcctgctacatgaagtgccccacgaggtcggagactttgccatcttggtccagtctggctgcagcaaaaagcaggcgatgcgtctgcaactactgacagcagtaggggcactggcaggcacagcctgtgcccttctcactgaaggaggagcagtgggcagtgaaattgcaggtggtgcaggtcctggctgggtcctgccatttactgcaggtggctttatctacgtagcaacagtgtctgtgttgcccgagctgctgagggaggcatcaccattgcaatcacttctggaggtgctggggctgctggggggagttatcatgatggtgctgattgcccaccttgagtgaggggtggataaactacccctgccccaaacctctacccctaactccaggtcaggggtgcgtagaggttgggggccctggccagggacatctgccaaaggaaggaactgtagcct

SEQ ID NO: 107151 - DNA, 1125 bp, Artificial Sequence
  derived and/or modified sequence
atggccagaggcctgggcgccccccactgggtggccgtgggcctgctgacctgggccaccctgggcctgctggtggccggcctgggcggccacgacgacctgcacgacgacctgcaggaggacttccacggccacagccacagcgccgacctgagcagcagcatcttctgccccctgccctaccccagaggcgtggagctgagccccgccagcctgagcaccagcgacctggcccagttctgcttcagatgggcccccggcagatgcttcctgcacctgatcccccacgccctggagccccacagccaccacaccctggagcagcccggccacggccacagccacagcggccagggccccatcctgagcgtgggcctgtgggtgctgagcggcatcgtggccttcctggtggtggagaagttcgtgagacacgtgaagggcggccacggccacagccacggccacggccacgcccacagccacaccagaggcagccacggccacggcagacaggagagaagcaccaaggagaagcagagcagcgaggaggaggagaaggagaccagaggcgtgcagaagagaagaggcggcagcaccgtgcccaaggacggccccgtgagaccccagaacgccgaggaggagaagagaggcctggacctgagagtgagcggctacctgaacctggccgccgacctggcccacaacttcaccgacggcctggccatcggcgccagcttcagaggcggcagaggcctgggcatcctgaccaccatgaccgtgctgctgcacgaggtgccccacgaggtgggcgacttcgccatcctggtgcagagcggctgcagcaagaagcaggccatgagactgcagctgctgaccgccgtgggcgccctggccggcaccgcctgcgccctgctgaccgagggcggcgccgtgggcagcgagatcgccggcggcgccggccccggctgggtgctgcccttcaccgccggcggcttcatctacgtggccaccgtgagcgtgctgcccgagctgctgagagaggccagccccctgcagagcctgctggaggtgctgggcctgctgggcggcgtgatcatgatggtgctgatcgcccacctggagtag

SEQ ID NO: 107152 - protein, 531 aa, Artificial Sequence
  derived and/or modified sequence
MSSEMEPLLLAWSYFRRRKFQLCADLCTQMLEKSPYDQAAWILKARALTEMVYIDEIDVDQEGIAEMMLDENAIAQVPRPGTSLKLPGTNQTGGPSQAVRPITQAGRPITGFLRPSTQSGRPGTMEQAIRTPRTAYTARPITSSSGRFVRLGTASMLTSPDGPFINLSRLNLTKYSQKPKLAKALFEYIFHHENDVKTIHLEDVVLHLGIYPFLLRNKNHIEKNALDLAALSTEHSQYKDWWWKVQIGKCYYRLGMYREAEKQFKSALKQQEMVDTFLYLAKVYVSLDQPVTALNLFKQGLDKFPGEVTLLCGIARIYEEMNNMSSAAEYYKEVLKQDNTHVEAIACIGSNHFYSDQPEIALRFYRRLLQMGIYNGQLFNNLGLCCFYAQQYDMTLTSFERALSLAENEEEAADVWYNLGHVAVGIGDTNLAHQCFRLALVNNNNHAEAYNNLAVLEMRKGHVEQARALLQTASSLAPHMYEPHFNFATISDKIGDLQRSYVAAQKSEAAFPDHVDTQHLIKQLRQHFAML

SEQ ID NO: 107153 - DNA, 1596 bp, Artificial Sequence
  derived and/or modified sequence
atgagcagcgagatggagcccctgctgctggcctggagctacttcagaagaagaaagttccagctgtgcgccgacctgtgcacccagatgctggagaagagcccctacgaccaggccgcctggatcctgaaggccagagccctgaccgagatggtgtacatcgacgagatcgacgtggaccaggagggcatcgccgagatgatgctggacgagaacgccatcgcccaggtgcccagacccggcaccagcctgaagctgcccggcaccaaccagaccggcggccccagccaggccgtgagacccatcacccaggccggcagacccatcaccggcttcctgagacccagcacccagagcggcagacccggcaccatggagcaggccatcagaacccccagaaccgcctacaccgccagacccatcaccagcagcagcggcagattcgtgagactgggcaccgccagcatgctgaccagccccgacggccccttcatcaacctgagcagactgaacctgaccaagtacagccagaagcccaagctggccaaggccctgttcgagtacatcttccaccacgagaacgacgtgaagaccatccacctggaggacgtggtgctgcacctgggcatctaccccttcctgctgagaaacaagaaccacatcgagaagaacgccctggacctggccgccctgagcaccgagcacagccagtacaaggactggtggtggaaggtgcagatcggcaagtgctactacagactgggcatgtacagagaggccgagaagcagttcaagagcgccctgaagcagcaggagatggtggacaccttcctgtacctggccaaggtgtacgtgagcctggaccagcccgtgaccgccctgaacctgttcaagcagggcctggacaagttccccggcgaggtgaccctgctgtgcggcatcgccagaatctacgaggagatgaacaacatgagcagcgccgccgagtactacaaggaggtgctgaagcaggacaacacccacgtggaggccatcgcctgcatcggcagcaaccacttctacagcgaccagcccgagatcgccctgagattctacagaagactgctgcagatgggcatctacaacggccagctgttcaacaacctgggcctgtgctgcttctacgcccagcagtacgacatgaccctgaccagcttcgagagagccctgagcctggccgagaacgaggaggaggccgccgacgtgtggtacaacctgggccacgtggccgtgggcatcggcgacaccaacctggcccaccagtgcttcagactggccctggtgaacaacaacaaccacgccgaggcctacaacaacctggccgtgctggagatgagaaagggccacgtggagcaggccagagccctgctgcagaccgccagcagcctggccccccacatgtacgagccccacttcaacttcgccaccatcagcgacaagatcggcgacctgcagagaagctacgtggccgcccagaagagcgaggccgccttccccgaccacgtggacacccagcacctgatcaagcagctgagacagcacttcgccatgctgtag

SEQ ID NO: 107154 - DNA, 1596 bp, Artificial Sequence
  derived and/or modified sequence
atgagctccgagatggagcccctgctgttggcctggtcttactttcggcgccgcaaatttcagctgtgcgctgatctgtgcacacagatgctagaaaagtctccgtatgaccaggcagcctggattctgaaggctcgcgctttaactgagatggtgtacatcgatgagattgatgtggaccaggagggaatcgctgagatgatgcttgatgaaaacgctatcgctcaggtgcccaggcctggcacctctcttaaactccccgggacgaaccagacaggaggcccctcccaggccgtccggccgattacacaggcaggtagacctattaccggattcttgagaccttccactcaatctggtcggcctgggactatggaacaagccattcgaacgcctagaactgcctatacagctcgccccatcaccagctcctccggaaggttcgtgaggcttggaaccgcttccatgcttacaagtccggatggaccctttataaatctaagtcgcctgaacttgacaaaatactcacagaaacctaagctggccaaagccctcttcgaatatatttttcatcacgaaaacgacgttaagacgattcacctggaggacgtggttctacacctgggaatatacccgttcctgctacgcaacaaaaaccatatcgagaagaacgctctggaccttgcggccctgtctacagaacacagccagtataaagactggtggtggaaagtgcagataggcaagtgctactaccgcctgggcatgtatcgtgaggccgagaagcagttcaagtctgctctgaaacagcaagaaatggtggacacattcctgtacttagctaaagtttacgtttccctcgaccagccagtcactgcattgaatctgttcaagcagggcctggacaaattccccggagaggtcacgctgctctgtggcatcgcaagaatttacgaggagatgaacaacatgagctccgctgcagagtactataaggaagtgttgaaacaggacaatacccacgtcgaagccattgcttgcatcgggagtaaccatttttattcagatcagcccgagatcgccttgcgcttctaccgccgcctcctccagatgggaatctacaacggccagctatttaataatctgggtctatgttgcttttatgcgcagcaatatgacatgaccctaacatcgtttgaacgggccctgagcctagctgaaaacgaggaggaggccgcggatgtctggtataatctggggcatgttgcagtcggaatcggggacaccaatctggcgcatcagtgcttcaggctggcgctcgtgaacaacaataatcacgccgaagcatataacaacctggcagtccttgaaatgcgcaagggacacgtcgagcaggcccgcgccctattgcagaccgccagcagtttggccccccacatgtatgaacctcactttaactttgcgactataagtgacaaaatcggggacctgcaaagaagctatgtcgcagctcagaaatctgaggccgcttttccagatcacgtggacacccagcaccttatcaagcagctgaggcaacattttgccatgctgtag

SEQ ID NO: 107155 - DNA, 1596 bp, Artificial Sequence
  derived and/or modified sequence
atgagcagcgagatggagcccctgctgctggcctggagctacttcagaagaaggaagttccagctgtgtgccgacctgtgcacccagatgctggagaagagcccctatgaccaggccgcctggatcctgaaggcccgggccctgacagagatggtgtacattgatgaaattgatgtggaccaggagggcattgctgagatgatgctggatgaaaatgccatcgcccaggtgccccggcccggcaccagcctgaagctgcccggcaccaaccagacaggaggccccagccaggccgtgcggcccatcacccaggccggccggcccatcaccggcttcctgcggcccagcacccagagcggccggcccggcaccatggagcaggccatccgcacccccaggacagcctacacagcccggcccatcaccagcagcagcggccgctttgtgcggctgggcacagcctccatgctgaccagcccagatggccccttcatcaacctgagccggctgaacctgaccaagtacagccagaagcccaagctggccaaggccctgtttgagtacatcttccaccatgaaaatgatgtgaagaccatccacctggaggatgtggtgctgcacctgggcatctaccccttcctgctgaggaacaagaaccacatcgagaagaatgccctggacctggccgccctgagcacagagcacagccagtacaaggactggtggtggaaggtgcagatcggcaagtgctactaccgcctgggcatgtaccgggaggccgagaagcagttcaagagcgccctgaagcagcaggagatggtggacaccttcctgtacctggccaaggtgtatgtgtccctggaccagcctgtgacagccctgaacctcttcaagcagggcctggacaagtttcctggagaggtgaccctgctgtgtggcatcgcccgcatctatgaggagatgaacaacatgagcagcgctgctgagtactacaaggaggtgctgaagcaggacaacacccacgtggaggccatcgcctgcatcggcagcaaccacttctacagcgaccagcctgagatcgccctgcgcttctaccgccgcctgctgcagatgggcatctacaacggccagctgttcaacaacctgggcctgtgctgcttctacgcccagcagtatgacatgaccctgaccagctttgagcgggccctgagcctggctgaaaatgaggaggaggccgcagatgtgtggtacaacctgggccacgtggccgtgggcatcggggacaccaacctggcccaccagtgcttccggctggccctggtgaacaacaacaaccacgccgaggcctacaacaacctggccgtgctggagatgaggaagggccacgtggagcaggcccgggccctgctgcagacagccagcagcctggccccccacatgtatgagccccacttcaactttgccaccatcagtgacaagatcggggacctgcagaggagctatgtggccgcccagaagtctgaggccgccttcccagaccacgtggacacccagcacctgatcaagcagctgcggcagcactttgccatgctgtag

SEQ ID NO: 107156 - DNA, 1596 bp, Artificial Sequence
  derived and/or modified sequence
atgagcagcgagatggagcccctgctgctggcctggagctacttccggaggagaaagttccaattatgcgccgatctgtgtacacagatgctggagaagtctccttatgatcaagccgcgtggattttaaaagctcgcgccctgaccgaaatggtgtatatcgacgagatcgatgttgaccaagaaggtatagctgaaatgatgcttgacgaaaacgctatcgctcaggtaccacggccaggtacctccttaaagttaccaggaacaaatcaaaccggtggtccttcccaagcagtccgacccataacgcaagctgggcgcccgattaccggattccttcggccttcaacacaaagtggcaggccgggcaccatggaacaggctatcaggaccccgcggactgcctacacggcaaggccaatcacttcttcttcagggcgcttcgtgcgcctagggacggcttcaatgctgacatcgccagatgggcccttcattaacctcagcagactaaacttaacaaagtatagccaaaagcccaaactggcgaaagctctctttgagtatattttccatcatgaaaacgacgtgaagacaatccacttggaggacgtcgttctgcatctggggatttacccttttctcctgcgcaacaaaaaccacatcgaaaaaaacgcgctcgacttggctgccctcagcaccgagcacagccagtacaaagactggtggtggaaggtgcagatagggaaatgttactacagactaggcatgtaccgtgaggccgagaagcagttcaagtccgccctaaagcaacaagaaatggtcgatacattcttgtatctggcaaaggtgtacgtttctttggaccaacctgtgaccgccctgaacctattcaagcagggtctcgataaatttcctggcgaggtgactctgctgtgtggtattgcacggatttacgaggaaatgaacaatatgtcttcagccgcagagtactataaagaagtcctaaaacaggacaacacccacgtggaggcgatcgcttgcattggatctaatcacttttacagcgatcagcccgagatcgcgctccgtttctatcgacgtctactgcagatgggcatatataacggccagcttttcaataacctcggactgtgctgtttctatgcccagcagtacgacatgacactgacctcattcgagcgggcccttagtctcgcggaaaacgaggaggaggctgcagatgtgtggtacaacttgggacacgtggctgtgggaattggggatacaaaccttgcccatcaatgtttccggctagcactggtcaacaataacaaccacgctgaggcatataataacctggcagttttggagatgcgcaagggccatgttgaacaagcgagggctctgttgcagacggctagctcgctcgccccccatatgtatgaacctcattttaacttcgccacgatcagcgataaaataggcgacctccagcgatcttatgttgccgcccaaaagtcagaagccgcctttccagatcatgtggacacccagcaccttattaagcagctgagacagcattttgcaatgctctag

SEQ ID NO: 107157 - DNA, 1596 bp, Artificial Sequence
  derived and/or modified sequence
atgagctcagaaatggagcccctcctgctagcctggtcctattttcggaggaggaagtttcagctgtgcgccgacctgtgtacccagatgttggaaaaaagtccttatgaccaggcagcctggatcctgaaagctcgcgctctgacagagatggtctatatcgatgagatagacgttgatcaggagggcattgccgagatgatgttggacgagaacgcgatagcacaggtaccaagaccgggaacttctctaaagctccctggcaccaaccagactggcggaccttcccaggccgtcagacctataacccaagccggtcggccaattaccggcttcctcaggccaagcacccaatcaggaaggccaggcacgatggagcaggccatccggacaccacgtactgcttatacagcccgaccaattacttcctccagtggacgcttcgtgagacttgggacagcatccatgcttaccagccccgatggaccatttatcaatctgtcacgtctgaatttaaccaagtattcgcaaaagcctaaactggcaaaggccctgtttgagtatattttccaccatgagaatgacgtgaagacaatccatctcgaggacgtggtgctccacttaggcatataccctttcctccttagaaataagaatcacattgagaagaatgccctagacctcgcagccttgtctaccgaacactcccagtataaagactggtggtggaaggtgcagattggtaaatgttattaccggctcggaatgtatcgagaagctgaaaagcaattcaaatcagccctgaagcagcaagagatggtcgacacattcctgtatctagcaaaagtctacgtttctctggatcagcccgttactgcactcaatctgttcaagcagggccttgacaagtttcccggtgaggtcaccctattatgtggcatcgctagaatttacgaagaaatgaacaacatgagtagcgccgctgaatactataaggaagtcctaaagcaggacaacacccacgtggaagcaattgcatgtatcggctccaaccacttctacagcgaccagcccgagattgccctgaggttctataggcgactgttgcagatgggtatttacaacggacagttattcaataatctggggctgtgttgtttttacgcgcaacaatacgacatgactctcacaagttttgagagagccttgagcctagccgagaacgaagaggaggccgcagatgtctggtataacctgggccatgtcgctgtaggcataggagacaccaacctggcccaccagtgctttcgcctggctttggttaacaataataaccacgccgaggcctataacaatctggccgtcctagagatgcgcaaaggtcacgttgaacaggctcgcgctctgctgcaaaccgcttcttctcttgccccacacatgtacgagccgcactttaacttcgctacaatctcagataaaatcggggatttacagagatcatacgtcgctgcgcagaagtctgaagctgccttccccgaccacgtggatacacagcatctgatcaagcagctgaggcagcattttgctatgttatag

SEQ ID NO: 107158 - DNA, 2226 bp, Artificial Sequence
  derived and/or modified sequence
acgcccacctctctcctggagcgctgggccttcgctggccgcaccggcagccatgagctcggagatggagccgctgctcctggcctggagctattttaggcgcaggaagttccagctctgcgccgatctatgcacgcagatgctggagaagtccccttatgaccaggcagcttggatcttaaaagcaagagcgctaacagaaatggtatacatagatgaaattgatgtagatcaggaaggaattgcagaaatgatgctggatgaaaatgctatagctcaagttccacgccctggaacgtctttgaaactccctggaactaatcagacaggagggcctagccaggccgttaggccaatcacacaagctggaagacccattacaggtttcctcaggcccagcacgcagagtggaaggccaggcactatggaacaggctatcagaacacccagaaccgcctacacagcccgccctatcaccagctcctccggaagatttgtcaggctgggaacggcttccatgcttacaagtcctgatggaccatttataaatttatctaggctgaatttaacaaagtattcccagaaacctaagttggcaaaggctttgtttgagtatatctttcatcatgaaaatgatgttaagactattcatcttgaagatgtagttctacatcttggaatttacccattcttattgaggaataaaaatcacattgaaaaaaatgctttggatctggctgccctctccacagaacattctcagtacaaggactggtggtggaaagtacagattggaaaatgttactacaggttgggaatgtatcgtgaagcagaaaaacagtttaaatcagccctgaagcagcaggaaatggtagatacatttctgtacttggcaaaagtttatgtctcattggatcaacctgtgactgctttaaatcttttcaaacaaggcttagataagtttccaggagaagtaaccctgctctgtggaattgcaagaatctatgaggaaatgaacaatatgtcatcagcagcagaatattacaaagaagttttgaaacaagacaatactcatgtggaagccatcgcatgcattggaagcaaccacttctattctgatcagccagaaatagctctccggttttacaggcggctgctgcagatgggcatttataacggccagctttttaacaatctggggctgtgttgcttctatgcccagcagtatgatatgactctgacctcatttgaacgtgccctttctttggctgaaaatgaagaagaggcagctgatgtctggtacaacttgggacatgtagctgtgggaataggagatacaaatttggcccatcagtgcttcaggctggctctggtcaacaacaacaaccacgccgaggcctacaacaacctggctgtgctggagatgcggaagggccacgttgaacaggcaagggcactattacaaactgcatcatcattagcaccccatatgtatgaaccgcattttaattttgcaacaatctctgataagattggagatctgcagagaagctatgttgctgcgcagaagtctgaagcagcatttccagaccatgtggacacacaacatttaattaaacaattaaggcagcattttgctatgctctgattgttccttagaccacatatgttcttatgaagcagcattatgcaaggggaaaaaagcactatgtctgtgtatgtatgtatatagtgtaatacgtatattttaacaaacctgtccttgatattagttaaggtgacacataagggtgacacagaatgtgtaatgcaaatttcatagtaatagtaactttataaaataatattataaaatacaggatttaaacctttctaaatagatcctgaaactgtctctcacattatatagtagatgtttgtttataatgtttacaaaacattttggtgaatttcctcaatgttttataaatgtacattttttaagtccttaagctgactcttagccatcatgtagcttaaggagtctgaaatctgccattaaaactgcacctttaagccaggtgtggtagcatgtgcctatagtcccagctacttgggaggtggaggtgggaggattataaatagagactttccttaagactttaaaaatgtatttaaaactattttttattaaatactttgtgatttcctattaagctttaaaataaatcattgtgtaaaacacca

SEQ ID NO: 107159 - protein, 317 aa, Artificial Sequence
  derived and/or modified sequence
MILSYEVILHALDLAALSTEHSQYKDWWWKVQIGKCYYRLGMYREAEKQFKSALKQQEMVDTFLYLAKVYVSLDQPVTALNLFKQGLDKFPGEVTLLCGIARIYEEMNNMSSAAEYYKEVLKQDNTHVEAIACIGSNHFYSDQPEIALRFYRRLLQMGIYNGQLFNNLGLCCFYAQQYDMTLTSFERALSLAENEEEAADVWYNLGHVAVGIGDTNLAHQCFRLALVNNNNHAEAYNNLAVLEMRKGHVEQARALLQTASSLAPHMYEPHFNFATISDKIGDLQRSYVAAQKSEAAFPDHVDTQHLIKQLRQHFAML

SEQ ID NO: 107160 - DNA, 954 bp, Artificial Sequence
  derived and/or modified sequence
atgatcctgagctacgaggtgatcctgcacgccctggacctggccgccctgagcaccgagcacagccagtacaaggactggtggtggaaggtgcagatcggcaagtgctactacagactgggcatgtacagagaggccgagaagcagttcaagagcgccctgaagcagcaggagatggtggacaccttcctgtacctggccaaggtgtacgtgagcctggaccagcccgtgaccgccctgaacctgttcaagcagggcctggacaagttccccggcgaggtgaccctgctgtgcggcatcgccagaatctacgaggagatgaacaacatgagcagcgccgccgagtactacaaggaggtgctgaagcaggacaacacccacgtggaggccatcgcctgcatcggcagcaaccacttctacagcgaccagcccgagatcgccctgagattctacagaagactgctgcagatgggcatctacaacggccagctgttcaacaacctgggcctgtgctgcttctacgcccagcagtacgacatgaccctgaccagcttcgagagagccctgagcctggccgagaacgaggaggaggccgccgacgtgtggtacaacctgggccacgtggccgtgggcatcggcgacaccaacctggcccaccagtgcttcagactggccctggtgaacaacaacaaccacgccgaggcctacaacaacctggccgtgctggagatgagaaagggccacgtggagcaggccagagccctgctgcagaccgccagcagcctggccccccacatgtacgagccccacttcaacttcgccaccatcagcgacaagatcggcgacctgcagagaagctacgtggccgcccagaagagcgaggccgccttccccgaccacgtggacacccagcacctgatcaagcagctgagacagcacttcgccatgctgtag

SEQ ID NO: 107161 - DNA, 954 bp, Artificial Sequence
  derived and/or modified sequence
atgatcttgtcttatgaagtgatactgcacgctttggacctcgcagcgctcagcaccgaacactctcagtacaaggactggtggtggaaagtgcaaattggaaaatgttactatcggcttggtatgtatcgggaagcggagaagcaattcaagtcagccctgaaacaacaggaaatggttgatactttcctttacctggcaaaggtgtatgtgtctctggaccaaccggtgactgctctgaacctttttaagcaaggcctggataaattccctggagaagtcacgctcctctgtggcattgccagaatctatgaagagatgaataatatgagctcggcggccgaatactataaggaggtgctgaagcaggacaacacacacgtcgaggctatagcttgcatcggatcaaaccacttttattcagaccaacctgaaatcgcactgaggttctataggagacttctgcagatgggaatttataatggacaactgttcaacaacttggggctatgttgcttctatgcacagcagtatgatatgaccttaacgagcttcgagcgcgctctaagtctcgccgaaaatgaagaggaagctgctgacgtttggtacaatctgggccatgtcgctgtgggtattggagacacaaacttggcccaccagtgttttcgcctggcactcgttaacaataacaaccatgctgaggcatacaacaatctggccgtgctggagatgcggaaaggacacgtggagcaggctcgggctcttttgcagacagcctcttccctggccccacatatgtacgaaccccacttcaactttgccactatttccgacaagataggggatttgcaacgcagttacgttgccgcccagaaatccgaagcagccttccccgatcacgtagatacacagcacctgatcaaacaactgcggcagcatttcgctatgctctag

SEQ ID NO: 107162 - DNA, 954 bp, Artificial Sequence
  derived and/or modified sequence
atgatcctgtcctatgaagtcatcctgcacgccctggacctggccgccctgagcacagagcacagccagtacaaggactggtggtggaaggtgcagatcggcaagtgctactaccgcctgggcatgtaccgggaggccgagaagcagttcaagagcgccctgaagcagcaggagatggtggacaccttcctgtacctggccaaggtgtatgtgtccctggaccagcctgtgacagccctgaacctcttcaagcagggcctggacaagtttcctggagaggtgaccctgctgtgtggcatcgcccgcatctatgaggagatgaacaacatgagcagcgctgctgagtactacaaggaggtgctgaagcaggacaacacccacgtggaggccatcgcctgcatcggcagcaaccacttctacagcgaccagcctgagatcgccctgcgcttctaccgccgcctgctgcagatgggcatctacaacggccagctgttcaacaacctgggcctgtgctgcttctacgcccagcagtatgacatgaccctgaccagctttgagcgggccctgagcctggctgaaaatgaggaggaggccgcagatgtgtggtacaacctgggccacgtggccgtgggcatcggggacaccaacctggcccaccagtgcttccggctggccctggtgaacaacaacaaccacgccgaggcctacaacaacctggccgtgctggagatgaggaagggccacgtggagcaggcccgggccctgctgcagacagccagcagcctggccccccacatgtatgagccccacttcaactttgccaccatcagtgacaagatcggggacctgcagaggagctatgtggccgcccagaagtctgaggccgccttcccagaccacgtggacacccagcacctgatcaagcagctgcggcagcactttgccatgctgtag

SEQ ID NO: 107163 - DNA, 954 bp, Artificial Sequence
  derived and/or modified sequence
atgatcctgagctacgaggtgatcctgcacgccctggacctggccgcactcagtactgaacacagccagtataaggactggtggtggaaagttcagattggtaaatgctattaccggctagggatgtaccgcgaagcagagaagcagttcaaaagtgcactgaaacaacaggagatggttgatacgttcttatatctcgcaaaggtgtacgtgtccctggatcagccggttaccgctctaaacctttttaagcagggactggacaaattccccggggaggttacactcctctgcggaatagcaaggatatatgaagaaatgaacaacatgtcttccgccgcagaatactacaaagaagtactgaaacaggataacacacatgttgaggcaatcgcctgtatcgggtcaaatcatttctattcggaccaacctgagatcgctctacgattttatcggcgacttttgcagatgggtatttataatgggcagctgttcaataatctgggtctgtgttgtttctacgcccagcagtacgacatgacactgacctcattcgagagggccttatccttggccgagaatgaggaagaagcagctgatgtgtggtataaccttggccacgtggcagtgggtataggagatacaaaccttgcccaccagtgttttagactggccctggtgaacaacaacaaccacgcagaggcttacaataacctggcggttctagaaatgagaaagggccacgtggaacaggcacgggccctcctgcagactgcgtcatccctcgctcctcacatgtatgagccgcactttaactttgccaccatcagcgacaagatcggagacttgcagagaagttacgttgctgcacagaagtcagaggcagccttccccgaccatgtagacacccagcacctgatcaagcaactccggcaacatttcgccatgttatag

SEQ ID NO: 107164 - DNA, 954 bp, Artificial Sequence
  derived and/or modified sequence
atgatcctgtcctacgaagtgattctgcatgctctcgaccttgccgcactctcaaccgaacatagtcaatacaaggactggtggtggaaagtccagatcggtaaatgttattataggttgggaatgtaccgagaagctgagaagcagtttaagagtgcactcaaacagcaggaaatggtcgatactttcttgtacctagccaaggtgtatgtgtcgctggaccagcccgtgaccgctctaaacctttttaaacaggggctggacaaattcccaggcgaagtcaccctgctgtgcggcatcgctagaatttacgaagaaatgaacaatatgagctcagctgcagagtattataaggaagttcttaaacaggacaacactcatgtcgaagcgatcgcctgcattggttccaaccatttctactctgatcagcccgagatcgctttgcgcttttaccggagattgctgcaaatgggaatctataatgggcaactgttcaataacttaggcctttgctgtttctacgctcaacaatatgacatgacccttacgtctttcgagagggccctgtccctcgccgaaaatgaggaggaagcagcagatgtatggtataatttggggcacgtggccgtcggaatcggagataccaatctcgctcatcaatgcttccgcttggccttagtcaataataacaaccacgctgaagcatacaataaccttgcagtgctggagatgcggaaagggcacgtcgagcaagctagggctttgctgcagaccgccagctcactagctccccatatgtacgagcctcacttcaacttcgcaactatttctgacaagattggcgatttgcagcgttcatacgtcgccgcacagaagagtgaggcagcttttcctgatcacgtagatacacagcatcttattaagcagctacgtcagcatttcgcgatgctgtag

SEQ ID NO: 107165 - DNA, 1531 bp, Artificial Sequence
  derived and/or modified sequence
atgattttgagttatgaagtaatattacacgctttggatctggctgccctctccacagaacattctcagtacaaggactggtggtggaaagtacagattggaaaatgttactacaggttgggaatgtatcgtgaagcagaaaaacagtttaaatcagccctgaagcagcaggaaatggtagatacatttctgtacttggcaaaagtttatgtctcattggatcaacctgtgactgctttaaatcttttcaaacaaggcttagataagtttccaggagaagtaaccctgctctgtggaattgcaagaatctatgaggaaatgaacaatatgtcatcagcagcagaatattacaaagaagttttgaaacaagacaatactcatgtggaagccatcgcatgcattggaagcaaccacttctattctgatcagccagaaatagctctccggttttacaggcggctgctgcagatgggcatttataacggccagctttttaacaatctggggctgtgttgcttctatgcccagcagtatgatatgactctgacctcatttgaacgtgccctttctttggctgaaaatgaagaagaggcagctgatgtctggtacaacttgggacatgtagctgtgggaataggagatacaaatttggcccatcagtgcttcaggctggctctggtcaacaacaacaaccacgccgaggcctacaacaacctggctgtgctggagatgcggaagggccacgttgaacaggcaagggcactattacaaactgcatcatcattagcaccccatatgtatgaaccgcattttaattttgcaacaatctctgataagattggagatctgcagagaagctatgttgctgcgcagaagtctgaagcagcatttccagaccatgtggacacacaacatttaattaaacaattaaggcagcattttgctatgctctgattgttccttagaccacatatgttcttatgaagcagcattatgcaaggggaaaaaagcactatgtctgtgtatgtatgtatatagtgtaatacgtatattttaacaaacctgtccttgatattagttaaggtgacacataagggtgacacagaatgtgtaatgcaaatttcatagtaatagtaactttataaaataatattataaaatacaggatttaaacctttctaaatagatcctgaaactgtctctcacattatatagtagatgtttgtttataatgtttacaaaacattttggtgaatttcctcaatgttttataaatgtacattttttaagtccttaagctgactcttagccatcatgtagcttaaggagtctgaaatctgccattaaaactgcacctttaagccaggtgtggtagcatgtgcctatagtcccagctacttgggaggtggaggtgggaggattataaatagagactttccttaagactttaaaaatgtatttaaaactattttttattaaatactttgtgatttcctattaagctttaaaataaatcattgtgtaaaacacc

SEQ ID NO: 107166 - DNA, 753 bp, Artificial Sequence
  derived and/or modified sequence
atgagcagcgagatggagcccctgctgctggcctggagctacttcagaagaagaaagttccagctgtgcgccgacctgtgcacccagatgctggagaagagcccctacgaccaggagatgaacaacatgagcagcgccgccgagtactacaaggaggtgctgaagcaggacaacacccacgtggaggccatcgcctgcatcggcagcaaccacttctacagcgaccagcccgagatcgccctgagattctacagaagactgctgcagatgggcatctacaacggccagctgttcaacaacctgggcctgtgctgcttctacgcccagcagtacgacatgaccctgaccagcttcgagagagccctgagcctggccgagaacgaggaggaggccgccgacgtgtggtacaacctgggccacgtggccgtgggcatcggcgacaccaacctggcccaccagtgcttcagactggccctggtgaacaacaacaaccacgccgaggcctacaacaacctggccgtgctggagatgagaaagggccacgtggagcaggccagagccctgctgcagaccgccagcagcctggccccccacatgtacgagccccacttcaacttcgccaccatcagcgacaagatcggcgacctgcagagaagctacgtggccgcccagaagagcgaggccgccttccccgaccacgtggacacccagcacctgatcaagcagctgagacagcacttcgccatgctgtag

SEQ ID NO: 107167 - DNA, 831 bp, Artificial Sequence
  derived and/or modified sequence
atgtacagagaggccgagaagcagttcaagagcgccctgaagcagcaggagatggtggacaccttcctgtacctggccaaggtgtacgtgagcctggaccagcccgtgaccgccctgaacctgttcaagcagggcctggacaagttccccggcgaggtgaccctgctgtgcggcatcgccagaatctacgaggagatgaacaacatgagcagcgccgccgagtactacaaggaggtgctgaagcaggacaacacccacgtggaggccatcgcctgcatcggcagcaaccacttctacagcgaccagcccgagatcgccctgagattctacagaagactgctgcagatgggcatctacaacggccagctgttcaacaacctgggcctgtgctgcttctacgcccagcagtacgacatgaccctgaccagcttcgagagagccctgagcctggccgagaacgaggaggaggccgccgacgtgtggtacaacctgggccacgtggccgtgggcatcggcgacaccaacctggcccaccagtgcttcagactggccctggtgaacaacaacaaccacgccgaggcctacaacaacctggccgtgctggagatgagaaagggccacgtggagcaggccagagccctgctgcagaccgccagcagcctggccccccacatgtacgagccccacttcaacttcgccaccatcagcgacaagatcggcgacctgcagagaagctacgtggccgcccagaagagcgaggccgccttccccgaccacgtggacacccagcacctgatcaagcagctgagacagcacttcgccatgctgtag

SEQ ID NO: 107168 - DNA, 753 bp, Artificial Sequence
  derived and/or modified sequence
atgtccagcgaaatggaacccctgcttctggcttggtcctattttaggagaaggaagttccaactttgtgctgacctatgcactcaaatgcttgaaaaaagtccatacgaccaggaaatgaacaacatgtccagcgctgccgagtattataaagaagtgctcaaacaggataatacgcacgttgaagctatcgcctgcatcggctcaaaccacttttattcagatcaacccgaaatagctcttaggttctaccgccgtctgctgcaaatgggaatctataatggtcagcttttcaataatcttggactctgttgcttctatgctcagcagtatgacatgacgcttactagcttcgaaagagccttgtcccttgctgagaacgaagaggaggcagcagacgtttggtacaacctgggccatgtggccgttgggataggagacacaaatctagcgcatcagtgcttcaggctcgctcttgttaacaataacaatcatgcggaggcgtacaataacttggccgttctggagatgcgaaaggggcatgtcgaacaggcaagggctttgctgcagacagcttcaagcctcgcgcctcatatgtatgagccccattttaattttgccaccatctctgacaaaataggagacttacaacgcagctacgtcgccgcccagaagagtgaggctgccttccctgaccacgtcgatacccaacacctgataaagcagttgcggcaacacttcgcaatgctctag

SEQ ID NO: 107169 - DNA, 831 bp, Artificial Sequence
  derived and/or modified sequence
atgtatagagaggcagaaaagcaattcaaaagtgcactgaagcagcaggagatggtcgacacatttctgtaccttgccaaggtttatgtctcacttgaccagcccgttactgcactcaacctcttcaagcagggactggataaattccctggcgaggtgacactactctgcgggatagcgagaatctacgaggagatgaacaatatgtcttcagcagcagagtactacaaagaagtgctgaagcaggataatacccatgtggaggccatcgcctgcattggcagcaatcatttctactccgatcaaccagagattgccctccgattctaccggcgcctgctacagatggggatctacaacggacagctctttaacaaccttggcctctgctgcttttatgctcagcagtatgacatgactctaaccagtttcgaacgggcattgtccttggctgagaacgaggaagaagcagcagatgtgtggtataatttggggcacgttgcagtggggataggagatacaaatctggctcatcagtgtttccggttagctcttgtgaacaacaacaaccacgctgaggcttataacaatttggctgtgctggagatgcgtaagggccatgtcgaacaggcacgggcactactgcagacggcatccagcctggcgccccacatgtacgaaccacattttaattttgcgacgatctccgataagatcggcgatctgcagagaagctatgtggcagctcagaaaagcgaggccgcttttcctgaccacgtggacacacagcatttaatcaaacaactgagacagcattttgctatgctttag

SEQ ID NO: 107170 - DNA, 753 bp, Artificial Sequence
  derived and/or modified sequence
atgagcagcgagatggagcccctgctgctggcctggagctacttcagaagaaggaagttccagctgtgtgccgacctgtgcacccagatgctggagaagagcccctatgaccaggagatgaacaacatgagcagcgctgctgagtactacaaggaggtgctgaagcaggacaacacccacgtggaggccatcgcctgcatcggcagcaaccacttctacagcgaccagcctgagatcgccctgcgcttctacagaaggctgctgcagatgggcatctacaacggccagctgttcaacaacctgggcctgtgctgcttctacgcccagcagtatgacatgaccctgaccagctttgagcgggccctgagcctggccgagaatgaggaggaggccgcagatgtgtggtacaacctgggccacgtggccgtgggcattggagacaccaacctggcccaccagtgcttccggctggccctggtgaacaacaacaaccacgccgaggcctacaacaacctggccgtgctggagatgaggaaaggacatgtggagcaggcccgggccctgctgcagacagccagcagcctggccccccacatgtatgagccccacttcaactttgccaccatcagtgacaagattggagacctgcagaggagctatgtggccgcccagaagtctgaggccgccttcccagaccacgtggacacccagcacctgatcaagcagctgcggcagcactttgccatgctgtag

SEQ ID NO: 107171 - DNA, 831 bp, Artificial Sequence
  derived and/or modified sequence
atgtaccgggaggccgagaagcagttcaagagcgccctgaagcagcaggagatggtggacaccttcctgtacctggccaaggtgtatgtgtccctggaccagcctgtgacagccctgaacctcttcaagcagggcctggacaagtttcctggagaggtgaccctgctgtgtggcatcgcccgcatctatgaggagatgaacaacatgagcagcgctgctgagtactacaaggaggtgctgaagcaggacaacacccacgtggaggccatcgcctgcatcggcagcaaccacttctacagcgaccagcctgagatcgccctgcgcttctacagaaggctgctgcagatgggcatctacaacggccagctgttcaacaacctgggcctgtgctgcttctacgcccagcagtatgacatgaccctgaccagctttgagcgggccctgagcctggccgagaatgaggaggaggccgcagatgtgtggtacaacctgggccacgtggccgtgggcattggagacaccaacctggcccaccagtgcttccggctggccctggtgaacaacaacaaccacgccgaggcctacaacaacctggccgtgctggagatgaggaaaggacatgtggagcaggcccgggccctgctgcagacagccagcagcctggccccccacatgtatgagccccacttcaactttgccaccatcagtgacaagattggagacctgcagaggagctatgtggccgcccagaagtctgaggccgccttcccagaccacgtggacacccagcacctgatcaagcagctgcggcagcactttgccatgctgtag

SEQ ID NO: 107172 - DNA, 753 bp, Artificial Sequence
  derived and/or modified sequence
atgagcagcgagatggagcccctgctgctggcctggagctacttcagacgccggaaattccagctgtgtgcagatctgtgcacacagatgctcgagaagagtccttacgatcaggagatgaacaatatgagttctgcagccgaatactataaggaagttctgaaacaggataacacacatgtggaggccatagcctgtattggttcaaatcatttctattccgaccaacctgagatcgctttaaggttctaccggaggctgctgcagatgggcatatacaacgggcagctgtttaacaacttaggactgtgttgcttttatgctcagcagtacgatatgacgctgacatcttttgaacgggccctttccctggctgagaacgaggaggaggctgcagacgtatggtataacctcggacacgtggcagtggggatcggtgatacgaaccttgctcatcaatgtttccggctggcactggtgaataacaataaccacgcggaagcctacaataatcttgctgttctggagatgagaaaaggccatgtggagcaggcaagggctctgctgcaaacagcatcttctctggcaccacatatgtatgaacctcattttaactttgccacaatttcagataagattggtgacctccaacgaagttacgttgcagcccaaaagtctgaggctgcctttcctgatcacgtggacacccagcatcttatcaagcagctgcggcagcactttgccatgctatag

SEQ ID NO: 107173 - DNA, 831 bp, Artificial Sequence
  derived and/or modified sequence
atgtaccgggaggccgagaagcagttcaagagcgccctgaagcagcaggagatggtggacacctttctctatctggccaaagtgtacgtgagcctcgaccagcccgtgaccgctctaaacttgttcaaacagggactagacaagttcccaggcgaagtgacgcttttgtgcggaatagcgcgtatctatgaggagatgaataatatgagttccgccgctgaatactacaaggaagtgctcaagcaagacaacacacatgtggaagccatcgcttgcattggatccaatcatttttactccgatcagcctgaaatagctctccgcttttacagaaggttgcttcagatgggtatctataacggccagctgttcaataatctggggctctgctgcttttatgctcaacagtacgatatgacattgactagttttgagcgagctctgagtctagcggaaaacgaagaagaggcggcagacgtgtggtataacttaggccacgtagcagtcggaattggtgacactaacctggcccaccaatgctttaggctcgccctcgttaataacaacaatcacgctgaagcctacaacaatcttgctgtgctggagatgaggaaaggccatgttgagcaggcccgagcactgctgcagactgcttcttctctagcaccgcatatgtacgagccccacttcaattttgccacaatttccgataaaattggcgacctacaaaggagttacgtcgctgcacaaaaaagcgaagcagctttccccgaccacgtcgacacccaacacttgattaagcagctaaggcagcacttcgccatgttatag

SEQ ID NO: 107174 - DNA, 753 bp, Artificial Sequence
  derived and/or modified sequence
atgtcatcggaaatggagccgctgcttcttgcttggtcttatttccgcaggagaaagtttcagctatgcgccgacctctgcacgcagatgctggaaaagagcccatacgaccaagagatgaataacatgtcctccgccgctgaatactacaaggaagtgctgaagcaggataacacacacgtggaggccattgcgtgcatcggcagcaatcacttctactcagatcagcccgaaatcgcgttacgtttctatcggcgtttattacagatgggaatctataatggccagctgtttaataacctgggactctgttgtttttacgctcaacagtacgatatgaccctaacttcatttgagcgagctttatctctcgccgaaaatgaggaggaagctgctgacgtgtggtacaatcttggccatgtggcggtagggataggagatactaaccttgcgcaccaatgttttcggctggcactcgtgaacaacaataaccatgccgaagcctacaataacctggccgtcctggaaatgcgcaagggccacgtggaacaggcccgagcattactacagaccgcgagcagtctggcgcctcatatgtacgagccacatttcaactttgcaacaatttcagataaaatcggcgacctgcagaggtcttacgtggcagcacagaaatccgaagccgcttttcctgaccacgtagatacacagcatctcattaaacagctgaggcaacactttgccatgttatag

SEQ ID NO: 107175 - DNA, 831 bp, Artificial Sequence
  derived and/or modified sequence
atgtaccgggaagctgagaagcaattcaaatccgctctgaaacaacaagaaatggttgatacctttctctatctagcgaaggtatacgtctccctggatcagcctgtgacagcgctgaacctgttcaagcagggactggacaaattccccggtgaagttacgctgttgtgcggtattgctaggatatatgaagagatgaataatatgagttccgcagcggagtattataaagaagtactgaagcaggacaacacgcacgtggaggccatcgcatgtataggcagcaaccatttttacagtgaccagcctgagatcgcgctccgtttctaccggaggctgctgcagatgggcatctacaacgggcagctcttcaacaacctgggcctgtgctgcttttacgcgcagcaatacgacatgacccttacctctttcgagagggcattgtctctcgccgagaatgaggaggaggcagctgatgtctggtacaatctggggcatgtggccgtagggattggcgatacaaatctggcccatcagtgctttaggttggccttagtcaacaacaacaaccacgccgaagcctacaacaacctggccgtgttagagatgcgcaaagggcacgtagagcaagctcgcgctcttctgcagaccgcatcaagtctggcccctcacatgtatgaaccgcactttaacttcgccacgatctcagacaagattggtgacttacagcgatcttatgtcgccgctcagaagtcagaggcggcattcccagatcacgttgatacccaacacctgatcaagcaactcagacagcacttcgcaatgctgtag

SEQ ID NO: 107176 - DNA, 1342 bp, Artificial Sequence
  derived and/or modified sequence
ccacctctctcctggagcgctgggccttcgctggccgcaccggcagccatgagctcggagatggagccgctgctcctggcctggagctattttaggcgcaggaagttccagctctgcgccgatctatgcacgcagatgctggagaagtccccttatgaccaggaaatgaacaatatgtcatcagcagcagaatattacaaagaagttttgaaacaagacaatactcatgtggaagccatcgcatgcattggaagcaaccacttctattctgatcagccagaaatagctctccggttttacaggcggctgctgcagatgggcatttataacggccagctttttaacaatctggggctgtgttgcttctatgcccagcagtatgatatgactctgacctcatttgaacgtgccctttctttggctgaaaatgaagaagaggcagctgatgtctggtacaacttgggacatgtagctgtgggaataggagatacaaatttggcccatcagtgcttcaggctggctctggtcaacaacaacaaccacgccgaggcctacaacaacctggctgtgctggagatgcggaagggccacgttgaacaggcaagggcactattacaaactgcatcatcattagcaccccatatgtatgaaccgcattttaattttgcaacaatctctgataagattggagatctgcagagaagctatgttgctgcgcagaagtctgaagcagcatttccagaccatgtggacacacaacatttaattaaacaattaaggcagcattttgctatgctctgattgttccttagaccacatatgttcttatgaagcagcattatgcaaggggaaaaaagcactatgtctgtgtatgtatgtatatagtgtaatacgtatattttaacaaacctgtccttgatattagttaaggtgacacataagggtgacacagaatgtgtaatgcaaatttcatagtaatagtaactttataaaataatattataaaatacaggatttaaacctttctaaatagatcctgaaactgtctctcacattatatagtagatgtttgtttataatgtttacaaaacattttggtgaatttcctcaatgttttataaatgtacattttttaagtccttaagctgactcttagccatcatgtagcttaaggagtctgaaatctgccattaaaactgcacctttaagccaggtgtggtagcatgtgcctatagtcccagctacttgggaggtggaggtgggaggattataaatagagactttccttaagactttaaaaatgtatttaaaactattttttattaaatactttgtgatttcc

SEQ ID NO: 107177 - protein, 148 aa, Artificial Sequence
  derived and/or modified sequence
MRKRMGPTRLPRLECSGAITAHCSLDLPGPDKHDELEAPSMKTDTRTIFVAIFSCISILLLFLSVFIIYRCSQHSSSSEESTKRTSHSKLPEQEAAEADLSNMERVSLSTADPQGVTYAELSTSALSEAASDTTQEPPGSHEYAALKV

SEQ ID NO: 107178 - DNA, 447 bp, Artificial Sequence
  derived and/or modified sequence
atgagaaagagaatgggccccaccagactgcccagactggagtgcagcggcgccatcaccgcccactgcagcctggacctgcccggccccgacaagcacgacgagctggaggcccccagcatgaagaccgacaccagaaccatcttcgtggccatcttcagctgcatcagcatcctgctgctgttcctgagcgtgttcatcatctacagatgcagccagcacagcagcagcagcgaggagagcaccaagagaaccagccacagcaagctgcccgagcaggaggccgccgaggccgacctgagcaacatggagagagtgagcctgagcaccgccgacccccagggcgtgacctacgccgagctgagcaccagcgccctgagcgaggccgccagcgacaccacccaggagccccccggcagccacgagtacgccgccctgaaggtgtag

SEQ ID NO: 107179 - DNA, 447 bp, Artificial Sequence
  derived and/or modified sequence
atgagaaagcgcatgggcccgacgcgactgcccaggctggagtgttctggcgctattactgctcactgcagtctcgacctgcccgggccggataagcacgacgaattagaagccccttccatgaaaacggacacacgcaccatatttgttgctatcttcagctgcatctccatattactgctgttcttatctgttttcatcatctacaggtgttcacagcattcgagcagtagtgaggaatccacaaagcgaacatctcacagcaagttaccagagcaagaagcagccgaggctgatctttctaacatggagcgggtgtctcttagtaccgctgaccctcagggcgtgacttatgctgagctaagtacctcggctctgtcagaggccgcctccgataccacccaggagccacctggatcacacgagtacgcagccctgaaagtgtag

SEQ ID NO: 107180 - DNA, 447 bp, Artificial Sequence
  derived and/or modified sequence
atgaggaagaggatgggccccacccggctgccccggctggagtgcagcggggccatcacagcccactgcagcctggacctgcccggccctgacaagcatgatgagctggaggcccccagcatgaagacagacaccaggaccatctttgtggccatcttcagctgcatcagcatcctgctgctcttcctgagcgtcttcatcatctaccgctgcagccagcacagcagcagcagcgaggagagcaccaagaggaccagccacagcaagctgcctgagcaggaggccgctgaggccgacctgagcaacatggagcgggtgtccctgagcacagctgacccccagggcgtgacctatgcagagctgagcaccagcgccctgtctgaggccgccagtgacaccacccaggagcccccaggcagccatgaatatgctgccctgaaggtgtag

SEQ ID NO: 107181 - DNA, 447 bp, Artificial Sequence
  derived and/or modified sequence
atgcggaagcggatgggccccacccggctgccccggctggagtgctctggtgctataaccgcacattgttctctcgatttgcccggtcccgataagcacgacgagctagaggcaccgagcatgaaaacagacactaggaccatatttgttgccattttttcctgtatctcgattcttctcctgtttttgtccgttttcattatatacagatgtagtcaacactccagtagttctgaggagagtactaaacgcacatcccatagcaagttacctgaacaggaagctgcggaggcagacctgtcgaacatggaaagggtgtctctctctacagcggacccgcaaggcgtcacctacgcagaactatctaccagtgccctttctgaggccgccagtgacactacacaggagccgcccgggtcgcacgaatacgccgcgctcaaggtgtag

SEQ ID NO: 107182 - DNA, 447 bp, Artificial Sequence
  derived and/or modified sequence
atgaggaaacgcatgggccctacgcggctgcctcgcctcgaatgcagtggcgctattaccgcacactgctctctagacctgccgggacccgacaagcatgacgagttggaggccccttctatgaagacagacacccgtaccatctttgtcgccattttctcctgcatctctatactgttactgtttttgtcagtgttcattatctaccgatgcagccagcactcatcctccagcgaagaaagtacaaagcgtacaagccatagtaaactgcctgagcaagaggccgctgaggccgacctttccaatatggagcgtgtatccctgagtaccgctgatccccagggagtgacatacgccgagctgtctacgagtgcgttatcagaggcagcatctgacactactcaagagcccccaggttctcacgagtatgctgccctgaaggtttag

SEQ ID NO: 107183 - DNA, 524 bp, Artificial Sequence
  derived and/or modified sequence
gaagggacgctatgaccgcagaattcctctccctgctttgcctcgggctgtgtctgggctacgaagatgagaaaaagaatgggtcccactcggttgcccaggctggagtgcagtggtgcaatcacagctcactgcagccttgacctcccaggcccagataaacacgatgaacttgaagctccctcaatgaaaacagacaccagaaccatctttgtcgccatcttcagctgcatctccatccttctcctcttcctctcagtcttcatcatctacagatgcagccagcacagttcatcatctgaggaatccaccaagagaaccagccattccaaacttccggagcaggaggctgccgaggcagatttatccaatatggaaagggtatctctctcgacggcagacccccaaggagtgacctatgctgagctaagcaccagcgccctgtctgaggcagcttcagacaccacccaggagcccccaggatctcatgaatatgcggcactgaaagtgtagcaagaagacag

SEQ ID NO: 107184 - protein, 205 aa, Artificial Sequence
  derived and/or modified sequence
MTAEFLSLLCLGLCLGYEDEKKNEKPPKPSLHAWPSSVVEAESNVTLKCQAHSQNVTFVLRKVNDSGYKQEQSSAENEAEFPFTDLKPKDAGRYFCAYKTTASHEWSESSEHLQLVVTDKHDELEAPSMKTGSSSEESTKRTSHSKLPEQEAAEADLSNMERVSLSTADPQGVTYAELSTSALSEAASDTTQEPPGSHEYAALKV

SEQ ID NO: 107185 - DNA, 618 bp, Artificial Sequence
  derived and/or modified sequence
atgaccgccgagttcctgagcctgctgtgcctgggcctgtgcctgggctacgaggacgagaagaagaacgagaagccccccaagcccagcctgcacgcctggcccagcagcgtggtggaggccgagagcaacgtgaccctgaagtgccaggcccacagccagaacgtgaccttcgtgctgagaaaggtgaacgacagcggctacaagcaggagcagagcagcgccgagaacgaggccgagttccccttcaccgacctgaagcccaaggacgccggcagatacttctgcgcctacaagaccaccgccagccacgagtggagcgagagcagcgagcacctgcagctggtggtgaccgacaagcacgacgagctggaggcccccagcatgaagaccggcagcagcagcgaggagagcaccaagagaaccagccacagcaagctgcccgagcaggaggccgccgaggccgacctgagcaacatggagagagtgagcctgagcaccgccgacccccagggcgtgacctacgccgagctgagcaccagcgccctgagcgaggccgccagcgacaccacccaggagccccccggcagccacgagtacgccgccctgaaggtgtag

SEQ ID NO: 107186 - DNA, 432 bp, Artificial Sequence
  derived and/or modified sequence
atgaccgccgagttcctgagcctgctgtgcctgggcctgtgcctgggctacgaggacgagaagaagaacgagaagccccccaagcccagcctgcacgcctggcccagcagcgtggtggaggccgagagcaacgtgaccctgaagtgccaggcccacagccagaacgtgaccttcgtgctgagaaaggtgaacgacagcggctacaagcaggagcagagcagcgccgagaacgaggccgagttccccttcaccgacctgaagcccaaggacgccggcagatacttctgcgcctacaagaccaccgccagccacgagtggagcgagagcagcgagcacctgcagctggtggtgaccgacaagcacgacgagctggaggcccccagcatgaagaccgtggcccacgtgtgcaacaccagaaccctgggcagatag

SEQ ID NO: 107187 - DNA, 618 bp, Artificial Sequence
  derived and/or modified sequence
atgaccgcagagtttttgtcactgctgtgtctgggcctttgtctgggttatgaggacgagaagaaaaacgagaagccacccaaaccgagtctgcacgcctggccctccagtgtggttgaggcagagtcgaacgtgactctgaagtgccaagctcattcccagaacgtaaccttcgtgttacggaaggtaaatgacagcggctacaagcaagagcagtctagtgccgaaaatgaagccgaatttccttttactgaccttaaacccaaagatgctggacggtacttttgcgcttacaagaccacagcaagtcatgagtggtccgagagctctgagcacttgcagctcgtggtgaccgacaagcatgatgaactcgaggccccctcaatgaagaccggatccagttcagaggaaagcacaaagcggacctctcactccaaattacctgagcaggaggcggctgaagccgatttgagcaatatggaaagggtgagtctgtccactgctgaccctcagggcgtaacttacgccgagctctctacgagtgccttaagcgaagccgcttccgatacaactcaggagccacctggcagccatgagtatgctgccttaaaggtgtag

SEQ ID NO: 107188 - DNA, 432 bp, Artificial Sequence
  derived and/or modified sequence
atgacagccgagtttctcagccttctgtgtctaggactgtgtctgggttacgaggatgagaaaaagaacgagaaacccccaaaaccaagtctgcatgcctggccttcttcagtggttgaggctgagagcaacgtaactttaaagtgccaggcgcacagccagaacgtgactttcgtccttcggaaggtgaatgactctggatacaaacaggagcagagctcagccgaaaatgaagccgaattcccattcacagacctgaaacccaaggacgcgggaaggtacttttgcgcgtataagaccactgccagccacgagtggagtgaatcctctgaacacctacagctcgtggtgaccgacaagcacgatgaactggaagcaccctcaatgaagacggtggcgcatgtgtgcaatactcggacgctgggcaggtag

SEQ ID NO: 107189 - DNA, 618 bp, Artificial Sequence
  derived and/or modified sequence
atgacagctgagttcctgagcctgctgtgcctgggcctgtgcctgggctatgaagatgagaagaagaatgagaagccacccaagcccagcctgcacgcctggcccagctctgtggtggaggccgagagcaatgtgaccctgaagtgccaggcccacagccagaatgtgacctttgtgctgaggaaggtgaatgacagcggctacaagcaggagcagagcagcgcagaaaatgaagctgagttccccttcacagacctgaagcccaaggatgctggccgctacttctgtgcctacaagaccacagccagccatgagtggagcgagagcagcgagcacctgcagctggtggtgacagacaagcatgatgagctggaggcccccagcatgaagacaggcagcagcagcgaggagagcaccaagaggaccagccacagcaagctgcctgagcaggaggccgctgaggccgacctgagcaacatggagcgggtgtccctgagcacagctgacccccagggcgtgacctacgccgagctgagcaccagcgccctgtctgaggccgccagtgacaccacccaggagcccccaggcagccatgaatatgctgccctgaaggtgtag

SEQ ID NO: 107190 - DNA, 432 bp, Artificial Sequence
  derived and/or modified sequence
atgacagctgagttcctgagcctgctgtgcctgggcctgtgcctgggctatgaagatgagaagaagaatgagaagccacccaagcccagcctgcacgcctggcccagctctgtggtggaggccgagagcaatgtgaccctgaagtgccaggcccacagccagaatgtgacctttgtgctgaggaaggtgaatgacagcggctacaagcaggagcagagcagcgcagaaaatgaagctgagttccccttcacagacctgaagcccaaggatgctggccgctacttctgtgcctacaagaccacagccagccatgagtggagcgagagcagcgagcacctgcagctggtggtgacagacaagcatgatgagctggaggcccccagcatgaagacagtggcccacgtgtgcaacaccaggaccctgggccgctag

SEQ ID NO: 107191 - DNA, 618 bp, Artificial Sequence
  derived and/or modified sequence
atgaccgccgagttcctgagcctgctgtgcctgggcctgtgcctgggctacgaagacgaaaaaaaaaacgaaaagcctccaaagcccagtctgcatgcgtggcccagcagtgtggtcgaagctgaatccaacgtgaccctgaagtgtcaagcacacagtcagaacgtaacatttgtcctacggaaagtaaatgattccgggtacaaacaggagcagagctcagccgagaatgaggcggaatttccatttacagatctgaaacctaaagatgccggacggtacttctgcgcctataagaccacagcctcccacgaatggtctgagtcaagcgagcatttgcagcttgtcgtgactgacaaacatgacgaacttgaggcccctagcatgaagactggcagtagcagcgaagaatctacaaaacgtactagccactccaagcttccggagcaggaggcagccgaggccgacctgtctaatatggaacgggtgtccctgtctacagcagatccgcagggagtcacctatgctgaattatcaacatcagccctctcggaagccgctagcgacacgactcaggagcctcctgggtctcacgaatacgcagcactgaaggtatag

SEQ ID NO: 107192 - DNA, 432 bp, Artificial Sequence
  derived and/or modified sequence
atgaccgccgagttcctgagcctgctgtgcctgggcctgtgcctgggatatgaagacgagaagaagaacgagaaacctcctaagccttctctccacgcatggccttccagcgttgtcgaagcagaaagcaacgtgaccctgaagtgtcaggcacattcccaaaacgttactttcgtcctcagaaaggtgaacgatagcggatacaaacaggagcagtccagtgcggaaaacgaggctgagttccctttcactgatcttaagcccaaagacgcagggcgttatttttgcgcatacaaaactacagcctcacacgaatggtccgaatcttcagaacatctccagctggttgtgactgacaagcacgatgagctggaggccccgagcatgaaaaccgtggcacatgtgtgcaacacccgtactcttggaagatag

SEQ ID NO: 107193 - DNA, 618 bp, Artificial Sequence
  derived and/or modified sequence
atgaccgccgagtttttgagcctcctctgcctggggctgtgcctgggatatgaggatgaaaaaaagaatgaaaagcccccaaagccaagcctgcatgcctggccttcctctgtggttgaggcagaaagcaacgttactctgaaatgccaggcacattcccagaatgttacttttgtattaaggaaggtcaacgatagcggttataagcaggaacagagcagtgcagaaaacgaggccgaattccctttcaccgacctcaaacctaaagatgccggaaggtacttttgcgcttataagacaacagcgtcacatgaatggtcggagagctctgaacacttgcagctggttgtaaccgataaacacgatgagctcgaggcgccttctatgaagactgggagctccagcgaggagtccacaaaacgcacttcacacagcaagctgcccgaacaggaagccgcagaagctgacttatccaatatggagcgggttagtctgtcgaccgccgatcctcagggggtgacttatgcggagcttagcactagcgcccttagcgaagctgcctcggacacgacccaagaaccacccggatcgcacgagtatgcagctctcaaggtctag

SEQ ID NO: 107194 - DNA, 432 bp, Artificial Sequence
  derived and/or modified sequence
atgacggctgagttcctttctttgctgtgcctgggactatgtcttggctatgaggatgaaaagaagaatgaaaaaccccctaagccctctctccatgcgtggccgtcatctgtggtagaagcagaaagcaatgttacgctaaagtgccaggcgcattcacagaatgtaacatttgttctgcggaaagtgaacgactcaggctataaacaggaacagagttcagctgagaatgaagcagagtttccattcactgacctaaagcccaaagatgcagggaggtatttttgtgcgtacaaaacaactgcgtcccacgaatggagcgagagttccgaacacctgcagctggtggtaactgataaacacgatgaactagaagccccttccatgaagaccgtggctcatgtttgtaatacacgcacattaggacgctag

SEQ ID NO: 107195 - DNA, 922 bp, Artificial Sequence
  derived and/or modified sequence
gtgagaaggaaactgcaagagtggggcagagaaccagagtgtcagagcaaaacctcctctatctgcacatcctggggacgaaccgggcagccggagagctgcggccggcccagtcccgctccgcctttgaagggtaaaacccaaggcggggccttggttctggcagaagggacgctatgaccgcagaattcctctccctgctttgcctcgggctgtgtctgggctacgaagatgagaaaaagaatgagaaaccgcccaagccctccctccacgcctggcccagctcggtggttgaagccgagagcaatgtgaccctgaagtgtcaggctcattcccagaatgtgacatttgtgctgcgcaaggtgaacgactctgggtacaagcaggaacagagctcggcagaaaacgaagctgaattccccttcacggacctgaagcctaaggatgctgggaggtacttttgtgcctacaagacaacagcctcccatgagtggtcagaaagcagtgaacacttgcagctggtggtcacagataaacacgatgaacttgaagctccctcaatgaaaacaggttcatcatctgaggaatccaccaagagaaccagccattccaaacttccggagcaggaggctgccgaggcagatttatccaatatggaaagggtatctctctcgacggcagacccccaaggagtgacctatgctgagctaagcaccagcgccctgtctgaggcagcttcagacaccacccaggagcccccaggatctcatgaatatgcggcactgaaagtgtagcaagaagacagccctggccactaaaggaggggggatcgtgctggccaaggttatcggaaatctggagatgcagatactgtgtttccttgctcttcgtccatatcaataaaattaagtttctcgtctta

SEQ ID NO: 107196 - DNA, 822 bp, Artificial Sequence
  derived and/or modified sequence
gaagggacgctatgaccgcagaattcctctccctgctttgcctcgggctgtgtctgggctacgaagatgagaaaaagaatgagaaaccgcccaagccctccctccacgcctggcccagctcggtggttgaagccgagagcaatgtgaccctgaagtgtcaggctcattcccagaatgtgacatttgtgctgcgcaaggtgaacgactctgggtacaagcaggaacagagctcggcagaaaacgaagctgaattccccttcacggacctgaagcctaaggatgctgggaggtacttttgtgcctacaagacaacagcctcccatgagtggtcagaaagcagtgaacacttgcagctggtggtcacagataaacacgatgaacttgaagctccctcaatgaaaacagtggctcacgtctgtaataccaggactttgggaagatgaggcaggaggatcacttgagcccaggggttcaagaccagcctggacaacttgacaccagaaccatctttgtcgccatcttcagctgcatctccatccttctcctcttcctctcagtcttcatcatctacagatgcagccagcacagttcatcatctgaggaatccaccaagagaaccagccattccaaacttccggagcaggaggctgccgaggcagatttatccaatatggaaagggtatctctctcgacggcagacccccaaggagtgacctatgctgagctaagcaccagcgccctgtctgaggcagcttcagacaccacccaggagcccccaggatctcatgaatatgcggcactgaaagtgtagcaagaagacag

SEQ ID NO: 107197 - DNA, 98 bp, Artificial Sequence
  derived and/or modified sequence
aggacatgaatagacaattctcaaaagaagatacacaagtggcaaacaaacacatgaaaaaagactcaacattagtaatgaccatggaaatgcaaatc

SEQ ID NO: 107198 - protein, 889 aa, Artificial Sequence
  derived and/or modified sequence
MPASISSIFPGPTLLLSCGSEELDSEDAPPCCRLALGEPPPYGAAPIGIPRPPPPRPGMHSPPPRPAPSPGTWESQPARSVRLGGPGGGAGGAGGGRVLECPSIRITSISPTPEPPAALEDNPDAWGDGSPRDYPPPEGFGGYREAGGQGGGAFFSPSPGSSSLSSWSFFSDASDEAALYAACDEVESELNEAASRFGLGSPLPSPRASPRPWTPEDPWSLYGPSPGGRGPEDSWLLLSAPGPTPASPRPASPCGKRRYSSSGTPSSASPALSRRGSLGEEGSEPPPPPPLPLARDPGSPGPFDYVGAPPAESIPQKTRRTSSEQAVALPRSEEPASCNGKLPLGAEESVAPPGGSRKEVAGMDYLAVPSPLAWSKARIGGHSPIFRTSALPPLDWPLPSQYEQLELRIEVQPRAHHRAHYETEGSRGAVKAAPGGHPVVKLLGYSEKPLTLQMFIGTADERNLRPHAFYQVHRITGKMVATASYEAVVSGTKVLEMTLLPENNMAANIDCAGILKLRNSDIELRKGETDIGRKNTRVRLVFRVHVPQGGGKVVSVQAASVPIECSQRSAQELPQVEAYSPSACSVRGGEELVLTGSNFLPDSKVVFIERGPDGKLQWEEEATVNRLQSNEVTLTLTVPEYSNKRVSRPVQVYFYVSNGRRKRSPTQSFRFLPVICKEEPLPDSSLRGFPSASATPFGTDMDFSPPRPPYPSYPHEDPACETPYLSEGFGYGMPPLYPQTGPPPSYRPGLRMFPETRGTTGCAQPPAVSFLPRPFPSDPYGGRGSSFSLGLPFSPPAPFRPPPLPASPPLEGPFPSQSDVHPLPAEGYNKVGPGYGPGEGAPEQEKSRGGYSSGFRDSVPIQGITLEEGGCGTGGCECECVQEIALHVC

SEQ ID NO: 107199 - DNA, 2670 bp, Artificial Sequence
  derived and/or modified sequence
atgcccgccagcatcagcagcatcttccccggccccaccctgctgctgagctgcggcagcgaggagctggacagcgaggacgcccccccctgctgcagactggccctgggcgagccccccccctacggcgccgcccccatcggcatccccagaccccccccccccagacccggcatgcacagccccccccccagacccgcccccagccccggcacctgggagagccagcccgccagaagcgtgagactgggcggccccggcggcggcgccggcggcgccggcggcggcagagtgctggagtgccccagcatcagaatcaccagcatcagccccacccccgagccccccgccgccctggaggacaaccccgacgcctggggcgacggcagccccagagactaccccccccccgagggcttcggcggctacagagaggccggcggccagggcggcggcgccttcttcagccccagccccggcagcagcagcctgagcagctggagcttcttcagcgacgccagcgacgaggccgccctgtacgccgcctgcgacgaggtggagagcgagctgaacgaggccgccagcagattcggcctgggcagccccctgcccagccccagagccagccccagaccctggacccccgaggacccctggagcctgtacggccccagccccggcggcagaggccccgaggacagctggctgctgctgagcgcccccggccccacccccgccagccccagacccgccagcccctgcggcaagagaagatacagcagcagcggcacccccagcagcgccagccccgccctgagcagaagaggcagcctgggcgaggagggcagcgagccccccccccccccccccctgcccctggccagagaccccggcagccccggccccttcgactacgtgggcgccccccccgccgagagcatcccccagaagaccagaagaaccagcagcgagcaggccgtggccctgcccagaagcgaggagcccgccagctgcaacggcaagctgcccctgggcgccgaggagagcgtggccccccccggcggcagcagaaaggaggtggccggcatggactacctggccgtgcccagccccctggcctggagcaaggccagaatcggcggccacagccccatcttcagaaccagcgccctgccccccctggactggcccctgcccagccagtacgagcagctggagctgagaatcgaggtgcagcccagagcccaccacagagcccactacgagaccgagggcagcagaggcgccgtgaaggccgcccccggcggccaccccgtggtgaagctgctgggctacagcgagaagcccctgaccctgcagatgttcatcggcaccgccgacgagagaaacctgagaccccacgccttctaccaggtgcacagaatcaccggcaagatggtggccaccgccagctacgaggccgtggtgagcggcaccaaggtgctggagatgaccctgctgcccgagaacaacatggccgccaacatcgactgcgccggcatcctgaagctgagaaacagcgacatcgagctgagaaagggcgagaccgacatcggcagaaagaacaccagagtgagactggtgttcagagtgcacgtgccccagggcggcggcaaggtggtgagcgtgcaggccgccagcgtgcccatcgagtgcagccagagaagcgcccaggagctgccccaggtggaggcctacagccccagcgcctgcagcgtgagaggcggcgaggagctggtgctgaccggcagcaacttcctgcccgacagcaaggtggtgttcatcgagagaggccccgacggcaagctgcagtgggaggaggaggccaccgtgaacagactgcagagcaacgaggtgaccctgaccctgaccgtgcccgagtacagcaacaagagagtgagcagacccgtgcaggtgtacttctacgtgagcaacggcagaagaaagagaagccccacccagagcttcagattcctgcccgtgatctgcaaggaggagcccctgcccgacagcagcctgagaggcttccccagcgccagcgccacccccttcggcaccgacatggacttcagcccccccagacccccctaccccagctacccccacgaggaccccgcctgcgagaccccctacctgagcgagggcttcggctacggcatgccccccctgtacccccagaccggccccccccccagctacagacccggcctgagaatgttccccgagaccagaggcaccaccggctgcgcccagccccccgccgtgagcttcctgcccagacccttccccagcgacccctacggcggcagaggcagcagcttcagcctgggcctgcccttcagcccccccgcccccttcagacccccccccctgcccgccagcccccccctggagggccccttccccagccagagcgacgtgcaccccctgcccgccgagggctacaacaaggtgggccccggctacggccccggcgagggcgcccccgagcaggagaagagcagaggcggctacagcagcggcttcagagacagcgtgcccatccagggcatcaccctggaggagggcggctgcggcaccggcggctgcgagtgcgagtgcgtgcaggagatcgccctgcacgtgtgctag

SEQ ID NO: 107200 - DNA, 1311 bp, Artificial Sequence
  derived and/or modified sequence
atgttcatcggcaccgccgacgagagaaacctgagaccccacgccttctaccaggtgcacagaatcaccggcaagatggtggccaccgccagctacgaggccgtggtgagcggcaccaaggtgctggagatgaccctgctgcccgagaacaacatggccgccaacatcgactgcgccggcatcctgaagctgagaaacagcgacatcgagctgagaaagggcgagaccgacatcggcagaaagaacaccagagtgagactggtgttcagagtgcacgtgccccagggcggcggcaaggtggtgagcgtgcaggccgccagcgtgcccatcgagtgcagccagagaagcgcccaggagctgccccaggtggaggcctacagccccagcgcctgcagcgtgagaggcggcgaggagctggtgctgaccggcagcaacttcctgcccgacagcaaggtggtgttcatcgagagaggccccgacggcaagctgcagtgggaggaggaggccaccgtgaacagactgcagagcaacgaggtgaccctgaccctgaccgtgcccgagtacagcaacaagagagtgagcagacccgtgcaggtgtacttctacgtgagcaacggcagaagaaagagaagccccacccagagcttcagattcctgcccgtgatctgcaaggaggagcccctgcccgacagcagcctgagaggcttccccagcgccagcgccacccccttcggcaccgacatggacttcagcccccccagacccccctaccccagctacccccacgaggaccccgcctgcgagaccccctacctgagcgagggcttcggctacggcatgccccccctgtacccccagaccggccccccccccagctacagacccggcctgagaatgttccccgagaccagaggcaccaccggctgcgcccagccccccgccgtgagcttcctgcccagacccttccccagcgacccctacggcggcagaggcagcagcttcagcctgggcctgcccttcagcccccccgcccccttcagacccccccccctgcccgccagcccccccctggagggccccttccccagccagagcgacgtgcaccccctgcccgccgagggctacaacaaggtgggccccggctacggccccggcgagggcgcccccgagcaggagaagagcagaggcggctacagcagcggcttcagagacagcgtgcccatccagggcatcaccctggaggagggcggctgcggcaccggcggctgcgagtgcgagtgcgtgcaggagatcgccctgcacgtgtgctag

SEQ ID NO: 107201 - DNA, 570 bp, Artificial Sequence
  derived and/or modified sequence
atggacttcagcccccccagacccccctaccccagctacccccacgaggaccccgcctgcgagaccccctacctgagcgagggcttcggctacggcatgccccccctgtacccccagaccggccccccccccagctacagacccggcctgagaatgttccccgagaccagaggcaccaccggctgcgcccagccccccgccgtgagcttcctgcccagacccttccccagcgacccctacggcggcagaggcagcagcttcagcctgggcctgcccttcagcccccccgcccccttcagacccccccccctgcccgccagcccccccctggagggccccttccccagccagagcgacgtgcaccccctgcccgccgagggctacaacaaggtgggccccggctacggccccggcgagggcgcccccgagcaggagaagagcagaggcggctacagcagcggcttcagagacagcgtgcccatccagggcatcaccctggaggagggcggctgcggcaccggcggctgcgagtgcgagtgcgtgcaggagatcgccctgcacgtgtgctag

SEQ ID NO: 107202 - DNA, 2496 bp, Artificial Sequence
  derived and/or modified sequence
atgcacagccccccccccagacccgcccccagccccggcacctgggagagccagcccgccagaagcgtgagactgggcggccccggcggcggcgccggcggcgccggcggcggcagagtgctggagtgccccagcatcagaatcaccagcatcagccccacccccgagccccccgccgccctggaggacaaccccgacgcctggggcgacggcagccccagagactaccccccccccgagggcttcggcggctacagagaggccggcggccagggcggcggcgccttcttcagccccagccccggcagcagcagcctgagcagctggagcttcttcagcgacgccagcgacgaggccgccctgtacgccgcctgcgacgaggtggagagcgagctgaacgaggccgccagcagattcggcctgggcagccccctgcccagccccagagccagccccagaccctggacccccgaggacccctggagcctgtacggccccagccccggcggcagaggccccgaggacagctggctgctgctgagcgcccccggccccacccccgccagccccagacccgccagcccctgcggcaagagaagatacagcagcagcggcacccccagcagcgccagccccgccctgagcagaagaggcagcctgggcgaggagggcagcgagccccccccccccccccccctgcccctggccagagaccccggcagccccggccccttcgactacgtgggcgccccccccgccgagagcatcccccagaagaccagaagaaccagcagcgagcaggccgtggccctgcccagaagcgaggagcccgccagctgcaacggcaagctgcccctgggcgccgaggagagcgtggccccccccggcggcagcagaaaggaggtggccggcatggactacctggccgtgcccagccccctggcctggagcaaggccagaatcggcggccacagccccatcttcagaaccagcgccctgccccccctggactggcccctgcccagccagtacgagcagctggagctgagaatcgaggtgcagcccagagcccaccacagagcccactacgagaccgagggcagcagaggcgccgtgaaggccgcccccggcggccaccccgtggtgaagctgctgggctacagcgagaagcccctgaccctgcagatgttcatcggcaccgccgacgagagaaacctgagaccccacgccttctaccaggtgcacagaatcaccggcaagatggtggccaccgccagctacgaggccgtggtgagcggcaccaaggtgctggagatgaccctgctgcccgagaacaacatggccgccaacatcgactgcgccggcatcctgaagctgagaaacagcgacatcgagctgagaaagggcgagaccgacatcggcagaaagaacaccagagtgagactggtgttcagagtgcacgtgccccagggcggcggcaaggtggtgagcgtgcaggccgccagcgtgcccatcgagtgcagccagagaagcgcccaggagctgccccaggtggaggcctacagccccagcgcctgcagcgtgagaggcggcgaggagctggtgctgaccggcagcaacttcctgcccgacagcaaggtggtgttcatcgagagaggccccgacggcaagctgcagtgggaggaggaggccaccgtgaacagactgcagagcaacgaggtgaccctgaccctgaccgtgcccgagtacagcaacaagagagtgagcagacccgtgcaggtgtacttctacgtgagcaacggcagaagaaagagaagccccacccagagcttcagattcctgcccgtgatctgcaaggaggagcccctgcccgacagcagcctgagaggcttccccagcgccagcgccacccccttcggcaccgacatggacttcagcccccccagacccccctaccccagctacccccacgaggaccccgcctgcgagaccccctacctgagcgagggcttcggctacggcatgccccccctgtacccccagaccggccccccccccagctacagacccggcctgagaatgttccccgagaccagaggcaccaccggctgcgcccagccccccgccgtgagcttcctgcccagacccttccccagcgacccctacggcggcagaggcagcagcttcagcctgggcctgcccttcagcccccccgcccccttcagacccccccccctgcccgccagcccccccctggagggccccttccccagccagagcgacgtgcaccccctgcccgccgagggctacaacaaggtgggccccggctacggccccggcgagggcgcccccgagcaggagaagagcagaggcggctacagcagcggcttcagagacagcgtgcccatccagggcatcaccctggaggagggcggctgcggcaccggcggctgcgagtgcgagtgcgtgcaggagatcgccctgcacgtgtgctag

SEQ ID NO: 107203 - DNA, 2670 bp, Artificial Sequence
  derived and/or modified sequence
atgcctgcctcaatctctagtatctttcccggcccaaccttacttctgagctgcggttccgaagaactggattcagaggacgctcccccttgctgtcgccttgccctcggagagccacctccctatggagcagcacctatagggataccccgccccccacccccaagaccaggaatgcattctccaccacccagacctgctccaagtccagggacttgggagtcacagcccgcccggtctgtcaggctggggggccccggcggcggcgccggtggcgccggcggaggtagggtgctggagtgcccaagcatccgcatcacttccatatctccaacccccgagccgcccgccgctcttgaagataaccctgacgcctggggagatggctccccaagggactacccgccccccgagggattcggggggtacagagaggcaggcggacaaggcggtggtgcctttttcagccctagccctggtagcagctccctgagttcttggagctttttctctgacgcttcggatgaggctgctttatatgcagcctgcgacgaggtggagtccgagcttaatgaggccgcttctagatttggccttgggtcccctctccccagtcctcgtgcctcaccacggccatggacccctgaggacccatggagtctctatggaccatccccaggcggaagaggccctgaggactcatggctccttctgagtgctcctggccctacacccgcgtccccccgcccagctagtccatgcggtaagcggcggtactctagctcaggtactccttcaagcgctagtcctgcactctcaagaaggggcagtcttggagaggagggaagcgagccccctccgccgccccccttgcctctggctcgagaccctggcagcccaggaccctttgactacgtgggggctccccccgccgagagcattccacaaaagacccggcggacatcctcagagcaggccgtagccctgccccgctctgaagagccagcatcttgcaatggcaagcttccactgggagcagaggagtctgtcgctcccccgggcggctcgcggaaggaggtggccggaatggactacctggccgtaccatcacctttggcgtggtccaaggccaggatcggtggtcacagtcctattttccgaacctctgcattgcctccactggactggccccttccctctcagtatgagcagcttgaactccgcatagaggtgcaaccccgggcacatcatcgcgcacattacgagacagagggctctagaggcgccgtcaaggcggctccgggcggacaccccgtcgtgaaactcctggggtatagcgaaaagccgttaaccctacaaatgtttattgggactgccgatgagcgcaacctccggccccacgccttttaccaggtgcacagaatcaccgggaagatggttgccacagcctcttatgaggcagtggtgtcaggcacaaaggtgctcgagatgacgttattgcccgaaaacaatatggctgctaacattgattgtgccggaatcttaaagctccgtaactcagatattgaacttcgcaagggggagaccgacatcggacgtaagaatactagggtcagattggtgttcagagtgcacgtaccccaaggcggagggaaggtggtgagcgtacaggccgcgtccgtgcctattgagtgctcacaacgaagcgcgcaagaactgcctcaggtggaagcttattctcctagcgcgtgcagcgtccgaggcggagaggaactagtcctgacaggatcaaatttcctacccgatagcaaggtcgtatttatagagaggggacctgacgggaagctgcagtgggaggaagaagctacggtgaatcgccttcagagtaatgaagtcacactgactctaaccgtacccgaatactctaataagcgtgtgtctcgtcccgtccaggtgtacttttatgtcagtaatggacggaggaaacgatcgccaacacaatctttcaggttcctaccagtgatttgtaaagaggaaccactccccgactcctccctgcgcggctttccgagcgcctcggccacccccttcggcactgacatggacttctcccctccccgcccaccttacccctcctatccccacgaagacccagcctgtgagactccgtacctttctgagggctttggctatggtatgccccctctctatccccagacagggccgcctccctcttacaggcccggcctgcggatgttccccgaaacccggggcacaactggatgcgcccagccacctgctgtgagctttttgcctaggccatttccttccgatccctacgggggtcgtggaagttccttctccttgggtttgcccttcagccctcccgcaccctttagacccccaccactgccagcctcacccccactggaaggtcctttccccagtcagtcggacgtacacccacttcccgcagaggggtacaataaggttggccctgggtacggcccaggcgagggcgcacccgagcaggagaagtctcgagggggctattcctccggattccgggactccgtgcctatccaaggaataacactggaggagggagggtgcggtacaggtgggtgcgagtgcgaatgcgtccaggagatcgcactccacgtgtgctag

SEQ ID NO: 107204 - DNA, 1311 bp, Artificial Sequence
  derived and/or modified sequence
atgttcatcggaactgctgatgagcgcaaccttcgcccccatgccttttatcaggtgcataggatcactggcaaaatggtggccacagccagctatgaggccgtcgtgtcagggactaaggtcctagagatgaccctcctccccgagaacaacatggcagccaacatcgactgtgctgggattctgaagctgaggaactccgacattgagctccgcaagggggagactgacattggacgcaagaataccagagtaaggttggtgttcagagtccatgtgccacaaggaggcggaaaagtggtgagcgtacaggccgctagcgtgccaatcgagtgcagtcagcgcagcgctcaagagctacctcaagtggaggcctattcgccgagtgcttgctcagtccggggcggcgaagaattagttctcacaggatccaacttcctacccgatagcaaggttgtgttcattgagagaggtcccgacggtaagctgcagtgggaagaggaggcaactgttaatcggctccagagcaacgaagtgaccctcacactgaccgtcccagagtatagcaataaaagggtgagtaggccagtgcaggtctacttctatgtttctaatggcaggcgaaagagatcaccaactcagtccttccgattcctcccagttatctgcaaggaagagccccttcccgactcaagccttcgaggatttccgtcagcttccgctactccatttgggacagatatggacttctcccccccaagaccgccataccctagctatccgcatgaggaccctgcttgcgagactccttacctgtcagagggcttcggatacgggatgccccccctgtacccacagacagggcccccccctagctacagacccggccttagaatgtttccagagacgaggggcactactggatgcgcgcaaccacccgccgttagctttttacctcggccattcccatcagatccctacggtggacgtggaagctcgttcagcttgggtctacccttctccccgcccgcaccttttcgccctcccccccttccggctagcccaccactggaagggccgttccctagccagagcgacgtgcaccccctgccagcagaagggtacaataaagtgggccccgggtacggcccaggggagggtgccccggaacaggagaaatctagaggcgggtactcaagcggatttagggactcggtgcctattcaaggaattacccttgaggagggaggatgtggaaccggggggtgcgagtgtgagtgcgtccaggaaatcgccctgcatgtatgttag

SEQ ID NO: 107205 - DNA, 570 bp, Artificial Sequence
  derived and/or modified sequence
atggactttagccctcctagacccccttaccctagctacccccacgaagacccggcatgtgaaacaccttacctgtctgaaggctttggctacggaatgcctcccctttaccctcagactggcccccccccctcatacagacccggtctccggatgttccctgaaacgagagggactacaggatgcgcgcagccccccgctgttagtttcctgcctcggccctttccatccgacccctacggcggccggggctcaagcttttctctcgggctcccctttagccccccagcaccatttcggcctccaccccttcccgctagcccacctctcgagggacccttcccctcacagtctgatgtgcatcctctgccagccgagggttacaataaagtgggaccgggatatgggccaggggagggcgcccctgagcaggagaagagccgaggaggctactcaagtggattcagggatagtgtaccaatccaggggattacacttgaagagggcggctgcggtaccgggggatgtgagtgcgaatgcgtgcaggagattgctctccacgtctgctag

SEQ ID NO: 107206 - DNA, 2496 bp, Artificial Sequence
  derived and/or modified sequence
atgcacagtcccccgccaaggcctgccccatcacccggaacatgggagtcccagcccgctcgcagtgttagactagggggacccggcgggggagccgggggggccggaggcggacgcgtactcgagtgtccttctatcaggataacaagcattagtcccacgccagagcctcctgccgccttagaggataacccagatgcctggggggatgggtcacccagggactatcccccccccgagggtttcggcggataccgggaagcggggggacagggggggggggccttcttttccccttcaccaggcagctccagtctgagttcatggagtttcttctctgatgcaagtgacgaagccgcgctgtatgccgcctgtgatgaagtggaatctgagctaaatgaagcggccagcaggtttggactcggctctccattaccaagcccacgcgcctcccctcgtccatggaccccagaggacccctggagtctgtatgggccatctccagggggtcgcggcccagaggactcatggttgcttctctccgctcccggtcccacacccgcctctcctagaccagcctcaccgtgcggaaagcgtcggtactctagcagcggcactccgtccagcgcctccccagctctgagcaggcgtggttctttgggcgaagaggggtcagagccgcccccaccaccgcccctgcctctggcaagagatcctggatcccccgggccttttgactatgtcggggccccgcctgccgagagcatcccacagaagacacgaagaacttcctccgaacaagctgtggccctgcccaggagcgaggagcctgccagttgtaatgggaaactgcctctgggagctgaggaatctgtggcacctcccggggggtctaggaaagaggtggccggcatggactaccttgctgtgccttcccctctcgcctggtctaaggcacggattgggggtcactccccaatttttcggacctctgcgctgcccccattggattggcctctgccaagtcagtacgagcagctggagctgcgaatcgaggtccagccaagagcacatcacagagcacactacgaaaccgaggggtcaagaggtgcggtgaaggcggccccaggcggacaccctgttgtcaagctgctggggtatagtgagaagcccctgacactgcaaatgttcatcggcactgccgatgagagaaatctgcgaccccacgccttttaccaggtgcatcgcatcacgggtaaaatggtggctacagcctcatacgaggcagtcgtaagtggtacaaaggtcttggagatgacactgctccccgagaacaacatggcggccaacatcgactgtgccggaatcctcaaactgagaaacagtgacatagaactaagaaaaggcgagacagacattgggaggaaaaatactagggtacgactggttttcagagtgcatgtgccccaaggaggaggaaaagttgtgagcgtgcaagccgcaagtgtgccgattgaatgttctcagcgcagtgcgcaagaactccctcaggtcgaggcctactcacccagtgcgtgcagtgtcagagggggggaagagttagtcctcacaggctcgaacttcctgccagattccaaggtggtgtttatcgaacgcggacctgatggtaaactgcagtgggaggaggaggccactgtgaatagactccagtctaatgaggttaccttgactctgaccgtccccgagtactccaacaagcgtgtgagccgccccgttcaggtgtacttctacgtcagcaacggtagacgaaagcggtccccaacgcagtcattccgattcctccctgtcatttgtaaggaggagcccctgcctgacagctcgttgcgggggttcccttcagcctcagcaacaccctttggtaccgatatggattttagcccaccaagacctccctatccctcctatccacatgaagatcctgcctgtgaaactccatatttatctgagggtttcggctatggcatgccgcctctctaccctcaaacaggaccacctccgtcttatcgtccagggctccgtatgttccctgaaacccggggtactacagggtgtgcacagccaccagccgtctccttcctccctcgcccattcccttccgacccttacggtgggcgcgggtctagtttttctctgggcctgcctttcagtcctcctgccccattccgccctcctccattgccagcatcgcctccactggagggcccttttccatcccagtccgacgtgcaccctctgcccgcagaagggtataacaaggtaggccccgggtatggtcctggcgaaggcgcccctgagcaggagaaatctcgtggcggttattccagcggatttcgggactcggtgccaatccagggtattaccttggaagagggggggtgcggcaccggtgggtgcgaatgtgaatgcgtacaggaaatcgcgttgcatgtgtgttag

SEQ ID NO: 107207 - DNA, 2670 bp, Artificial Sequence
  derived and/or modified sequence
atgcctgccagcatcagcagcatcttccctggccccaccctgctgctgagctgtggcagcgaggagctggacagtgaagatgccccaccctgctgccgcctggccctgggggagcccccaccctacggggccgcccccatcggcatcccccggcccccaccacccaggcctggcatgcacagccccccacccaggcctgcccccagccctggcacctgggagagccagcctgcccggtctgtgcggctgggcggccctgggggcggggccggcggggccggcggcggccgggtgctggagtgccccagcatccgcatcaccagcatcagccccaccccagagcccccagctgccctggaggacaacccagatgcctggggagatggcagcccccgggactacccacctcctgagggctttggaggctaccgggaggccggcggccagggcggcggggccttcttcagccccagccctggcagcagcagcctgagctcctggagcttcttcagtgatgccagtgatgaagctgccctgtatgctgcctgtgatgaggtggagagcgagctgaatgaagctgccagcagatttggcctgggcagccccctgcccagcccccgggccagcccccggccctggaccccagaggacccctggagcctgtatggccccagccctgggggccggggccctgaggacagctggctgctgctgagcgcccctggccccaccccagccagccccaggcctgccagcccctgtgggaagaggcgctacagcagcagcggcacccccagcagcgccagccctgccctgagccggcggggcagcctgggggaggagggcagcgagcccccacctcctccacccctgcccctggcccgggaccccggcagccctggcccctttgattatgtgggcgcccctcctgctgagagcatcccccagaagaccaggaggaccagcagcgagcaggccgtggccctgcccaggtctgaggagcccgccagctgcaatggcaagctgcccctgggcgctgaggagagcgtggcccctcctgggggcagcaggaaggaggtggccggcatggactacctggccgtgcccagccccctggcctggagcaaggccagaattggaggccacagccccatcttccgcaccagcgccctgccccccctggactggcccctgcccagccagtatgagcagctggagctgagaattgaggtgcagccccgggcccaccaccgggcccactatgaaacagagggcagcagaggagctgtgaaggccgcccctgggggccaccctgtggtgaagctgctgggctacagcgagaagcccctgaccctgcagatgttcatcggcacagcagatgagaggaacctgcggccccacgccttctaccaggtgcaccgcatcaccgggaagatggtggccacagccagctatgaagctgtggtgtctggcaccaaggtgctggagatgaccctgctgcctgagaacaacatggccgccaacatcgactgtgccggcatcctgaagctgaggaacagcgacatcgagctgaggaagggggagacagacattggaaggaagaacaccagggtgcggctggtgttccgggtgcacgtgccccagggcggcggcaaggtggtgtctgtgcaggccgcctctgtgcccatcgagtgcagccagaggtctgcccaggagctgccccaggtggaggcctacagccccagcgcctgcagcgtgcggggcggggaggagctggtgctgaccggcagcaacttcctgcctgacagcaaggtggtgttcatcgagcggggcccagatggcaagctgcagtgggaggaggaggccaccgtgaaccggctgcagagcaatgaggtgaccctgaccctgactgtgcctgagtacagcaacaagagggtgtccaggcctgtgcaggtgtacttctacgtgtccaatggccgcaggaagaggagccccacccagagcttccgcttcctgcctgtgatctgcaaggaggagcccctgcctgacagcagcctgcggggcttccccagcgccagcgccaccccatttggaacagacatggacttcagccccccccggcccccctaccccagctacccccatgaggaccctgcctgtgagaccccctacctgtctgagggcttcggctacggcatgccacccctgtacccccagacaggccccccacccagctaccggcccggcctgaggatgtttcctgagacccggggcaccaccggctgtgcccagcccccagctgtgtccttcctgccccggcccttccccagcgacccctacggcggccggggcagcagcttcagcctgggcctgcccttcagccccccagcccccttccggcccccacccctgcctgccagcccccccctggagggccccttccccagccagagtgatgtgcaccccctgcctgctgagggctacaacaaggtgggccctggctacggccctggagagggcgcccctgagcaggagaagagcagaggaggctacagcagcggcttccgggacagcgtgcccatccagggcatcaccctggaggagggcggctgcggcactggaggctgtgaatgtgaatgtgtgcaggagatcgccctgcacgtgtgctag

SEQ ID NO: 107208 - DNA, 1311 bp, Artificial Sequence
  derived and/or modified sequence
atgtttattggaacagcagatgaaagaaacctgcggccccacgccttctaccaggtgcaccgcatcaccgggaagatggtggccacagccagctatgaggccgtggtgtctggcaccaaggtgctggagatgaccctgctgcctgagaacaacatggccgccaacatcgactgtgccggcatcctgaagctgaggaacagcgacatcgagctgaggaaaggagaaacagacatcggcaggaagaacaccagggtgcggctggtgttccgggtgcacgtgccccagggcggcggcaaggtggtgtctgtgcaggccgcctctgtgcccattgaatgttcccagaggtctgcccaggagctgccccaggtggaggcctacagccccagcgcctgcagcgtgcggggcggggaggagctggtgctgaccggcagcaacttcctgcctgacagcaaggtggtgttcatcgagcggggcccagatggcaagctgcagtgggaggaggaggccaccgtgaaccggctgcagagcaatgaggtgaccctgaccctgactgtgcctgagtacagcaacaagagggtgtccaggcctgtgcaggtgtacttctacgtgtccaatggaagaaggaagaggagccccacccagagcttccgcttcctgcccgtcatctgcaaggaggagcccctgcctgacagcagcctgcggggcttccccagcgccagcgccacccccttcggcacagacatggacttcagcccccccaggcctccctaccccagctacccccatgaagatcctgcctgtgagaccccctacctgtctgagggcttcggctacggcatgccacccctgtacccccagacaggccccccacccagctacagacctggcctgaggatgtttcctgagacccggggcaccaccggctgtgcccagcccccagctgtgtccttcctgccccggcccttccccagcgacccctatggaggccggggcagcagcttcagcctgggcctgcccttcagccccccagcccccttccggcccccacccctgcctgccagcccccccctggagggccccttccccagccagagtgatgtgcaccccctgcctgctgagggctacaacaaggtgggccctggctacggccctggagagggcgcccctgagcaggagaagagccggggcggctacagcagcggcttccgggacagcgtgcccatccagggcatcaccctggaggagggcggctgcggcaccggcggctgtgaatgtgaatgtgtgcaggagatcgccctgcacgtgtgctag

SEQ ID NO: 107209 - DNA, 570 bp, Artificial Sequence
  derived and/or modified sequence
atggacttcagccccccccggcccccctaccccagctacccccatgaggaccctgcctgtgagaccccctacctgtctgagggcttcggctacggcatgccacccctgtacccccagacaggccccccacccagctaccggcccggcctgaggatgtttcctgagacccggggcaccaccggctgtgcccagcccccagctgtgtccttcctgccccggcccttccccagcgacccctacggcggccggggcagcagcttcagcctgggcctgcccttcagccccccagcccccttccggcccccacccctgcctgccagcccccccctggagggccccttccccagccagagtgatgtgcaccccctgcctgctgagggctacaacaaggtgggccctggctacggccctggagagggcgcccctgagcaggagaagagcagaggaggctacagcagcggcttccgggacagcgtgcccatccagggcatcaccctggaggagggcggctgcggcactggaggctgtgaatgtgaatgtgtgcaggagatcgccctgcacgtgtgctag

SEQ ID NO: 107210 - DNA, 2496 bp, Artificial Sequence
  derived and/or modified sequence
atgcacagccccccacccaggcctgcccccagccctggcacctgggagagccagcctgcccggtctgtgcggctgggcggccctgggggcggggccggcggggccggcggcggccgggtgctggagtgccccagcatccgcatcaccagcatcagccccaccccagagcccccagctgccctggaggacaacccagatgcctggggagatggcagcccccgggactacccacctcctgagggctttggaggctaccgggaggccggcggccagggcggcggggccttcttcagccccagccctggcagcagcagcctgagctcctggagcttcttcagtgatgccagtgatgaagctgccctgtatgctgcctgtgatgaggtggagagcgagctgaatgaagctgccagcagatttggcctgggcagccccctgcccagcccccgggccagcccccggccctggaccccagaggacccctggagcctgtatggccccagccctgggggccggggccctgaggacagctggctgctgctgagcgcccctggccccaccccagccagccccaggcctgccagcccctgtgggaagaggcgctacagcagcagcggcacccccagcagcgccagccctgccctgagccggcggggcagcctgggggaggagggcagcgagcccccacctcctccacccctgcccctggcccgggaccccggcagccctggcccctttgattatgtgggcgcccctcctgctgagagcatcccccagaagaccaggaggaccagcagcgagcaggccgtggccctgcccaggtctgaggagcccgccagctgcaatggcaagctgcccctgggcgctgaggagagcgtggcccctcctgggggcagcaggaaggaggtggccggcatggactacctggccgtgcccagccccctggcctggagcaaggccagaattggaggccacagccccatcttccgcaccagcgccctgccccccctggactggcccctgcccagccagtatgagcagctggagctgagaattgaggtgcagccccgggcccaccaccgggcccactatgaaacagagggcagcagaggagctgtgaaggccgcccctgggggccaccctgtggtgaagctgctgggctacagcgagaagcccctgaccctgcagatgttcatcggcacagcagatgagaggaacctgcggccccacgccttctaccaggtgcaccgcatcaccgggaagatggtggccacagccagctatgaagctgtggtgtctggcaccaaggtgctggagatgaccctgctgcctgagaacaacatggccgccaacatcgactgtgccggcatcctgaagctgaggaacagcgacatcgagctgaggaagggggagacagacattggaaggaagaacaccagggtgcggctggtgttccgggtgcacgtgccccagggcggcggcaaggtggtgtctgtgcaggccgcctctgtgcccatcgagtgcagccagaggtctgcccaggagctgccccaggtggaggcctacagccccagcgcctgcagcgtgcggggcggggaggagctggtgctgaccggcagcaacttcctgcctgacagcaaggtggtgttcatcgagcggggcccagatggcaagctgcagtgggaggaggaggccaccgtgaaccggctgcagagcaatgaggtgaccctgaccctgactgtgcctgagtacagcaacaagagggtgtccaggcctgtgcaggtgtacttctacgtgtccaatggccgcaggaagaggagccccacccagagcttccgcttcctgcctgtgatctgcaaggaggagcccctgcctgacagcagcctgcggggcttccccagcgccagcgccaccccatttggaacagacatggacttcagccccccccggcccccctaccccagctacccccatgaggaccctgcctgtgagaccccctacctgtctgagggcttcggctacggcatgccacccctgtacccccagacaggccccccacccagctaccggcccggcctgaggatgtttcctgagacccggggcaccaccggctgtgcccagcccccagctgtgtccttcctgccccggcccttccccagcgacccctacggcggccggggcagcagcttcagcctgggcctgcccttcagccccccagcccccttccggcccccacccctgcctgccagcccccccctggagggccccttccccagccagagtgatgtgcaccccctgcctgctgagggctacaacaaggtgggccctggctacggccctggagagggcgcccctgagcaggagaagagcagaggaggctacagcagcggcttccgggacagcgtgcccatccagggcatcaccctggaggagggcggctgcggcactggaggctgtgaatgtgaatgtgtgcaggagatcgccctgcacgtgtgctag

SEQ ID NO: 107211 - DNA, 2670 bp, Artificial Sequence
  derived and/or modified sequence
atgcccgccagcatcagcagcatcttccccggccccaccctgctgctcagctgtgggagcgaggaactcgactctgaagatgcacccccctgttgccgcctggccctaggggagccacccccctatggcgccgcccctataggcatacctcgacctcccccccctcgacccgggatgcatagtcctccgccccgcccagcacccagtccaggcacatgggagtcacagcccgcaaggtctgtgcggctgggcggaccaggcgggggggcgggaggggctgggggcggacgcgtcctcgaatgcccaagcattcgcattacgagcatctctcccacgcctgaaccaccagcagcccttgaggacaatccggatgcatggggagacggaagcccaagagattatcctccccctgaaggcttcgggggctacagagaagcagggggacaaggcggtggggcctttttcagccctagtcccggctccagcagtctaagttcctggtcttttttcagcgatgccagcgacgaggccgcactgtatgccgcatgtgatgaggttgagagcgagcttaacgaagcggcatctcgcttcgggctcgggtccccgctccctagtccccgcgcctctccccggccgtggaccccagaagacccatggtcactttacggacccagtcctggcggacggggtcctgaagacagttggttactgctgtcggcacccggtcctaccccagcttctcccagacccgcgtctccctgtggcaaacgacgttattcaagtagtgggacaccttccagtgcttccccagcactgtcccgcagaggcagtctgggcgaggagggcagcgagccaccgccaccccctcctctgccgctggcacgtgaccctggttcaccaggccctttcgactacgtcggagcgccgcctgctgaatccattcctcagaaaactaggcgtacctcatcggagcaagccgtggcactcccgagatctgaggaaccagcctcctgcaacggaaaactgcctctaggcgccgaagagtcggtggctcctcctgggggcagcaggaaggaggtggccggaatggactatttagccgtgccttctccactggcatggtccaaggcgcggatagggggccattctccaatattcaggacgtctgccttaccgccgctggattggcccctccctagccagtacgaacaactggagctgcgcatagaagtccaaccaagagctcatcaccgtgcacactacgaaacggagggctcaaggggggcagtgaaagccgcccccggcggacatcctgtcgtcaaactgctgggatattcagaaaagcccctgacgctgcagatgttcatcggtaccgccgacgaacgcaatcttcggccgcacgcgttctaccaggtgcaccggatcactggcaagatggttgcgaccgccagctacgaggccgtggtttcgggaacgaaggtattggaaatgactttgctccctgagaataatatggcagccaatatcgactgcgctggaatccttaagctgcggaattcggacatagaacttcgaaagggagaaacagatataggtcgcaagaatactagagtccgcctggtttttcgggtgcatgtgcctcagggaggcggtaaagtagtgtctgttcaggcagctagcgtgccaatcgagtgttcacagcgttcagcccaggaactcccacaggttgaagcttacagcccctcggcctgctccgtgcgagggggtgaagagctggttttgactggatccaattttctgccagacagtaaagtggttttcattgagcgagggcctgatggcaagctgcaatgggaggaggaagccacagtcaaccgcttgcagtccaatgaagtcaccttaaccctaacggtacccgagtattccaacaagagagtgagcagaccggtacaggtatacttttacgttagtaacggtcgtaggaaaaggagccccacccaatctttcagatttctccccgtgatttgtaaggaggaacccctgccagactctagtctaagaggatttccatcagcaagcgccacaccattcggcacggacatggacttcagcccgccaagacccccctacccttcttatccccatgaggaccccgcttgtgaaaccccctacttgagcgagggcttcggctatggtatgcctcccttatacccacagaccggcccccctcccagttaccgccccggactcaggatgttccccgagacccgcggcaccacggggtgtgcccagccgcctgcagtgtcctttttgcccaggccttttcccagcgacccttacggaggcagagggtcatccttcagtctcggactgccgttttccccccctgcacccttccggcctccaccacttccagccagcccaccactggaggggcctttcccctctcaatctgatgttcaccctctgcctgcagagggctacaacaaggtgggccctggctacggccctggcgaaggtgcccccgaacaagaaaaaagccgaggcggctatagctctggtttcagagattcggtacccatccagggcatcactctggaagagggcggctgtggcacagggggatgcgaatgcgagtgcgtacaggagatagccctgcatgtgtgttag

SEQ ID NO: 107212 - DNA, 1311 bp, Artificial Sequence
  derived and/or modified sequence
atgttcatcggcaccgccgacgagcggaacctgcggccccacgccttctatcaggttcatcggattaccggtaaaatggtggccaccgccagttacgaagctgtggtgagcggcactaaagtgctggaaatgaccctgctcccagaaaacaatatggctgcaaacatcgactgtgcaggcatcttgaagttaaggaactcggatattgagttgcgcaaaggcgagacagatattggaagaaaaaacactagggtgagactcgtgtttagagtccacgtccctcaagggggaggaaaagtagtgagcgtgcaggccgcaagcgttcccatcgaatgttcacagcggagtgctcaggaactgccccaagtcgaggcctactccccttccgcatgctcagtacggggcggggaggagctggtcttgaccgggtctaacttcctcccggactccaaggttgtgttcattgaacgtggccccgacgggaaacttcagtgggaagaggaggctactgttaatcgactgcagagcaacgaagtgactctcacgctaacagttcctgagtactctaataagagagtatctcgacccgtgcaggtgtatttttatgtatccaacgggcgacgaaagcgctctccaacacaaagcttccgcttcctgccggtgatttgcaaggaggagccactgcccgactcttccttgcgcggtttcccgagtgcatctgctactccatttgggaccgacatggacttttccccacctaggcccccatacccatcataccctcacgaagaccccgcctgtgaaaccccatacctctccgagggttttgggtatggcatgccccccctataccctcagacgggtcctcctcctagctataggcctggactacgtatgtttcctgagaccagaggaacaaccggctgcgcgcagcctcccgccgtgagttttcttcctcgcccttttccctctgatccctacggcggaagaggcagctcttttagcctgggcctgcccttcagcccacccgcaccattcagacccccccctctgcctgccagcccgccattggaaggaccatttccatctcagtctgatgtgcaccccctgcccgccgaaggctataataaggtcgggccaggctacggtccaggtgaaggtgcacctgaacaagaaaagagccgcgggggatacagctctggctttagggattcagttcccatccaaggaatcactcttgaggagggaggctgtggtactgggggatgcgagtgtgagtgcgtccaagagatagctcttcacgtttgctag

SEQ ID NO: 107213 - DNA, 570 bp, Artificial Sequence
  derived and/or modified sequence
atggacttcagccccccccggcccccctaccccagctacccccacgaggacccagcttgtgagactccatacctcagcgaaggttttggctatggtatgccccctctctatcctcagaccggtccacctccttcttacagaccgggcctgcgcatgttccccgagacgcgcgggactactggatgtgcacagccccccgctgtgagctttttacctcgaccctttccctcggatccttacggcggaagaggaagttccttcagcctcggtctgccattttcaccacccgcgccctttagaccgccacccttgcccgcctctccccctctggagggccctttcccttctcaaagcgacgtacacccgttaccggccgaggggtacaacaaagtgggccctggatatggaccaggcgagggggcgccagagcaggagaaaagccgcgggggttacagtagtggatttcgcgactccgtgcctatccaaggcattaccctggaagaggggggctgcgggacggggggttgcgagtgtgagtgtgttcaggagattgcactccacgtctgttag

SEQ ID NO: 107214 - DNA, 2496 bp, Artificial Sequence
  derived and/or modified sequence
atgcacagcccccccccccggcccgcccccagccccggcacctgggagtcacagcctgcacgatccgttagactgggcggtccaggcggcggggctgggggagcaggcgggggtagagtcttggaatgtccttccattcgtataaccagcatctccccaacccccgagccgcccgccgccctggaggacaatccagatgcgtggggcgatggctcacccagggactatcctcctccagagggctttgggggatatagggaggcgggcggccagggaggtggcgcttttttttccccttccccagggtccagcagcctgtcttcctggagttttttctctgacgcatcggacgaagccgcgctgtacgccgcttgcgatgaggtcgagtccgagctcaatgaggcagctagtcgatttggcctcgggtcgccgctacccagcccgagagcctctccccgaccatggactccggaggacccttggtctctctatggcccatctcccgggggtaggggacctgaagacagttggctgctgctgtcagctcccggcccgaccccggcaagtccacgacccgcttcgccttgcgggaagagacgctattctagctccggtacaccctcatctgcgagtcccgccctgtcacgacgcgggtctcttggagaggaaggctcggagcctccgcctccccctcctttgccactggctagagatccaggatctcctggccccttcgattatgtaggtgcgcctccagccgaatccataccacagaaaacacgaagaacgtcaagcgaacaggcagtggccctgccgcgctccgaagaacctgcctcctgcaacggaaagctgcctctgggcgcagaagagagcgtcgctcccccagggggttcgcgcaaggaagttgcaggaatggactacctggcggttccctctcccctggcgtggagcaaagcacgcatcggcgggcactctcccatcttcaggacttccgcattgccgccgctggactggcctcttccgtctcagtatgagcaattggaattgaggattgaggtgcaaccccgcgcccaccaccgtgcacactacgaaaccgagggatcacgcggcgccgttaaggccgccccaggcggccaccctgtggtcaaactgttgggatactctgaaaaaccgttgaccctgcagatgtttatcggaaccgctgatgagaggaaccttagaccccacgcattctaccaagtccaccgaatcactggaaaaatggttgcaaccgcctcctacgaagcagtcgtgtcaggtaccaaggtcttggagatgacattgctgcctgagaacaatatggccgccaatatcgactgcgcggggatcctcaagctccgcaatagcgacattgagctccggaagggcgagaccgacatcgggcggaaaaatacaagggttaggctggtctttagggttcacgtgcctcagggcggtggtaaagttgtgtcagtgcaggctgcatccgtcccgattgaatgcagtcagaggagcgctcaagaactacctcaggtcgaggcttattcaccatccgcttgctcggttcgaggaggagaggagctggttttgacgggaagcaacttcctgccggacagcaaggtagtgtttattgagaggggaccggacggcaaactgcagtgggaggaggaggcaacagtgaaccggttacagagcaatgaagtgaccctgacactcacagttccggaatatagcaacaaacgcgtgtcccgaccagtgcaggtgtacttttacgtgtccaatggccgaaggaaacgaagtccaacacaatctttccggttcctccctgtgatatgcaaggaagagccacttcctgatagtagcctgagagggttcccatcagcaagcgcgacaccatttggcacagacatggattttagccctcctaggccaccctaccccagttatcctcatgaagatcctgcctgcgaaactccgtacctctccgagggtttcggatatggcatgccccctttatatccccagacaggaccgcccccatcctacaggcccggcctgcgcatgttcccagagacccgcggtactacgggttgtgcacagcccccagcagtgtcgttccttccgcggcctttcccatctgacccctatggaggtcgcggatcttctttctctctgggtttgccgttcagccctcccgcacctttccgaccaccccctcttccagctagtccaccccttgagggaccgtttcccagtcagtcggatgttcacccactgcctgccgaaggatacaacaaagtggggcctggctatggcccaggtgagggggcacctgaacaggaaaagtccagaggcggctattcatctggttttcgagatagcgtgccaatacagggaattacactggaagagggtggctgcggaaccggggggtgcgaatgtgagtgcgtgcaggaaatcgctttgcatgtgtgttag

SEQ ID NO: 107215 - DNA, 5491 bp, Artificial Sequence
  derived and/or modified sequence
atgtgtgagtcgcccccagtccagcccagtgcctcaagaaacacgcctccaggcccagccccagctccagcccctctggacccacctctctcaccttaagacccactggatcgggtaccctcggtcctaggatccaggggccagtgggcaaaggcctggcatgcctgcttcaatctcctccatcttcccaggtccaactctgcttttgtcttgtggctcagaagaactggactcagaggatgccccgccatgctgccgtctggccttgggagagccccctccctatggcgctgcacctatcggtattccccgacctccaccccctcggcctggcatgcattcgccaccgccgcgaccagccccctcacctggcacctgggagagccagcccgccaggtcggtgaggctgggaggaccaggagggggtgctgggggtgctgggggtggccgtgttctcgagtgtcccagcatccgcatcacctccatctctcccacgccggagccgccagcagcgctggaggacaaccctgatgcctggggggacggctctcctagagattaccccccaccagaaggctttgggggctacagagaagcagggggccagggtgggggggccttcttcagcccaagccctggcagcagcagcctgtcctcgtggagcttcttctccgatgcctctgacgaggcagccctgtatgcagcctgcgacgaggtggagtctgagctaaatgaggcggcctcccgctttggcctgggctccccgctgccctcgccccgggcctcccctcggccatggacccccgaagatccctggagcctgtatggtccaagccccggaggccgagggccagaggatagctggctactcctcagtgctcctgggcccaccccagcctccccgcggcctgcctctccatgtggcaagcggcgctattccagctcgggaaccccatcttcagcctccccagctctgtcccgccgtggcagcctgggggaagaggggtctgagccacctccaccacccccattgcctctggcccgggacccgggctcccctggtccctttgactatgtgggggccccaccagctgagagcatccctcagaagacacggcggacttccagcgagcaggcagtggctctgcctcggtctgaggagcctgcctcatgcaatgggaagctgcccttgggagcagaggagtctgtggctcctccaggaggttcccggaaggaggtggctggcatggactacctggcagtgccctccccactcgcttggtccaaggcccggattgggggacacagccctatcttcaggacctctgccctacccccactggactggcctctgcccagccaatatgagcagctggagctgaggatcgaggtacagcctagagcccaccaccgggcccactatgagacagaaggcagccgtggagctgtcaaagctgcccctggcggtcaccccgtagtcaagctcctaggctacagtgagaagccactgaccctacagatgttcatcggcactgcagatgaaaggaacctgcggcctcatgccttctatcaggtgcaccgtatcacaggcaagatggtggccacggccagctatgaagccgtagtcagtggcaccaaggtgttggagatgactctgctgcctgagaacaacatggcggccaacattgactgcgcgggaatcctgaagcttcggaattcagacattgagcttcggaagggtgagacggacatcgggcgcaaaaacacacgtgtacggctggtgttccgggtacacgtgccccagggcggcgggaaggtcgtctcagtacaggcagcatcggtgcccatcgagtgctcccagcgctcagcccaggagctgccccaggtggaggcctacagccccagtgcctgctctgtgagaggaggcgaggaactggtactgactggctccaacttcctgccagactccaaggtggtgttcattgagaggggtcctgatgggaagctgcaatgggaggaggaggccacagtgaaccgactgcagagcaacgaggtgacgctgaccctgactgtccccgagtacagcaacaagagggtttcccggccagtccaggtctacttttatgtctccaatgggcggaggaaacgcagtcctacccagagtttcaggtttctgcctgtgatctgcaaagaggagcccctaccggactcatctctgcggggtttcccttcagcatcggcaaccccctttggcactgacatggacttctcaccacccaggcccccctacccctcctatccccatgaagaccctgcttgcgaaactccttacctatcagaaggcttcggctatggcatgccccctctgtacccccagacggggcccccaccatcctacagaccgggcctgcggatgttccctgagactaggggtaccacaggttgtgcccaaccacctgcagtttccttccttccccgccccttccctagtgacccgtatggagggcggggctcctctttctccctggggctgccattctctccgccagccccctttcggccgcctcctcttcctgcatccccaccgcttgaaggccccttcccttcccagagtgatgtgcatcccctacctgctgagggatacaataaggtagggccaggctatggccctggggagggggctccggagcaggagaaatccaggggtggctacagcagcggcttccgagacagtgtccctatccagggtatcacgctggaggaaggtgggtgtgggactgggggctgtgagtgtgagtgtgtgcaagagattgctctgcatgtttgctgagggctggagctgggcttttcagagatcgggcatccctggtctctcagggccagttggaggttcccaggaggcatgttcttgatgcctgtggctgcctgaatccaattaactgaattctgaagagtgcatggggtaactgtctcagcctttctcctgtctctgcctctgtcctctgctccaaatcataaaatctcagagctagaagcactttcaagatcattccatccagcgcattcaatttgcaagtttaggcgttgagttccagagagggatggtagcttgctgaggtcccagtcaagcacacttgccattgcctcagctttcccctaaacacggtgtctgtggtcagggttggtgaggaggagctttcctgttttgcctctccttcttcccattggctacacccatctctggccctgctgataccgattcccctgacatttcaggctaagccagcaggaaagggctaggacgggtgcctgggagcccacatggagggagttgggcaagatttgattcggagcaggtgtcaagacgtgttggggaaactgaggcccagtggaatagaagccagtagaggaggaatctagaggcctcctagattaagacctgcctggaatggattgggggtgggtctttggaaaaggaggggacccacctctagcccagtctctcaactgcccctcctttacagtgagtgagatcattggccgagacctgagtggcttccctgcacctcctggagaagagcctcctgcctgaaccacgtgaactgtcatcacctggcaaccccagccccagcctcagccctgccccctttccctccttcctggagtggtggctacagaagcttggggccaaccctggctcctctttccccagcttctgtctgtctcactgtcttccctcccctcccccagctgaggtgtggccctcaggcctggtgctgccttggagggctgggggaaggagtgtgtggaggagggaggagggtgaagactgaggctaggtgccagaatggactggagtgaaggcgtgtctagagtgtgggctggctgttgtgctggaaagctggggacaggttgatggtaataaactgctcaatgaccagtgcttcaggctccagagctctttggagagatgggttggggcagcttactccagccctggcccaaggaggcccagaagttggaaagagatggaatgtggctgggaacattgcatcccaaagagcttctcagtggaggaggctggggaaggcatgagggggctcagaggctccttgactgggaccaggattgggggccagggcttgagtaggcctctccactctcctccttgggggtccagattccttaggagctttgggatgaggcccaggaggctgcatttttccaggtccttagtcttgccaccacacagatgattctgattcatagccaagatgaggacacactgatgtagctgatctctcatttacagaggaggattctaaagttcagagagggaaaggggcttgcctgaggtcacgtagataatcagcagcacattgaacgctgcactcctgggctcctgtccccagcccccattcagacacgctgactcaggaggtccaggcctctaaggcttctctccctggagtgagggtggaggtgagggagagctggcacaagccctccctctggatcctccactcctggggattatgaagatattctggaaagatttgtgcttcagaggtagactgcagaaagcaaacagtctacccagcagctctgaatgtcacctgccctggggcttacagcactatatgagttcctggcctatcctgcaaatatgcccatgctggccttctaaatagctggtacatccatcaccactgacgggcctggcctggaaacctggtttgtcccctgtcttgatggcctacgagaggccaagttccactgggctgggaaaagtcactttgtctgtcttgttcacctggagcctgacacaccgtaggtactgagtacaaatagcttgatttggctaggcttggctgcagggggacgtgcctaaaagacattccgggcatttgcacttgggaaacttgcctcaccttcaggcttgtggggcctctctatgcccaatgagtccaggcagtcctagcaagtactcaggagagcaggggtgggtgtgacagaggctggctctggattgggggacaacagaaccagagtaactcctcgcctgttgctgctttgcaatgaatttcctttacctttctggaacacaagctgctgtgaaccaaactgatatcaagtgattagctcaccgggccttggttgcttttcaaagatccccttcagccccctgccagagtcactgccccataatcaccatgtcagaagggaccctagggcattcgtgtcctatttatcaatcttcagcaccacctctaagatctctgagagagggtggatcagcctctgtgtaaacaaaaagctgttaggacttgttgcctctcaaggtggactattctgttttctgccaggacactgccattcatgcattgtcagatatttattaaacagcagcaaagtgccagccaatttgtcctggaggaattcatagcctcatggggcaaaagtaaataaacagcttattacaattcaacaa

SEQ ID NO: 107216 - DNA, 4364 bp, Artificial Sequence
  derived and/or modified sequence
gggacaccagcctcatgtctactctggaaaatggtggcccgccagatatgggggagggtttaggctgaggacaaaagtcactgggagttaagttttctctgtattgagttgggccagtctctttggaggctcttctgcctttgcccagcccactttgggctttattccaagaaaaacactgtgaactccaggccatgttttctccacaacgggtgcccagttccccaagggattcccttgcaggatatcctttatctttcaccattcccatcccatggtagactgaaaatctagggatgaataaaggatgagacggtggggatttcaatgaggtggccgctctctccctctgccagctcctaggctacagtgagaagccactgaccctacagatgttcatcggcactgcagatgaaaggaacctgcggcctcatgccttctatcaggtgcaccgtatcacaggcaagatggtggccacggccagctatgaagccgtagtcagtggcaccaaggtgttggagatgactctgctgcctgagaacaacatggcggccaacattgactgcgcgggaatcctgaagcttcggaattcagacattgagcttcggaagggtgagacggacatcgggcgcaaaaacacacgtgtacggctggtgttccgggtacacgtgccccagggcggcgggaaggtcgtctcagtacaggcagcatcggtgcccatcgagtgctcccagcgctcagcccaggagctgccccaggtggaggcctacagccccagtgcctgctctgtgagaggaggcgaggaactggtactgactggctccaacttcctgccagactccaaggtggtgttcattgagaggggtcctgatgggaagctgcaatgggaggaggaggccacagtgaaccgactgcagagcaacgaggtgacgctgaccctgactgtccccgagtacagcaacaagagggtttcccggccagtccaggtctacttttatgtctccaatgggcggaggaaacgcagtcctacccagagtttcaggtttctgcctgtgatctgcaaagaggagcccctaccggactcatctctgcggggtttcccttcagcatcggcaaccccctttggcactgacatggacttctcaccacccaggcccccctacccctcctatccccatgaagaccctgcttgcgaaactccttacctatcagaaggcttcggctatggcatgccccctctgtacccccagacggggcccccaccatcctacagaccgggcctgcggatgttccctgagactaggggtaccacaggttgtgcccaaccacctgcagtttccttccttccccgccccttccctagtgacccgtatggagggcggggctcctctttctccctggggctgccattctctccgccagccccctttcggccgcctcctcttcctgcatccccaccgcttgaaggccccttcccttcccagagtgatgtgcatcccctacctgctgagggatacaataaggtagggccaggctatggccctggggagggggctccggagcaggagaaatccaggggtggctacagcagcggcttccgagacagtgtccctatccagggtatcacgctggaggaaggtgggtgtgggactgggggctgtgagtgtgagtgtgtgcaagagattgctctgcatgtttgctgagggctggagctgggcttttcagagatcgggcatccctggtctctcagggccagttggaggttcccaggaggcatgttcttgatgcctgtggctgcctgaatccaattaactgaattctgaagagtgcatggggtaactgtctcagcctttctcctgtctctgcctctgtcctctgctccaaatcataaaatctcagagctagaagcactttcaagatcattccatccagcgcattcaatttgcaagtttaggcgttgagttccagagagggatggtagcttgctgaggtcccagtcaagcacacttgccattgcctcagctttcccctaaacacggtgtctgtggtcagggttggtgaggaggagctttcctgttttgcctctccttcttcccattggctacacccatctctggccctgctgataccgattcccctgacatttcaggctaagccagcaggaaagggctaggacgggtgcctgggagcccacatggagggagttgggcaagatttgattcggagcaggtgtcaagacgtgttggggaaactgaggcccagtggaatagaagccagtagaggaggaatctagaggcctcctagattaagacctgcctggaatggattgggggtgggtctttggaaaaggaggggacccacctctagcccagtctctcaactgcccctcctttacagtgagtgagatcattggccgagacctgagtggcttccctgcacctcctggagaagagcctcctgcctgaaccacgtgaactgtcatcacctggcaaccccagccccagcctcagccctgccccctttccctccttcctggagtggtggctacagaagcttggggccaaccctggctcctctttccccagcttctgtctgtctcactgtcttccctcccctcccccagctgaggtgtggccctcaggcctggtgctgccttggagggctgggggaaggagtgtgtggaggagggaggagggtgaagactgaggctaggtgccagaatggactggagtgaaggcgtgtctagagtgtgggctggctgttgtgctggaaagctggggacaggttgatggtaataaactgctcaatgaccagtgcttcaggctccagagctctttggagagatgggttggggcagcttactccagccctggcccaaggaggcccagaagttggaaagagatggaatgtggctgggaacattgcatcccaaagagcttctcagtggaggaggctggggaaggcatgagggggctcagaggctccttgactgggaccaggattgggggccagggcttgagtaggcctctccactctcctccttgggggtccagattccttaggagctttgggatgaggcccaggaggctgcatttttccaggtccttagtcttgccaccacacagatgattctgattcatagccaagatgaggacacactgatgtagctgatctctcatttacagaggaggattctaaagttcagagagggaaaggggcttgcctgaggtcacgtagataatcagcagcacattgaacgctgcactcctgggctcctgtccccagcccccattcagacacgctgactcaggaggtccaggcctctaaggcttctctccctggagtgagggtggaggtgagggagagctggcacaagccctccctctggatcctccactcctggggattatgaagatattctggaaagatttgtgcttcagaggtagactgcagaaagcaaacagtctacccagcagctctgaatgtcacctgccctggggcttacagcactatatgagttcctggcctatcctgcaaatatgcccatgctggccttctaaatagctggtacatccatcaccactgacgggcctggcctggaaacctggtttgtcccctgtcttgatggcctacgagaggccaagttccactgggctgggaaaagtcactttgtctgtcttgttcacctggagcctgacacaccgtaggtactgagtacaaatagcttgatttggctaggcttggctgcagggggacgtgcctaaaagacattccgggcatttgcacttgggaaacttgcctcaccttcaggcttgtggggcctctctatgcccaatgagtccaggcagtcctagcaagtactcaggagagcaggggtgggtgtgacagaggctggctctggattgggggacaacagaaccagagtaactcctcgcctgttgctgctttgcaatgaatttcctttacctttctggaacacaagctgctgtgaaccaaactgatatcaagtgattagctcaccgggccttggttgcttttcaaagatccccttcagccccctgccagagtcactgccccataatcaccatgtcagaagggaccctagggcattcgtgtcctatttatcaatcttcagcaccacctctaagatctctgagagagggtggatcagcctctgtgtaaacaaaaagctgttaggacttgttgcctctcaaggtggactattctgttttctgccaggacactgccattcatgcattgtcagatatttattaaacagcagcaaagtgccagccaatttgtcctggaggaattcatagcctcatggggcaaaagtaaataaacagcttattacaattcaacaa

SEQ ID NO: 107217 - DNA, 2235 bp, Artificial Sequence
  derived and/or modified sequence
ctgtttaaccctctctctgctctgggagcggccccttacatggtgtatgtgactccatggatattactggtttatttgtgtgtctactgctgaggagggctccctcagagccctgtggcagttttcccaaagagggtggggacagaggaggccacccctccatgcccagcccagccagtcctcttccttgcactgctctgcagcccagcgctcagcccaggagctgccccaggtggaggcctacagccccagtgcctgctctgtgagaggaggcgaggaactggtactgactggctccaacttcctgccagactccaaggtggtgttcattgagaggggtcctgatgggaagctgcaatgggaggaggaggccacagtgaaccgactgcagagcaacgaggtgacgctgaccctgactgtccccgagtacagcaacaagagggtttcccggccagtccaggtctacttttatgtctccaatgggcggaggaaacgcagtcctacccagagtttcaggtttctgcctgtgatctgcaaagaggagcccctaccggactcatctctgcggggtttcccttcagcatcggcaaccccctttggcactgacatggacttctcaccacccaggcccccctacccctcctatccccatgaagaccctgcttgcgaaactccttacctatcagaaggcttcggctatggcatgccccctctgtacccccagacggggcccccaccatcctacagaccgggcctgcggatgttccctgagactaggggtaccacaggttgtgcccaaccacctgcagtttccttccttccccgccccttccctagtgacccgtatggagggcggggctcctctttctccctggggctgccattctctccgccagccccctttcggccgcctcctcttcctgcatccccaccgcttgaaggccccttcccttcccagagtgatgtgcatcccctacctgctgagggatacaataaggtagggccaggctatggccctggggagggggctccggagcaggagaaatccaggggtggctacagcagcggcttccgagacagtgtccctatccagggtatcacgctggaggaaggtgggtgtgggactgggggctgtgagtgtgagtgtgtgcaagagattgctctgcatgtttgctgagggctggagctgggcttttcagagatcgggcatccctggtctctcagggccagttggaggttcccaggaggcatgttcttgatgcctgtggctgcctgaatccaattaactgaattctgaagagtgcatggggtaactgtctcagcctttctcctgtctctgcctctgtcctctgctccaaatcataaaatctcagagctagaagcactttcaagatcattccatccagcgcattcaatttgcaagtttaggcgttgagttccagagagggatggtagcttgctgaggtcccagtcaagcacacttgccattgcctcagctttcccctaaacacggtgtctgtggtcagggttggtgaggaggagctttcctgttttgcctctccttcttcccattggctacacccatctctggccctgctgataccgattcccctgacatttcaggctaagccagcaggaaagggctaggacgggtgcctgggagcccacatggagggagttgggcaagatttgattcggagcaggtgtcaagacgtgttggggaaactgaggcccagtggaatagaagccagtagaggaggaatctagaggcctcctagattaagacctgcctggaatggattgggggtgggtctttggaaaaggaggggacccacctctagcccagtctctcaactgcccctcctttacagtgagtgagatcattggccgagacctgagtggcttccctgcacctcctggagaagagcctcctgcctgaaccacgtgaactgtcatcacctggcaaccccagccccagcctcagccctgccccctttccctccttcctggagtggtggctacagaagcttggggccaaccctggctcctctttccccagcttctgtctgtctcactgtcttccctcccctcccccagctgaggtgtggccctcaggcctggtgctgccttggagggctgggggaaggagtgtgtggaggagggaggagggtgaagactgaggctaggtgccagaatggactggagtgaaggcgtgtctagagtgtgggctggctg

SEQ ID NO: 107218 - DNA, 5613 bp, Artificial Sequence
  derived and/or modified sequence
atgtgtgagtcgcccccagtccagcccagtgcctcaagaaacacgcctccaggcccagccccagctccagcccctctggacccacctctctcaccttaagacccactggatcgggtaccctcggtcctaggatccaggggccagtgggcaaaggcctggcatgcctgcttcaatctcctccatcttcccaggtccaactctgcttttgtcttgtggctcagaaggtctctttgctgaggggcagggagcatagaaggacttgcggcctggccactcaaggaacatagccatctcacctgcttctctctttccccctctccctctgctcctcttcccattttgacagaactggactcagaggatgccccgccatgctgccgtctggccttgggagagccccctccctatggcgctgcacctatcggtattccccgacctccaccccctcggcctggcatgcattcgccaccgccgcgaccagccccctcacctggcacctgggagagccagcccgccaggtcggtgaggctgggaggaccaggagggggtgctgggggtgctgggggtggccgtgttctcgagtgtcccagcatccgcatcacctccatctctcccacgccggagccgccagcagcgctggaggacaaccctgatgcctggggggacggctctcctagagattaccccccaccagaaggctttgggggctacagagaagcagggggccagggtgggggggccttcttcagcccaagccctggcagcagcagcctgtcctcgtggagcttcttctccgatgcctctgacgaggcagccctgtatgcagcctgcgacgaggtggagtctgagctaaatgaggcggcctcccgctttggcctgggctccccgctgccctcgccccgggcctcccctcggccatggacccccgaagatccctggagcctgtatggtccaagccccggaggccgagggccagaggatagctggctactcctcagtgctcctgggcccaccccagcctccccgcggcctgcctctccatgtggcaagcggcgctattccagctcgggaaccccatcttcagcctccccagctctgtcccgccgtggcagcctgggggaagaggggtctgagccacctccaccacccccattgcctctggcccgggacccgggctcccctggtccctttgactatgtgggggccccaccagctgagagcatccctcagaagacacggcggacttccagcgagcaggcagtggctctgcctcggtctgaggagcctgcctcatgcaatgggaagctgcccttgggagcagaggagtctgtggctcctccaggaggttcccggaaggaggtggctggcatggactacctggcagtgccctccccactcgcttggtccaaggcccggattgggggacacagccctatcttcaggacctctgccctacccccactggactggcctctgcccagccaatatgagcagctggagctgaggatcgaggtacagcctagagcccaccaccgggcccactatgagacagaaggcagccgtggagctgtcaaagctgcccctggcggtcaccccgtagtcaagctcctaggctacagtgagaagccactgaccctacagatgttcatcggcactgcagatgaaaggaacctgcggcctcatgccttctatcaggtgcaccgtatcacaggcaagatggtggccacggccagctatgaagccgtagtcagtggcaccaaggtgttggagatgactctgctgcctgagaacaacatggcggccaacattgactgcgcgggaatcctgaagcttcggaattcagacattgagcttcggaagggtgagacggacatcgggcgcaaaaacacacgtgtacggctggtgttccgggtacacgtgccccagggcggcgggaaggtcgtctcagtacaggcagcatcggtgcccatcgagtgctcccagcgctcagcccaggagctgccccaggtggaggcctacagccccagtgcctgctctgtgagaggaggcgaggaactggtactgactggctccaacttcctgccagactccaaggtggtgttcattgagaggggtcctgatgggaagctgcaatgggaggaggaggccacagtgaaccgactgcagagcaacgaggtgacgctgaccctgactgtccccgagtacagcaacaagagggtttcccggccagtccaggtctacttttatgtctccaatgggcggaggaaacgcagtcctacccagagtttcaggtttctgcctgtgatctgcaaagaggagcccctaccggactcatctctgcggggtttcccttcagcatcggcaaccccctttggcactgacatggacttctcaccacccaggcccccctacccctcctatccccatgaagaccctgcttgcgaaactccttacctatcagaaggcttcggctatggcatgccccctctgtacccccagacggggcccccaccatcctacagaccgggcctgcggatgttccctgagactaggggtaccacaggttgtgcccaaccacctgcagtttccttccttccccgccccttccctagtgacccgtatggagggcggggctcctctttctccctggggctgccattctctccgccagccccctttcggccgcctcctcttcctgcatccccaccgcttgaaggccccttcccttcccagagtgatgtgcatcccctacctgctgagggatacaataaggtagggccaggctatggccctggggagggggctccggagcaggagaaatccaggggtggctacagcagcggcttccgagacagtgtccctatccagggtatcacgctggaggaaggtgggtgtgggactgggggctgtgagtgtgagtgtgtgcaagagattgctctgcatgtttgctgagggctggagctgggcttttcagagatcgggcatccctggtctctcagggccagttggaggttcccaggaggcatgttcttgatgcctgtggctgcctgaatccaattaactgaattctgaagagtgcatggggtaactgtctcagcctttctcctgtctctgcctctgtcctctgctccaaatcataaaatctcagagctagaagcactttcaagatcattccatccagcgcattcaatttgcaagtttaggcgttgagttccagagagggatggtagcttgctgaggtcccagtcaagcacacttgccattgcctcagctttcccctaaacacggtgtctgtggtcagggttggtgaggaggagctttcctgttttgcctctccttcttcccattggctacacccatctctggccctgctgataccgattcccctgacatttcaggctaagccagcaggaaagggctaggacgggtgcctgggagcccacatggagggagttgggcaagatttgattcggagcaggtgtcaagacgtgttggggaaactgaggcccagtggaatagaagccagtagaggaggaatctagaggcctcctagattaagacctgcctggaatggattgggggtgggtctttggaaaaggaggggacccacctctagcccagtctctcaactgcccctcctttacagtgagtgagatcattggccgagacctgagtggcttccctgcacctcctggagaagagcctcctgcctgaaccacgtgaactgtcatcacctggcaaccccagccccagcctcagccctgccccctttccctccttcctggagtggtggctacagaagcttggggccaaccctggctcctctttccccagcttctgtctgtctcactgtcttccctcccctcccccagctgaggtgtggccctcaggcctggtgctgccttggagggctgggggaaggagtgtgtggaggagggaggagggtgaagactgaggctaggtgccagaatggactggagtgaaggcgtgtctagagtgtgggctggctgttgtgctggaaagctggggacaggttgatggtaataaactgctcaatgaccagtgcttcaggctccagagctctttggagagatgggttggggcagcttactccagccctggcccaaggaggcccagaagttggaaagagatggaatgtggctgggaacattgcatcccaaagagcttctcagtggaggaggctggggaaggcatgagggggctcagaggctccttgactgggaccaggattgggggccagggcttgagtaggcctctccactctcctccttgggggtccagattccttaggagctttgggatgaggcccaggaggctgcatttttccaggtccttagtcttgccaccacacagatgattctgattcatagccaagatgaggacacactgatgtagctgatctctcatttacagaggaggattctaaagttcagagagggaaaggggcttgcctgaggtcacgtagataatcagcagcacattgaacgctgcactcctgggctcctgtccccagcccccattcagacacgctgactcaggaggtccaggcctctaaggcttctctccctggagtgagggtggaggtgagggagagctggcacaagccctccctctggatcctccactcctggggattatgaagatattctggaaagatttgtgcttcagaggtagactgcagaaagcaaacagtctacccagcagctctgaatgtcacctgccctggggcttacagcactatatgagttcctggcctatcctgcaaatatgcccatgctggccttctaaatagctggtacatccatcaccactgacgggcctggcctggaaacctggtttgtcccctgtcttgatggcctacgagaggccaagttccactgggctgggaaaagtcactttgtctgtcttgttcacctggagcctgacacaccgtaggtactgagtacaaatagcttgatttggctaggcttggctgcagggggacgtgcctaaaagacattccgggcatttgcacttgggaaacttgcctcaccttcaggcttgtggggcctctctatgcccaatgagtccaggcagtcctagcaagtactcaggagagcaggggtgggtgtgacagaggctggctctggattgggggacaacagaaccagagtaactcctcgcctgttgctgctttgcaatgaatttcctttacctttctggaacacaagctgctgtgaaccaaactgatatcaagtgattagctcaccgggccttggttgcttttcaaagatccccttcagccccctgccagagtcactgccccataatcaccatgtcagaagggaccctagggcattcgtgtcctatttatcaatcttcagcaccacctctaagatctctgagagagggtggatcagcctctgtgtaaacaaaaagctgttaggacttgttgcctctcaaggtggactattctgttttctgccaggacactgccattcatgcattgtcagatatttattaaacagcagcaaagtgccagccaatttgtcctggaggaattcatagcctcatggggcaaaagtaaataaacagcttattacaattcaacaa

SEQ ID NO: 107219 - DNA, 2670 bp, Artificial Sequence
  derived and/or modified sequence
atgccagcctcaatctccagtatctttcctggccctactctgctcctgagttgcgggtccgaggagctggacagcgaagatgcccctccatgctgcagattggccctgggcgagcctcctccatatggcgctgcccctattggtattccaaggcctccaccacctaggcctggaatgcattcccccccaccgagacccgctcctagccctggaacttgggagtcccaacctgctaggagcgtgagattggggggaccgggtggcggagccggtggagccggtggtgggcgagtgctggaatgtcctagcatacgcatcacctcaatctcccccacgccagagccgcctgccgctttggaggacaaccccgatgcctggggcgatggttcgccaagagactacccacccccagaaggcttcggtggctatagagaggccggtggacaggggggtggggctttcttttctccatcacctggcagcagcagtctaagcagttggagctttttcagtgacgcctctgacgaggcagcactgtacgccgcttgcgacgaagttgaatcagagctgaacgaggccgcttcaaggtttgggctgggtagccctctcccatctcccagggcttccccaagaccgtggactcccgaagacccttggagcctgtatgggccttctcctggaggcagggggcctgaagatagctggctgctgctcagtgctcctggaccgactcccgctagccccaggcccgcatccccctgtgggaagcggaggtacagtagctctggaacacccagttcagcatccccagccctgtcccgcagagggtctttgggagaagagggatctgagccgcctccaccccctcctctgccccttgcacgcgatcccggatcacccggacccttcgattatgtgggagcccctcctgccgagagcatccctcagaaaacacgccgtacatctagcgagcaggcagtcgccttacctcgctccgaagagcccgctagctgtaacgggaaactacctcttggggctgaagaaagcgtggcccctcccggaggttctcggaaggaggtggccggaatggactacctagcagtgccttcaccactggcttggtctaaggccagaattgggggtcattcgcccatcttcaggacatccgctctgccaccgctggactggccgctgccatcacagtatgagcagctggaactacgaatcgaggttcagccacgagcccatcacagggctcattacgaaacggaaggctcgcgcggtgccgtcaaagcagcgcctggcggtcaccccgtggttaagcttcttggttactccgagaagcccttaaccctccaaatgtttattgggacagctgacgaacgcaatctcagaccccatgcattctatcaggttcaccgtatcacaggcaagatggtcgctaccgctagctatgaggccgtggtctcaggaactaaagtactggaaatgacccttctgccggagaataacatggccgcaaatattgactgtgccggaattctgaagcttcggaatagcgatattgagttgaggaagggtgagacagacataggacgtaagaacactagggtgcgtctggtgtttcgggtgcatgtgcctcaggggggaggcaaagtcgttagcgtgcaggctgcctctgtgccaattgagtgctcgcaaagaagtgcccaggagctgcctcaagtggaagcttatagccccagtgcctgctcagtgagggggggagaagagctggtcctgaccggttccaatttcctgcctgattccaaggtcgtcttcatcgaacgcggtcccgatggtaagcttcaatgggaagaagaggcaaccgtgaaccgtcttcaaagtaatgaggtgacactcaccttgacagttcctgagtacagcaataagcgcgtctctcgtcctgtgcaggtctacttctacgtgtctaatggccgtcggaagaggtcccctacacagagttttcgatttttgccagtgatttgcaaggaagagcccttaccagacagcagtctgcgcggattcccttccgctagcgctacgccgttcgggactgacatggatttctcgccacccagacccccttatccaagttaccctcacgaggatccagcgtgtgagacgccgtacttgtccgagggcttcggttacggtatgccacccttgtatccacagaccgggccacccccatcctaccgccctggtcttcggatgtttcctgagactcgcggaactacaggttgcgctcaaccacccgctgtgagcttcttgcctcggccatttccaagtgacccatacggaggtcgcggatcctccttctctctcggactacctttcagtcccccagcccctttcagaccacctccgctccccgcatctcctcccttagagggaccctttcctagtcagagcgacgtgcaccccctcccagccgagggctataacaaagtgggtccagggtacgggcctggcgagggcgcaccagagcaggagaagtctcggggagggtattctagcggctttcgtgacagtgtcccaatacaaggaattacccttgaggagggcggttgtggaacaggcggttgtgagtgcgaatgcgttcaggagatcgccctgcatgtgtgttag

SEQ ID NO: 107220 - DNA, 1311 bp, Artificial Sequence
  derived and/or modified sequence
atgttcattgggacagctgacgagaggaatctccgaccacatgcattctaccaagttcataggatcacgggaaagatggtggcaactgctagctacgaagctgtggtgagtggtacgaaggttctagaaatgactttgctccccgaaaacaacatggcagccaatatagactgtgcaggcatccttaagttacgcaactcagacattgaactcaggaagggcgagactgatatcggcaggaaaaatactcgcgtgaggttagtgtttcgcgtccatgtgcctcagggcggtggcaaagtggtctctgtgcaggctgcatccgtgcccattgagtgctctcagcggtcagcacaggagctgccgcaggtcgaagcatactcgccttcggcctgctcagtccgcggtggcgaagaactggtgctgacgggaagcaattttctccctgacagcaaggttgtctttattgaaaggggccctgacggaaaactgcagtgggaagaggaagccacagtcaaccgtctgcaatctaatgaagtgactctgacactgaccgtgccggaatactctaataaacgggtttcaagacccgtccaggtgtacttctatgtgtctaatggaaggaggaagagatcaccaacccagagcttccgattcctccccgtgatctgcaaggaagaaccccttcccgactcctcattgagggggtttccaagtgcaagtgcaacaccattcggaaccgacatggacttctcacctccacgaccaccttacccttcttacccccatgaggaccccgcatgcgaaaccccatacctgagcgaaggctttggatacgggatgccaccgctgtacccacagaccggccctccaccgagttatcggcctggcctgaggatgtttcctgaaactagagggacaacaggctgtgctcaacccccagcagttagctttctgccgaggccctttccatccgatccctatggcggtagggggagtagcttctccctagggctgcccttcagcccgcctgcgcctttccggcctccaccacttccagcctcacccccattggagggacccttcccttcccagagcgacgtgcacccactgccggcagaaggctacaacaaggtgggaccaggatatggccctggcgaaggcgctccagaacaggagaagtccaggggcggttactcatcaggcttccgggattcggtgccaatccaggggatcacactggaagaaggagggtgcgggactggagggtgcgaatgcgagtgtgtccaggaaatcgcgctgcacgtgtgttag

SEQ ID NO: 107221 - DNA, 570 bp, Artificial Sequence
  derived and/or modified sequence
atggatttttctcccccaaggccgccatatccctcatatccccatgaggatcccgcttgcgaaaccccctatctgtccgaaggtttcggatatggtatgccacctctctaccctcagacaggtccaccgccaagctataggcccggtctgcgcatgtttcccgagactaggggtacaaccgggtgcgcacagccacctgcagttagcttcctgcccagaccatttccgtctgatccctatgggggtcggggtagctctttcagcctcggtctcccattctcccctcccgcacccttcaggcctcctcccctgcctgccagtcctcctctagagggacccttcccaagccagtccgacgttcacccactcccagccgagggatataacaaggtgggccctggttacggaccaggcgagggtgccccagagcaggaaaaatcaagaggcggatattcttcaggcttccgggatagtgtccccatccaggggatcacactggaggagggtggatgtggaactgggggatgcgaatgtgagtgcgtacaagaaattgccttgcatgtctgctag

SEQ ID NO: 107222 - DNA, 2496 bp, Artificial Sequence
  derived and/or modified sequence
atgcattctcctccaccccgtcccgcaccgtccccagggacatgggagtcccagccagctcggtcagtccgacttgggggacccggaggcggagcgggtggtgccggtggtggcagggttttagaatgtccgtccatcagaataacatctatatccccaacacctgaacctcctgcggctctggaggacaatcccgacgcctggggcgatggcagtccccgtgattatcccccacccgagggttttggtgggtacagagaagccggtgggcaggggggaggggcatttttttccccttcccccggatcatcctctctgagctcctggtccttcttcagcgacgcttccgacgaagcagccctctatgcagcttgcgacgaagtggaatcggagcttaacgaagcagcgtccaggtttgggcttgggagcccactgcctagcccacgggcaagtccacgcccttggactcctgaggatccgtggtcactgtacggcccttcaccaggtggaagaggccctgaggacagttggctattgctgagtgctccgggacccactcccgcatcccccagacctgcctccccctgtggaaaacgtcgctattctagttcaggtacccctagcagcgccagcccggcactgtctcgccgtgggtccctcggcgaagaaggcagcgagccccctccgccaccacctctgccactcgctcgcgatccgggttcacccggtcctttcgactacgttggtgcaccacctgccgagagcatccctcaaaagacgcggagaacaagctccgagcaggccgtggccctgcccaggtcagaggagccagcctcctgcaatggcaaacttccactgggggctgaggagagtgtggcgccacctgggggatcacggaaggaggttgccggtatggactacttggcagtgccatctcctctcgcttggtccaaggctaggattggaggccattcacctatatttcgcacgtccgccctccccccactggattggcctctgcccagtcagtacgaacaacttgagttacgaattgaggtgcagcctcgagcacatcatcgggcacactatgaaacagaaggtagtcgcggtgctgtcaaagccgcacctgggggtcatccagtggttaaattactcggttattcggagaagcccttgactctgcagatgttcataggtaccgctgatgagcgtaacctccgccctcacgcattctaccaggtgcatagaatcactggtaagatggtcgccactgcaagttatgaagccgtggttagcggcaccaaggtcctagagatgacactgttgcctgagaacaacatggcagccaacatcgattgcgctggtatcttaaagcttcgcaactctgacatcgaacttcgaaaaggcgagactgacattgggcgaaaaaacactcgcgtaagactggtgttcagagtgcacgtgcctcaaggtggcggtaaagtcgttagtgtgcaagcagccagcgtcccaatcgaatgttcccaaagatccgctcaggagctgccccaggtcgaggcctattccccatccgcgtgtagcgtacgcggtggcgaggaacttgtactgactggaagtaatttcctgcccgacagtaaggtcgtgtttatcgaaagaggccctgatggaaagctacagtgggaggaggaggcaactgtaaatcgacttcagagtaatgaggtcactctgaccctcactgttcctgaatatagcaataaaagagtttcacgtcctgttcaggtatacttctatgtctctaacggtcgtagaaaaaggtctccaacccagagcttcaggtttctgcctgtcatctgtaaggaggaaccgctgccagactcttccctgcggggattcccttctgcaagcgccaccccgttcggcacggatatggacttctcaccaccgaggcccccttatccatcttatccccacgaggatcctgcctgtgagacgccttacctgagcgaagggttcggctacggcatgccgcctctgtacccacaaacagggcctccaccttcctacaggccagggttacggatgtttccggagaccagaggcaccacaggctgtgctcaaccaccagcggtctcttttctgccccgaccattcccttctgatccctacggcggacggggatcttcgtttagtttggggctgccatttagcccacctgcccctttcagacccccacctctgcctgctagtcccccattagagggacctttcccttcccagtcagatgtgcatccattgccagctgagggctataacaaggtgggtcccggatatggccctggagagggagcgcctgagcaggaaaaatccaggggtgggtacagctccgggtttcgcgatagcgtgccaattcagggaatcactttggaggagggaggatgtgggaccggcggatgtgagtgcgaatgcgttcaagagatcgccttgcatgtgtgctag

SEQ ID NO: 107223 - protein, 561 aa, Artificial Sequence
  derived and/or modified sequence
MSRARSHLRAALFLAAASARGITTQVAARRGLSAWPVPQEPSMEYQDAVRMLNTLQTNAGYLEQVKRQRGDPQTQLEAMELYLARSGLQVEDLDRLNIIHVTGTKGKGSTCAFTECILRSYGLKTGFFSSPHLVQVRERIRINGQPISPELFTKYFWRLYHRLEETKVDLAVVEVGIGGAYDCTNIIRKPVVCGVSSLGIDHTSLLGDTVEKIAWQKGGIFKQGVPAFTVLQPEGPLAVLRDRAQQISCPLYLCPMLEALEEGGPPLTLGLEGEHQRSNAALALQLAHCWLQRQDRHGAGEPKASRPGLLWQLPLAPVFQPTSHMRLGLRNTEWPGRTQVLRRGPLTWYLDGAHTASSAQACVRWFRQALQGRERPSGGPEVRVLLFNATGDRDPAALLKLLQPCQFDYAVFCPNLTEVSSTGNADQQNFTVTLDQVLLRCLEHQQHWNHLDEEQASPDLWSAPSPEPGGSASLLLAPHPPHTCSASSLVFSCISHALQWISQGRDPIFQPPSPPKGLLTHPVAHSGASILREAAAIHVLVTGSLHLVGGVLKLLEPALSQ

SEQ ID NO: 107224 - protein, 194 aa, Artificial Sequence
  derived and/or modified sequence
MLNTLQTNAGYLEQVKRQRGDPQTQLEAMELYLARSGLQVEDLDRLNIIHVTGTKGKGSTCAFTECILRSYGLKTGFFSSPHLVQVRERIRINGQPISPELFTKYFWRLYHRLEETKVDLAVVEVGIGGAYDCTNIIRKPVVCGVSSLGIDHTSLLGDTVEKIAWQKGGIFKQGVPAFTVLQPEGPLAVLRDRA

SEQ ID NO: 107225 - DNA, 2109 bp, Artificial Sequence
  derived and/or modified sequence
gtctcccgcccgggcctagagcgctgccgggggcgccgggactatgtcgcgggcgcggagccacctgcgcgccgctctattcctggcagcggcgtctgcgcgcggcataacgacccaggtcgcggcgcggcggggcttgagcgcgtggccggtgccgcaggagccgagcatggagtaccaggatgccgtgcgcatgctcaataccctgcagaccaatgccggctacctggagcaggtgaagcgccagcggggtgaccctcagacacagttggaagccatggaactgtacctggcacggagtgggctgcaggtggaggacttggaccggctgaacatcatccacgtcactgggacgaaggggaagggctccacctgtgccttcacggaatgtatcctccgaagctatggcctgaagacgggattctttagctctccccacctggtgcaggttcgggagcggatccgcatcaatgggcagcccatcagtcctgagctcttcaccaagtacttctggcgcctctaccaccggctggaggagaccaaggtggacctggcagtggtggaggtgggcattggcggggcttatgactgcaccaacatcatcaggaagcctgtggtgtgcggagtctcctctcttggcatcgaccacaccagcctcctgggggatacggtggagaagatcgcatggcagaaagggggcatctttaagcaaggtgtccctgccttcactgtgctccaacctgaaggtcccctggcagtgctgagggaccgagcccagcagatctcatgtcctctatacctgtgtccgatgctggaggccctcgaggaaggggggccgccgctgaccctgggcctggagggggagcaccagcggtccaacgccgccttggccttgcagctggcccactgctggctgcagcggcaggaccgccatggtgctggggagccaaaggcatccaggccagggctcctgtggcagctgcccctggcacctgtgttccagcccacatcccacatgcggctcgggcttcggaacacggagtggccgggccggacgcaggtgctgcggcgcgggcccctcacctggtacctggacggtgcgcacaccgccagcagcgcgcaggcctgcgtgcgctggttccgccaggcgctgcagggccgcgagaggccgagcggtggccccgaggttcgagtcttgctcttcaatgctaccggggaccgggacccggcggccctgctgaagctgctgcagccctgccagtttgactatgccgtcttctgccctaacctgacagaggtgtcatccacaggcaacgcagaccaacagaacttcacagtgacactggaccaggtcctgctccgctgcctggaacaccagcagcactggaaccacctggacgaagagcaggccagcccggacctctggagtgcccccagcccagagcccggtgggtccgcatccctgcttctggcgccccacccaccccacacctgcagtgccagctccctcgtcttcagctgcatttcacatgccttgcaatggatcagccaaggccgagaccccatcttccagccacctagtcccccaaagggcctcctcacccaccctgtggctcacagtggggccagcatactccgtgaggctgctgccatccatgtgctagtcactggcagcctgcacctggtgggtggtgtcctgaagctgctggagcccgcactgtcccagtagccaaggcccggggttggaggtgggagcttcccacacctgcctgcgttctccccatgaacttacatactaggtgccttttgtttttggctttcctggttctgtctagactggcctaggggccagggctttgggatgggaggccgggagaggatgtcttttttaaggctctgtgccttggtctctccttcctcttggctgagatagcagaggggctccccgggtctctcactgttgcagtggcctggccgttcagcctgtctcccccaacaccccgcctgcctcctggctcaggcccagcttattgtgtgcgctgcctggccaggccctgggtcttgccatgtgctgggtggtagatttcctcctcccagtgccttctggga

SEQ ID NO: 107226 - DNA, 677 bp, Artificial Sequence
  derived and/or modified sequence
cagaagcccagaggctcagcggtgcttctggagttccagtgatcccggagtctgaaccggcagtgagagtggggaaagagggatgccgtgcgcatgctcaataccctgcagaccaatgccggctacctggagcaggtgaagcgccagcggggtgaccctcagacacagttggaagccatggaactgtacctggcacggagtgggctgcaggtggaggacttggaccggctgaacatcatccacgtcactgggacgaaggggaagggctccacctgtgccttcacggaatgtatcctccgaagctatggcctgaagacgggattctttagctctccccacctggtgcaggttcgggagcggatccgcatcaatgggcagcccatcagtcctgagctcttcaccaagtacttctggcgcctctaccaccggctggaggagaccaaggtggacctggcagtggtggaggtgggcattggcggggcttatgactgcaccaacatcatcaggaagcctgtggtgtgcggagtctcctctcttggcatcgaccacaccagcctcctgggggatacggtggagaagatcgcatggcagaaagggggcatctttaagcaaggtgtccctgccttcactgtgctccaacctgaaggtcccctggcagtgctgagggaccgagccca

SEQ ID NO: 107227 - DNA, 1686 bp, Artificial Sequence
  derived and/or modified sequence
atgtcccgggccaggtctcacctgcgagcagctttgttcttggccgccgctagtgcccgcggaatcactacacaggtggcggctaggcggggtctgtccgcctggcccgtgcctcaggagccttcaatggagtatcaggatgccgtccgcatgcttaacacactgcaaaccaatgccggctacttggagcaggtgaagaggcagcgaggcgacccacagactcagttggaagcaatggaactgtacctggcacgtagtgggctgcaggtcgaagatctggaccgccttaacattatccacgttaccggtacaaagggaaaggggtctacttgtgcattcactgagtgtatcctgcgctcctacggcctgaagactggctttttctcttcaccacatctggtccaggtccgcgagcgaattagaattaacggccagcctattagccccgagttattcacaaagtatttttggcgcctctatcacaggttagaggaaacaaaagtggatttagccgttgtggaggttggcatcggcggcgcctacgattgtactaacattatccgtaagccggtcgtgtgcggggtgtcatctcttggcattgatcacacttctctattgggggatactgtagaaaaaattgcttggcagaaggggggaattttcaaacagggagtcccagccttcactgtgctgcagcctgaagggcctctggccgtcctgcgggatcgggcacagcaaatctcttgcccattgtacctctgcccaatgttggaggcgctagaggaggggggcccacctctgacgctggggcttgaaggagaacaccaacgatcaaatgccgccctggccctgcaactagcacactgctggctccagagacaggatagacatggggccggtgaacctaaagcttccagaccaggacttctgtggcaactgcctctagcacctgttttccaacccacctcacatatgcgcctcggacttcgcaacacagagtggccaggaaggacccaggtgctgagacggggcccccttacctggtacctcgatggggctcatacagccagcagcgcccaggcctgtgtgagatggttccgtcaagccctgcagggtcgcgagcggccttctggtgggcccgaggtgcgggtgctgctctttaacgccactggagatcgcgatcctgccgctctgctgaagttgttgcagccatgtcagttcgactatgccgtgttctgccccaacctgaccgaggtctccagtactggcaatgccgaccagcaaaacttcactgtcaccctagatcaagttctgctcaggtgcttggaacatcagcagcattggaatcacctagacgaagagcaggcgtcacctgacctctggagcgctccgtccccagagcccggcgggtccgcgagcttgctgctggccccccacccaccccatacctgtagtgcatccagcctggtgttcagttgtatctctcatgcattgcagtggatatcacaaggtagagacccaatttttcagccccccagcccacctaagggccttttgactcaccccgtggcccactctggagcaagcattctccgggaagcggcagctattcacgttctcgtgactggcagcctgcacctggtgggtggggtgttgaagctgcttgagcctgcactgtctcagtag

SEQ ID NO: 107228 - DNA, 585 bp, Artificial Sequence
  derived and/or modified sequence
atgctgaacacactgcagactaatgctgggtaccttgaacaggtaaagcggcagagaggtgatccacagacccaactggaggccatggagttgtatctagcccgctcaggactgcaagtcgaggatcttgaccggcttaatatcatacacgtgaccgggactaaaggtaaagggtcgacttgtgcatttacagagtgtatcctgcggtcctacggtctgaaaaccggcttttttagctctccccaccttgtgcaggtgagagaaaggattcgcataaacggtcagccaatatcaccagagctattcaccaagtatttttggcgcctgtatcacagacttgaggaaactaaggtagatctggccgttgtggaagtcggcatcggtggagcctacgattgtaccaacattattagaaaaccagtcgtttgtggtgtgtcctctctcggcatcgaccacaccagcctgctgggtgacacggtggaaaaaattgcctggcagaagggtgggattttcaagcagggtgtgccggcgtttacggtcctgcagcccgagggaccactggcagtgctgagggatcgcgcctag

SEQ ID NO: 107229 - DNA, 1686 bp, Artificial Sequence
  derived and/or modified sequence
atgagccgggcccggagccacctgcgggccgccctcttcctggccgccgccagcgcccggggcatcaccacccaggtggccgcccggcggggcctgagcgcctggcctgtgccccaggagcccagcatggagtaccaggatgctgtgaggatgctgaacaccctgcagaccaatgccggctacctggagcaggtgaagaggcagagaggagacccccagacccagctggaggccatggagctgtacctggcccggagcggcctgcaggtggaggacctggaccggctgaacatcatccacgtgacaggcaccaagggcaagggcagcacctgtgccttcacagagtgcatcctgcggagctatggcctgaagacaggcttcttcagcagcccccacctggtgcaggtgcgggagcgcatccgcatcaatggccagcccatcagccctgagctgttcaccaagtacttctggaggctgtaccaccggctggaggagaccaaggtggacctggccgtggtggaggtgggcattggaggagcctatgactgcaccaacatcatcaggaagcctgtggtgtgtggggtgagcagcctgggcatcgaccacaccagcctgctgggggacacagtggagaagatcgcctggcagaagggcggcatcttcaagcagggcgtgcctgccttcaccgtgctgcagcctgagggccccctggccgtgctgcgggaccgggcccagcagatcagctgccccctgtacctgtgccccatgctggaggccctggaggagggcggcccccccctgaccctgggcctggagggggagcaccagaggagcaatgctgccctggccctgcagctggcccactgctggctgcagaggcaggacagacatggagctggggagcccaaggccagcaggcctggcctgctgtggcagctgcccctggcccctgtgttccagcccaccagccacatgaggctgggcctgaggaacacagagtggccaggccgcacccaggtgctgcggcggggccccctgacctggtacctggatggagcccacacagccagcagcgcccaggcctgtgtgcgctggttccggcaggccctgcagggccgggagcggcccagcggcggccctgaggtgcgggtgctgctcttcaatgccaccggggaccgggaccctgctgccctgctgaagctgctgcagccctgccagtttgattatgctgtgttctgccccaacctgacagaggtgagcagcactggaaatgctgaccagcagaacttcaccgtgaccctggaccaggtgctgctgcgctgcctggagcaccagcagcactggaaccacctggatgaggagcaggccagcccagacctgtggagcgcccccagccctgagcccggcggcagcgccagcctgctgctggccccccaccccccccacacctgcagcgccagcagcctggtgttcagctgcatcagccacgccctgcagtggatcagccagggccgggaccccatcttccagccccccagcccccccaagggcctgctgacccaccctgtggcccacagcggggccagcatcctgcgggaggccgccgccatccacgtgctggtgacaggcagcctgcacctggtgggcggcgtgctgaagctgctggagcccgccctgagccagtag

SEQ ID NO: 107230 - DNA, 585 bp, Artificial Sequence
  derived and/or modified sequence
atgctgaacaccctgcagaccaatgccggctacctggagcaggtgaagaggcagagaggagacccccagacccagctggaggccatggagctgtacctggcccggagcggcctgcaggtggaggacctggaccggctgaacatcatccacgtgacaggcaccaagggcaagggcagcacctgtgccttcacagagtgcatcctgcggagctatggcctgaagacaggcttcttcagcagcccccacctggtgcaggtgcgggagcgcatccgcatcaatggccagcccatcagccctgagctgttcaccaagtacttctggaggctgtaccaccggctggaggagaccaaggtggacctggccgtggtggaggtgggcattggaggagcctatgactgcaccaacatcatcaggaagcctgtggtgtgtggggtgagcagcctgggcatcgaccacaccagcctgctgggggacacagtggagaagatcgcctggcagaagggcggcatcttcaagcagggcgtgcctgccttcaccgtgctgcagcctgagggccccctggccgtgctgcgggaccgggcctag

SEQ ID NO: 107231 - DNA, 1686 bp, Artificial Sequence
  derived and/or modified sequence
atgagccgggcccggagccacctgcgggccgccctgttcctggccgctgcctccgctagagggattaccacccaggtggcagcgcgtcgaggactgtctgcttggcccgttccccaggaaccctccatggagtatcaggacgcggtaagaatgctcaacactttgcagaccaatgccggttacctggaacaggtgaagcggcagaggggcgatccacaaacacagcttgaggcgatggaattatacctggcgcgatccgggttgcaggtggaggacctcgatagactgaacatcattcacgtgacgggaacaaagggaaaaggttctacttgcgctttcactgagtgtatactgcgatcctacggtcttaagaccggcttttttagctctccgcacctggttcaggtgcgggaacgtattagaattaatggacaaccaatctctccagagcttttcacaaagtacttctggcggctgtatcatcggctcgaagagaccaaagtggatctggcagtggtggaagtaggcattggaggcgcttatgactgtactaatatcatcagaaagcccgttgtgtgtggggtgagcagcctcggaatcgatcacacgtcgttgctgggcgataccgtggaaaagattgcatggcagaaaggaggcattttcaaacagggagtccccgccttcaccgtgctacagcctgaaggcccacttgccgtgctgcgggaccgggctcagcagatttcatgtccgctttacctgtgtccaatgttagaggcactggaagaggggggtccaccactgacccttggcctggaaggcgaacaccagcggtccaatgcggccctcgccctgcaactggcccactgctggttgcagagacaggaccgccacggggccggtgaacctaaagccagccgtcccggcttgttgtggcagctcccgcttgcaccggtatttcagcccacgtcccacatgagacttggtttgcggaacacggaatggccaggccggacacaggtcctgcgccgtggacccctgacatggtatctggacggagcccacactgcttcaagcgcccaagcttgtgtacgatggttcaggcaggcactgcagggaagagagagaccaagcggcggccccgaggtgagggttctgttgtttaacgctacaggtgatcgagaccccgccgcgctgctgaagttattgcagccctgtcagttcgactacgcagttttttgcccgaatttgacggaagtgtctagcaccgggaacgcagaccagcagaacttcactgtgactttggaccaagtccttctgagatgtttagagcaccagcagcactggaatcacctggacgaggaacaggcctccccagacctgtggtccgctcccagtccagaacctggtggatccgctagccttctgctggcccctcaccctccccatacctgtagtgctagcagcctcgtgttcagttgtatctctcacgctttgcagtggattagccagggacgggatcccatcttccaacctccttcacccccaaagggcctactgactcatccagtggcacacagtggtgcttctattctgcgagaggctgcagctatacatgtcctcgtcactggctccctacatctggtgggcggagttcttaagctcttagagcccgccctttctcagtag

SEQ ID NO: 107232 - DNA, 585 bp, Artificial Sequence
  derived and/or modified sequence
atgctgaacaccctgcagaccaacgccggctacctggagcaggtgaagcgtcagcgaggtgaccctcagacacaacttgaagctatggagctgtatctggctcgctcagggctccaggttgaagatttggatcgtttgaacattattcatgtgaccggtacgaaaggcaagggtagtacatgcgcttttactgagtgcatcctcaggagctacggactgaagactgggttctttagctcacctcatctggtacaagtgcgcgagaggatccgtatcaatggtcaacctatttctccggagttgtttacaaagtacttttggcggttataccataggctggaagagacgaaggttgatctggcagtggtagaggtcgggattgggggtgcatacgactgtactaatatcataaggaaaccagtagtttgcggtgtaagctctttaggaatcgaccatacctctctgttgggagacaccgtggaaaagattgcctggcagaaagggggcatctttaaacaaggggtgccggcgtttaccgttctgcagccagaggggccactggctgtccttagggatagggcttag

SEQ ID NO: 107233 - DNA, 1686 bp, Artificial Sequence
  derived and/or modified sequence
atgtcccgggctaggagtcatttgagagcagccctgttcttggccgctgcgagcgcacgtgggatcacaacccaggtagctgccagacgaggcctctccgcttggcccgttccgcaggaaccatcaatggagtatcaggatgcggtgaggatgcttaataccctgcagacaaatgccggatatctcgaacaggtgaagcggcagcgaggggatccgcagacacagctagaggccatggagctgtacctggccaggagcggcctgcaagtggaggatttggaccggctgaacatcatccatgtaaccgggacgaaggggaaggggtccacctgcgcctttactgaatgcatcctgaggagctacggactgaaaaccgggtttttctcatcccctcacctcgtacaggtccgtgaacgcataagaattaacggacagcccatctctccggaactcttcaccaagtacttttggcgtctatatcataggctggaagagactaaagtggatctggcagtagtggaggtgggtattggaggggcttatgattgcacaaatattataagaaagccagtggtgtgcggggtgtctagccttgggatagaccatacaagcctgctgggggacacagtcgaaaagatcgcatggcagaaggggggtatatttaagcaaggggtgccagcttttacagtgcttcagcctgagggcccactggccgttctgagagatcgtgcacaacaaatctcatgtcccctttacttatgccccatgctcgaggccctcgaggagggtgggcctccactgaccctgggcctggagggagagcaccagcgttccaacgcagctctggccctacagctcgctcactgctggctgcagcgacaggacaggcatggggcaggtgaacccaaggccagcaggccaggattactgtggcagttaccactggctccagttttccagcctacaagccatatgagacttggcttgaggaacactgagtggcccggtcgcacacaggtgctgcgccgaggaccacttacttggtacctggatggggctcacaccgcgagcagcgctcaggcatgcgtgcgctggttccgacaggccttacagggcagggagcgaccttccggaggcccagaagttcgagtattattgttcaacgccacaggcgaccgagatccggcagctcttcttaagcttctgcaaccttgccagttcgattatgccgtcttctgtccaaatctgactgaggtgagtagtaccgggaatgcggaccaacagaacttcacagtaaccctggaccaagtgcttcttcggtgcctggaacaccaacaacactggaaccacctcgatgaagagcaggcctccccggatttgtggtctgcaccatcacctgaacctggtggtagcgcaagtctcttactggccccacaccctccacatacatgctcagcatctagccttgtcttctcttgtatcagccacgcactgcagtggatctcacaggggagggatccaattttccagccaccctcccctcccaaagggctattaacccaccccgtcgcacatagcggcgctagcattctcagagaggcagccgctattcacgtgctagtcacaggcagtctgcacctggtcggcggagtattaaagctgctggagccagcactcagccaatag

SEQ ID NO: 107234 - DNA, 585 bp, Artificial Sequence
  derived and/or modified sequence
atgttgaacacactgcaaacaaacgctgggtacctggagcaggtcaagaggcaacgtggagaccctcagacccagctggaagccatggagctatacctcgccaggtccgggttgcaggtggaggatttggatcgtcttaatattatacacgtgactggcaccaaaggtaaaggctcaacatgcgcttttaccgagtgtatcctcaggtcctacggactgaagacaggctttttttcatctccacacctggtgcaagtgcgtgaacgcatcaggataaacggtcagccaatttctccagagctatttacaaagtacttttggaggttgtaccaccgcttagaggagaccaaggttgatctggccgtcgtggaggttggaattggtggggcatatgactgtactaacatcatccgtaagccagttgtgtgcggggtgagctctttggggatcgatcacactagtttgctgggagatacagtggaaaagatcgcttggcaaaaaggaggcatctttaagcagggggtcccggcattcaccgtgctgcaacctgaaggccctctggccgtcctccgagacagagcatag

SEQ ID NO: 107235 - DNA, 1686 bp, Artificial Sequence
  derived and/or modified sequence
atgagcagagccagaagccacctgagagccgccctgttcctggccgccgccagcgccagaggcatcaccacccaggtggccgccagaagaggcctgagcgcctggcccgtgccccaggagcccagcatggagtaccaggacgccgtgagaatgctgaacaccctgcagaccaacgccggctacctggagcaggtgaagagacagagaggcgacccccagacccagctggaggccatggagctgtacctggccagaagcggcctgcaggtggaggacctggacagactgaacatcatccacgtgaccggcaccaagggcaagggcagcacctgcgccttcaccgagtgcatcctgagaagctacggcctgaagaccggcttcttcagcagcccccacctggtgcaggtgagagagagaatcagaatcaacggccagcccatcagccccgagctgttcaccaagtacttctggagactgtaccacagactggaggagaccaaggtggacctggccgtggtggaggtgggcatcggcggcgcctacgactgcaccaacatcatcagaaagcccgtggtgtgcggcgtgagcagcctgggcatcgaccacaccagcctgctgggcgacaccgtggagaagatcgcctggcagaagggcggcatcttcaagcagggcgtgcccgccttcaccgtgctgcagcccgagggccccctggccgtgctgagagacagagcccagcagatcagctgccccctgtacctgtgccccatgctggaggccctggaggagggcggcccccccctgaccctgggcctggagggcgagcaccagagaagcaacgccgccctggccctgcagctggcccactgctggctgcagagacaggacagacacggcgccggcgagcccaaggccagcagacccggcctgctgtggcagctgcccctggcccccgtgttccagcccaccagccacatgagactgggcctgagaaacaccgagtggcccggcagaacccaggtgctgagaagaggccccctgacctggtacctggacggcgcccacaccgccagcagcgcccaggcctgcgtgagatggttcagacaggccctgcagggcagagagagacccagcggcggccccgaggtgagagtgctgctgttcaacgccaccggcgacagagaccccgccgccctgctgaagctgctgcagccctgccagttcgactacgccgtgttctgccccaacctgaccgaggtgagcagcaccggcaacgccgaccagcagaacttcaccgtgaccctggaccaggtgctgctgagatgcctggagcaccagcagcactggaaccacctggacgaggagcaggccagccccgacctgtggagcgcccccagccccgagcccggcggcagcgccagcctgctgctggccccccaccccccccacacctgcagcgccagcagcctggtgttcagctgcatcagccacgccctgcagtggatcagccagggcagagaccccatcttccagccccccagcccccccaagggcctgctgacccaccccgtggcccacagcggcgccagcatcctgagagaggccgccgccatccacgtgctggtgaccggcagcctgcacctggtgggcggcgtgctgaagctgctggagcccgccctgagccagtag

SEQ ID NO: 107236 - DNA, 585 bp, Artificial Sequence
  derived and/or modified sequence
atgctgaacaccctgcagaccaacgccggctacctggagcaggtgaagagacagagaggcgacccccagacccagctggaggccatggagctgtacctggccagaagcggcctgcaggtggaggacctggacagactgaacatcatccacgtgaccggcaccaagggcaagggcagcacctgcgccttcaccgagtgcatcctgagaagctacggcctgaagaccggcttcttcagcagcccccacctggtgcaggtgagagagagaatcagaatcaacggccagcccatcagccccgagctgttcaccaagtacttctggagactgtaccacagactggaggagaccaaggtggacctggccgtggtggaggtgggcatcggcggcgcctacgactgcaccaacatcatcagaaagcccgtggtgtgcggcgtgagcagcctgggcatcgaccacaccagcctgctgggcgacaccgtggagaagatcgcctggcagaagggcggcatcttcaagcagggcgtgcccgccttcaccgtgctgcagcccgagggccccctggccgtgctgagagacagagcctag

SEQ ID NO: 107237 - DNA, 1008 bp, Artificial Sequence
  derived and/or modified sequence
atgggcgtgggcagcagaatggaccaggagcaggccgccctggccgccgtgacccccagccccaccagcgccagcaagagatggcccggcgccagcgtgtggcccagctgggacctgctggaggcccccaaggaccccttcagcatcgagagagaggccagactgcacagacaggccgccgccgtgaacgaggccacctgcacctggagcggccagctgccccccagaaactacaagaaccccatctacagctgcaaggtgttcctgggcggcgtgccctgggacatcaccgaggccggcctggtgaacaccttcagagtgttcggcagcctgagcgtggagtggcccggcaaggacggcaagcaccccagatgcccccccaagggctacgtgtacctggtgttcgagctggagaagagcgtgagaagcctgctgcaggcctgcagccacgaccccctgagccccgacggcctgagcgagtactacttcaagatgagcagcagaagaatgagatgcaaggaggtgcaggtgatcccctgggtgctggccgacagcaacttcgtgagaagccccagccagagactggaccccagcagaaccgtgttcgtgggcgccctgcacggcatgctgaacgccgaggccctggccgccatcctgaacgacctgttcggcggcgtggtgtacgccggcatcgacaccgacaagcacaagtaccccatcggcagcggcagagtgaccttcaacaaccagagaagctacctgaaggccgtgagcgccgccttcgtggagatcaagaccaccaagttcaccaagaaggtgcagatcgacccctacctggaggacagcctgtgccacatctgcagcagccagcccggccccttcttctgcagagaccaggtgtgcttcaagtacttctgcagaagctgctggcactggagacacagcatggagggcctgagacaccacagccccctgatgagaaaccagaagaacagagacagcagctag

SEQ ID NO: 107238 - DNA, 1008 bp, Artificial Sequence
  derived and/or modified sequence
atgggagtcggatcccggatggaccaggaacaggcagccctagccgccgtcacaccatctcccacgagtgccagtaaacgatggcccggagcatcagtttggcccagctgggacttgctcgaggcccccaaggatcccttcagtattgaaagggaagccagactgcataggcaggccgccgccgtgaacgaggccacgtgcacatggagtggacagctgccaccaagaaactacaagaatccaatttactcttgtaaggtattccttgggggcgtcccttgggacattacggaggcaggtcttgtgaatactttccgcgtctttggcagtctttctgtggaatggccgggaaaagacgggaagcatcccaggtgcccgccaaaaggctatgtgtacctggtctttgaattggagaagagtgttagatcattgctccaagcctgcagtcatgaccccctgagccccgacggcctgtcggagtattacttcaagatgagctctagacggatgcggtgtaaggaggtccaggtcattccttgggttctggctgatagtaatttcgtgcgctcaccttcacagcgccttgaccccagccgaaccgtctttgtaggcgcactccatggaatgttaaatgccgaagccctggctgctatcctcaacgacctctttgggggtgtagtgtacgccggtattgacacggacaagcacaaatacccaatcggcagtggaagggtcactttcaacaaccaacggtcctacctgaaggctgtgtctgcagcgtttgtcgagattaaaacaaccaagtttaccaagaaagtgcagattgatccatacctcgaagacagtctttgccacatttgctcctcacaaccagggccttttttctgtagagaccaggtttgcttcaaatacttctgccggtcttgttggcactggcggcacagtatggagggccttagacatcactcacctcttatgcgcaatcagaaaaatagagatagttcttag

SEQ ID NO: 107239 - DNA, 1008 bp, Artificial Sequence
  derived and/or modified sequence
atgggcgtgggcagcaggatggaccaggagcaggccgccctggccgctgtgacccccagccccaccagcgccagcaagcgctggccaggggcctctgtgtggcccagctgggacctgctggaggcccccaaggaccccttcagcattgagcgggaggcccggctgcaccggcaggccgctgctgtgaatgaggccacctgcacctggagcggccagctgccccccaggaactacaagaaccccatctacagctgcaaggtgttcctgggcggcgtgccctgggacatcacagaagctggcctggtgaacaccttccgggtgtttggcagcctgtctgtggagtggccaggcaaggatggcaagcacccccgctgcccccccaagggctacgtgtacctggtgtttgagctggagaagtctgtgcgcagcctgctgcaggcctgcagccatgaccccctgagcccagatggcctgtctgagtactacttcaagatgagcagcaggaggatgcgctgcaaggaggtgcaggtgatcccctgggtgctggccgacagcaactttgtgcgcagccccagccagaggctggaccccagcaggacagtgtttgtgggcgccctgcacggcatgctgaatgctgaggccctggccgccatcctgaatgacctgtttggaggagtggtgtatgccggcatcgacacagacaagcacaagtaccccatcggcagcggccgggtgaccttcaacaaccagaggagctacctgaaggctgtgtctgctgcctttgtggagatcaagaccaccaagttcaccaagaaggtgcagattgacccctacctggaggacagcctgtgccacatctgcagcagccagcccggccccttcttctgccgggaccaggtgtgcttcaagtacttctgccgcagctgctggcactggaggcacagcatggagggcctgcggcaccacagccccctgatgaggaaccagaagaacagagacagcagctag

SEQ ID NO: 107240 - DNA, 1008 bp, Artificial Sequence
  derived and/or modified sequence
atgggcgtgggcagccggatggaccaggagcaggccgccctggccgccgtaacgccttctccaactagtgcttcgaaaagatggcccggggcatcggtgtggcctagctgggacctgctggaagcacccaaagaccctttcagtatcgagcgggaggccagactgcatcgtcaggccgcggcagtgaacgaagcaacatgcacatggtccggccaactccctcctagaaactataaaaatcccatatactcgtgtaaggttttcctgggcggcgtcccttgggacattacggaggcaggccttgtcaatactttccgggtcttcggcagcttatcagtagaatggcctggcaaggacgggaaacacccacgctgtccacctaaggggtatgtctacctggtcttcgagttggaaaagagcgtgagatcattgttgcaggcttgttcccacgacccactctcaccagatggacttagcgagtactactttaaaatgtctagtagacgtatgcgatgcaaggaggtgcaggtgattccatgggtgctcgccgactctaattttgtgagatcaccttctcagaggttagacccaagtaggacggtgttcgtgggagccttgcacggaatgctcaacgctgaagccttggccgctatcctcaatgatttgtttggtggcgttgtctatgcggggatcgacaccgataagcataagtatccaataggctcaggccgagttacttttaataatcaaagaagctatctgaaagcggtgagtgcagcttttgtggaaataaagactaccaagttcactaagaaggtgcagatagatccctacctggaggacagcctgtgccacatttgctccagccaacccggcccttttttctgcagagatcaggtatgttttaaatacttctgccgctcttgttggcattggcgacactctatggaaggtttacggcatcactctccccttatgaggaatcagaagaatagggacagttcctag

SEQ ID NO: 107241 - DNA, 1008 bp, Artificial Sequence
  derived and/or modified sequence
atgggggtgggaagtcggatggaccaggaacaggcagccctggccgcagtgacaccatctccaactagcgcgtcaaagcgctggccaggggcatccgtgtggcccagttgggacttgctggaagcgcctaaagatccattttctatcgagagggaggcacgtctgcaccgacaggccgcagctgtcaacgaagcgacctgtacctggagtgggcagcttccacccaggaactacaagaacccaatctatagttgtaaagtcttcctgggcggtgtcccttgggatatcactgaagccggactggtaaatacttttcgggtgttcggtagcttgtccgtggaatggcccggaaaggacggcaagcaccctagatgccctcccaagggctacgtatatcttgtattcgaactcgagaaaagcgtaaggtccctcctacaggcatgctcccacgatcctttgagtccggacggtctctctgaatactattttaagatgtcatctcgcaggatgcgttgcaaggaggtccaggtgattccgtgggtgctcgccgactcaaatttcgtgcgctccccgtctcagcgccttgaccctagtaggacggtcttcgtaggggcacttcacggcatgcttaatgccgaggctcttgccgcaattctcaacgatttgttcggcggtgttgtctatgcaggtatcgacacagataagcataaataccccatcgggtcaggacgtgttacatttaataaccagcgcagctacttaaaggccgtcagcgccgcttttgttgaaattaaaaccactaagtttaccaagaaagtgcaaatcgacccatacttggaggacagtctctgtcatatatgctcgtcacagcccggaccctttttttgccgcgaccaggtctgcttcaagtatttttgccgttcttgctggcactggcggcattcaatggagggtttgagacatcactccccactgatgaggaatcagaagaaccgggacagcagctag

SEQ ID NO: 107242 - protein, 318 aa, Artificial Sequence
  derived and/or modified sequence
MWPLTALLLLVPSSGQAATLEKPILSLHPPWTTIFKGERVTLKCDGYHPLLLELQPISTLWYLGHLLLPSHKKSIEVQTPGVYRCQTRGAPVSDPIHLSVSNDWLILQVPYAPVFEGEPLVLRCRGWYDKVVYKLHYYHDGQAVRYFHSSANYTVLQARASDSGRYQCSGTMRIPVESAPMFSAKVAVTVQAARCAASTGAPSTQSRSPRSRSSNRTGARRLPPPAVSGNAVRGCSSRGRVLPWTRPPPPPQLHGPQPWLLVIGRFPSESPRCPDRSRWSPPSGTPPPPGCSSRRAAPRLRGHPPALRRRPWNNRLEP

SEQ ID NO: 107243 - DNA, 957 bp, Artificial Sequence
  derived and/or modified sequence
atgtggcccctgaccgccctgctgctgctggtgcccagcagcggccaggccgccaccctggagaagcccatcctgagcctgcaccccccctggaccaccatcttcaagggcgagagagtgaccctgaagtgcgacggctaccaccccctgctgctggagctgcagcccatcagcaccctgtggtacctgggccacctgctgctgcccagccacaagaagagcatcgaggtgcagacccccggcgtgtacagatgccagaccagaggcgcccccgtgagcgaccccatccacctgagcgtgagcaacgactggctgatcctgcaggtgccctacgcccccgtgttcgagggcgagcccctggtgctgagatgcagaggctggtacgacaaggtggtgtacaagctgcactactaccacgacggccaggccgtgagatacttccacagcagcgccaactacaccgtgctgcaggccagagccagcgacagcggcagataccagtgcagcggcaccatgagaatccccgtggagagcgcccccatgttcagcgccaaggtggccgtgaccgtgcaggccgccagatgcgccgccagcaccggcgcccccagcacccagagcagaagccccagaagcagaagcagcaacagaaccggcgccagaagactgcccccccccgccgtgagcggcaacgccgtgagaggctgcagcagcagaggcagagtgctgccctggaccagaccccccccccccccccagctgcacggcccccagccctggctgctggtgatcggcagattccccagcgagagccccagatgccccgacagaagcagatggagcccccccagcggcaccccccccccccccggctgcagcagcagaagagccgcccccagactgagaggccacccccccgccctgagaagaagaccctggaacaacagactggagccctag

SEQ ID NO: 107244 - DNA, 957 bp, Artificial Sequence
  derived and/or modified sequence
atgtggcctctcaccgccctgcttctattggtcccttcaagtggtcaggcggccaccctggaaaagccgatcctgagtttacacccgccgtggacgaccattttcaagggtgagagagtaaccctgaagtgtgatgggtaccaccccctgttactggagttgcaacctatctcaaccctgtggtacctcgggcacctgctcttaccttcacacaagaagagtatcgaagtgcaaactcctggagtgtataggtgtcagactagaggtgctcctgtgtccgatccaatacacttgtcagtgtcgaacgattggctcatcctgcaggtaccgtatgccccggtttttgagggtgagcctctcgtccttaggtgccgcggatggtatgataaggtggtttacaagctgcactattaccacgatggacaggccgtgcgttacttccactcttccgcaaactacacagtgctgcaggccagagcctcggacagcggcagataccagtgcagcggaactatgcgcattcccgtagagtcagcccctatgttctctgcgaaagttgcagtgacagtgcaggcagcccgctgcgccgccagtacaggcgctcctagcacacaatctagatcaccccgtagccggtcgagcaatagaaccggggcgcggcgtttgcctcctcccgccgtaagcggtaatgctgtccgaggttgcagtagccgaggccgcgtgctcccttggaccaggcccccccccccacctcagctacacggaccccagccttggctactggttatcggccgatttccctctgaatctccccggtgccccgaccgctctcggtggtccccaccctccgggaccccacccccacctggctgtagtagtaggagggctgctccaagacttagagggcaccccccggctctgcgaagaagaccctggaataaccgccttgaaccttag

SEQ ID NO: 107245 - DNA, 1152 bp, Artificial Sequence
  derived and/or modified sequence
cagtcagatccatcatgtggccactgacagcccttctgctcctggttccaagcagtgggcaagctgctactctggagaagcccatattgtctctacatccaccttggaccaccatcttcaaaggggagcgggtaactttgaagtgtgatggataccacccactgctcctggagctccagcccatcagcactctctggtatttgggccacctacttctgccctctcacaagaagagcattgaggtgcagacaccaggggtgtatcgatgccagacacggggagcacccgtcagtgaccccatccacctctctgtatccaatgattggctgattctgcaagtgccctatgcgccagtgttcgagggtgagccgctagtcctgcgctgccgcggctggtacgacaaggtggtctacaagcttcactactaccacgacggccaggccgtgcgctacttccactccagcgccaactacactgtgttacaggcgcgtgccagcgacagcgggcgctaccagtgctcgggcaccatgcgcatcccggtggagagcgcgcccatgttctccgctaaggtggctgtgacagtgcaagccgcgcggtgcgccgcttcgactggggcgccgagtacacagtcccggagcccgaggtcgaggagctcgaatcgtactggtgcgaggcggctaccgccacccgcagtgtccggaaacgcagtccgtggctgcagctcccggggccgggttctcccctggacccggcctccaccaccgccccagctccatgggccgcagccttggctcctggtaataggccgctttccttcagaaagcccccggtgtccagatcggtcccgttggtcacctccgtccggaacaccacctccaccgggctgcagttcccggcgagcggcgccccgactgcggggccacccgcctgcgctccgccgacgcccttggaacaatcggctggagccctgaaacccgacgtggaccttctgctccgagaaatgcagctgctcaaaggccttctgagccgggtggtcctggaattaaaggagccacaggccctccgggagctcaggggaacgcccgagacccccacctctcactttgctgtgagcccgggaaccccagagaccactcctgtggagagctgagg

SEQ ID NO: 107246 - DNA, 957 bp, Artificial Sequence
  derived and/or modified sequence
atgtggcccctgacagccctgctgctgctggtgcccagcagcggccaggccgccaccctggagaagcccatcctgagcctgcaccccccctggaccaccatcttcaagggggagcgggtgaccctgaagtgtgatggctaccaccccctgctgctggagctgcagcccatcagcaccctgtggtacctgggccacctgctgctgcccagccacaagaagagcattgaggtgcagaccccaggagtgtaccgctgccagaccaggggggcccctgtgtctgaccccatccacctgtctgtgtccaatgactggctgatcctgcaggtgccctatgcccctgtgtttgaaggagagcccctggtgctgcgctgccggggctggtatgacaaggtggtgtacaagctgcactactaccatgatggccaggccgtgcgctacttccacagcagcgccaactacacagtgctgcaggcccgggccagtgacagcggccgctaccagtgcagcggcaccatgagaattcctgtggagagcgcccccatgttttctgccaaggtggccgtgacagtgcaggccgcccgctgtgccgccagcactggagcccccagcacccagagccgcagccccaggagccgcagcagcaacagaactggagcccggcggctgcccccacctgctgtgtctggaaatgctgtgcggggctgcagcagccggggccgggtgctgccctggaccaggcctcctcctccaccccagctgcacggcccccagccctggctgctggtgattggccgcttccccagcgagagcccccgctgcccagacaggagccgctggagccccccatctggcaccccacctcctcctggctgcagcagccggcgggccgccccccggctgcggggccaccccccagccctgcggcggcggccctggaacaaccggctggagccctag

SEQ ID NO: 107247 - DNA, 957 bp, Artificial Sequence
  derived and/or modified sequence
atgtggcccctgaccgccctgctgctgctggtgcccagcagcggccaggctgcaaccctagagaagcctatcctgtccctgcaccctccctggacaacgattttcaaaggcgagcgagttaccctgaagtgcgacggataccatccactgcttctcgaactgcaacctattagtacgctttggtatctggggcacctcctgctgccatcacataagaagtctattgaggtgcagacacctggcgtttacaggtgccagacacggggcgccccggtctccgatcctatccacctcagcgtgagcaacgactggctcatactgcaggtaccctacgcaccggtgttcgagggcgaaccattagtcctccgttgcagagggtggtacgacaaggtggtctacaagctccattattaccatgatggacaagctgtacgctactttcacagctccgctaactatacagtgcttcaggcaagagccagcgattctggtcgctaccaatgctccggcaccatgaggattccagtggagtctgcgcccatgtttagtgcaaaagtcgccgtcaccgttcaggccgcccggtgtgctgcgtccacaggtgctccatccacacagagccgttccccacgctcccggtcttcaaatagaacaggagcacggcgcctaccaccacctgctgtaagcggcaatgcagtgagagggtgctcttccagagggcgagttctgccgtggacccgccctccaccaccccctcagctccacggaccccaaccttggctattagtcatcggccggtttcccagcgagagcccccggtgtcccgatcgtagtaggtggagtccaccctcaggcaccccacccccacccggctgcagcagccgccgggctgctccaaggctgagaggccatcctcccgctctccgtagaaggccatggaacaatcgtttggagccatag

SEQ ID NO: 107248 - DNA, 957 bp, Artificial Sequence
  derived and/or modified sequence
atgtggccgctgacagctctgctcctattggtcccatcatccggacaggccgcaacactcgagaaacctattctgtccctgcacccaccctggaccaccatcttcaagggcgaacgggttacactgaaatgcgacggataccaccctctccttctggaactccagccgatttctaccctgtggtatctcgggcacctacttctgccgtcacacaagaagtccatcgaggtgcaaacacctggtgtatacaggtgccagacccggggagctcccgtcagtgacccaattcaccttagtgtatcaaacgattggctaatccttcaggtgccttatgcccctgtctttgaaggcgaacctctcgtgctccgttgcagaggctggtatgacaaggttgtatacaagctccactattaccacgatggacaggctgttcgttactttcattctagcgcaaattacaccgtcctccaggcccgagcctcagatagcggtcggtaccagtgttcaggaacaatgaggatcccagtggagtctgctccgatgttctctgccaaagtcgccgtcactgtgcaagctgcccgatgtgcagcctcaacaggggcaccgtcgactcagtctcgatccccacgcagccgtagcagcaaccgcaccggagccagaaggttacctccaccagctgtaagtggaaatgccgtgcgcggatgctcatccaggggaagagtgctgccctggactcgtcccccacctccaccccagctgcacggcccacagccttggcttctcgtgatcgggagattccctagtgaatctccacggtgcccagatcgttcacggtggtctcctccatccggaacgccccctcctccaggctgctcaagtcggagagcggcaccaaggctccgcggacatccacctgccctaaggagacgaccctggaacaacaggctggaaccatag

SEQ ID NO: 107249 - protein, 311 aa, Artificial Sequence
  derived and/or modified sequence
MWPLTALLLLATLEKPILSLHPPWTTIFKGERVTLKCDGYHPLLLELQPISTLWYLGHLLLPSHKKSIEVQTPGVYRCQTRGAPVSDPIHLSVSNDWLILQVPYAPVFEGEPLVLRCRGWYDKVVYKLHYYHDGQAVRYFHSSANYTVLQARASDSGRYQCSGTMRIPVESAPMFSAKVAVTVQAARCAASTGAPSTQSRSPRSRSSNRTGARRLPPPAVSGNAVRGCSSRGRVLPWTRPPPPPQLHGPQPWLLVIGRFPSESPRCPDRSRWSPPSGTPPPPGCSSRRAAPRLRGHPPALRRRPWNNRLEP

SEQ ID NO: 107250 - DNA, 936 bp, Artificial Sequence
  derived and/or modified sequence
atgtggcccctgaccgccctgctgctgctggccaccctggagaagcccatcctgagcctgcaccccccctggaccaccatcttcaagggcgagagagtgaccctgaagtgcgacggctaccaccccctgctgctggagctgcagcccatcagcaccctgtggtacctgggccacctgctgctgcccagccacaagaagagcatcgaggtgcagacccccggcgtgtacagatgccagaccagaggcgcccccgtgagcgaccccatccacctgagcgtgagcaacgactggctgatcctgcaggtgccctacgcccccgtgttcgagggcgagcccctggtgctgagatgcagaggctggtacgacaaggtggtgtacaagctgcactactaccacgacggccaggccgtgagatacttccacagcagcgccaactacaccgtgctgcaggccagagccagcgacagcggcagataccagtgcagcggcaccatgagaatccccgtggagagcgcccccatgttcagcgccaaggtggccgtgaccgtgcaggccgccagatgcgccgccagcaccggcgcccccagcacccagagcagaagccccagaagcagaagcagcaacagaaccggcgccagaagactgcccccccccgccgtgagcggcaacgccgtgagaggctgcagcagcagaggcagagtgctgccctggaccagaccccccccccccccccagctgcacggcccccagccctggctgctggtgatcggcagattccccagcgagagccccagatgccccgacagaagcagatggagcccccccagcggcaccccccccccccccggctgcagcagcagaagagccgcccccagactgagaggccacccccccgccctgagaagaagaccctggaacaacagactggagccctag

SEQ ID NO: 107251 - DNA, 936 bp, Artificial Sequence
  derived and/or modified sequence
atgtggccgctcacagccctgttgctcctcgctaccttggagaaacctatactgtctctccatcctccatggacgacaatcttcaaaggcgaaagggttacacttaaatgtgacggatatcaccctcttctgctggagctacagcccatcagcacactttggtatcttggacatctgttattaccctcacacaaaaagagcatcgaggtccagactcctggcgtgtacaggtgccagacccgcggggcccctgttagcgatccaattcatctgtctgtctctaacgactggctcattcttcaagtaccctacgctcccgtgttcgaaggcgagccacttgtgctgaggtgtaggggatggtacgacaaagtggtctacaaactccactactatcacgatggccaggctgtgaggtacttccactcttctgcgaactataccgttctgcaggctcgcgcttcggacagcgggaggtaccaatgttcaggaaccatgagaataccggtcgagtccgcacctatgttctcagccaaggtcgcagtaaccgtccaagcggctcgatgtgctgcctccaccggagcgcctagtacccaaagccgtagtccccgctccaggagtagtaatagaacgggcgcacgacggctgccaccccccgcggtgagcggcaacgccgtgagaggctgttcttcgcgtggtcgggtgctgccttggacacgcccacctcctccaccccagttacatggaccacagccatggctgctggtgatcgggagattcccaagcgagtcacctaggtgtcctgatagatcacggtggtcacctccgtccggcactccgcctccccctggttgttcctctagaagagccgccccacggttgcgggggcatcctccagctctgcggcggcgtccatggaataaccgacttgaaccgtag

SEQ ID NO: 107252 - DNA, 1131 bp, Artificial Sequence
  derived and/or modified sequence
cagtcagatccatcatgtggccactgacagcccttctgctcctggctactctggagaagcccatattgtctctacatccaccttggaccaccatcttcaaaggggagcgggtaactttgaagtgtgatggataccacccactgctcctggagctccagcccatcagcactctctggtatttgggccacctacttctgccctctcacaagaagagcattgaggtgcagacaccaggggtgtatcgatgccagacacggggagcacccgtcagtgaccccatccacctctctgtatccaatgattggctgattctgcaagtgccctatgcgccagtgttcgagggtgagccgctagtcctgcgctgccgcggctggtacgacaaggtggtctacaagcttcactactaccacgacggccaggccgtgcgctacttccactccagcgccaactacactgtgttacaggcgcgtgccagcgacagcgggcgctaccagtgctcgggcaccatgcgcatcccggtggagagcgcgcccatgttctccgctaaggtggctgtgacagtgcaagccgcgcggtgcgccgcttcgactggggcgccgagtacacagtcccggagcccgaggtcgaggagctcgaatcgtactggtgcgaggcggctaccgccacccgcagtgtccggaaacgcagtccgtggctgcagctcccggggccgggttctcccctggacccggcctccaccaccgccccagctccatgggccgcagccttggctcctggtaataggccgctttccttcagaaagcccccggtgtccagatcggtcccgttggtcacctccgtccggaacaccacctccaccgggctgcagttcccggcgagcggcgccccgactgcggggccacccgcctgcgctccgccgacgcccttggaacaatcggctggagccctgaaacccgacgtggaccttctgctccgagaaatgcagctgctcaaaggccttctgagccgggtggtcctggaattaaaggagccacaggccctccgggagctcaggggaacgcccgagacccccacctctcactttgctgtgagcccgggaaccccagagaccactcctgtggagagctgagg

SEQ ID NO: 107253 - DNA, 936 bp, Artificial Sequence
  derived and/or modified sequence
atgtggcccctgacagccctgctgctgctggccaccctggagaagcccatcctgagcctgcaccccccctggaccaccatcttcaagggggagcgggtgaccctgaagtgtgatggctaccaccccctgctgctggagctgcagcccatcagcaccctgtggtacctgggccacctgctgctgcccagccacaagaagagcattgaggtgcagaccccaggagtgtaccgctgccagaccaggggggcccctgtgtctgaccccatccacctgtctgtgtccaatgactggctgatcctgcaggtgccctatgcccctgtgtttgaaggagagcccctggtgctgcgctgccggggctggtatgacaaggtggtgtacaagctgcactactaccatgatggccaggccgtgcgctacttccacagcagcgccaactacacagtgctgcaggcccgggccagtgacagcggccgctaccagtgcagcggcaccatgagaattcctgtggagagcgcccccatgttcagcgccaaggtggccgtgacagtgcaggccgcccgctgtgccgccagcactggagcccccagcacccagagccgcagccccaggagccgcagcagcaacagaactggagcccggcggctgcccccacctgctgtgtctggaaatgctgtgcggggctgcagcagccggggccgggtgctgccctggacccggcccccacctccaccccagctgcacggcccccagccctggctgctggtgattggccgcttccccagcgagagcccccgctgcccagacaggagccgctggagcccccccagcggcaccccacctcctcctggctgcagcagcagaagagctgccccccggctgcggggccaccccccagccctgcggcggcggccctggaacaaccggctggagccctag

SEQ ID NO: 107254 - DNA, 936 bp, Artificial Sequence
  derived and/or modified sequence
atgtggcccctgaccgccctgctgctgctggccaccctggagaagcctattctatctcttcatcctccctggactacgatcttcaaaggcgaacgggtgaccctcaagtgcgacggatatcaccccctgttgttagagctgcagcccatttccaccctgtggtatttgggacatcttctgctgccaagtcacaagaagagcattgaggtacagactcccggtgtgtaccggtgtcagactcgtggggcgcccgtgtcagacccaatccacctcagtgtgtccaacgattggctaatcctgcaggtgccgtacgctccagtttttgagggtgagccactggtcctgagatgtagggggtggtatgacaaagtcgtatacaagttgcattactatcatgatgggcaggccgtgagatactttcactcttcagcaaattacacagtcctgcaggcccgcgcttcagactctgggcgctaccagtgttcaggcacaatgcgcattcctgtggaatctgctcctatgttcagtgctaaggtggccgtgactgtccaggccgcccggtgtgcggccagcacgggcgctccctctacacagagccggtccccccgaagtagaagttcgaacaggactggcgcccgcagactgcctcctccggcagtgagcggtaatgcggtccgggggtgctcctctaggggccgagtgctcccctggacacgtcccccacctcccccacagcttcacggcccccaaccctggctgttggtgataggacgttttcctagcgagtcaccccgttgccccgaccgcagcagatggtctcccccctctggaactcctccacccccaggttgttcatcccggcgggcagcgccacggctgcgcgggcatcctcctgcactgcgcagacggccctggaacaataggctggagccctag

SEQ ID NO: 107255 - DNA, 936 bp, Artificial Sequence
  derived and/or modified sequence
atgtggcctctgaccgctcttctcttactggctaccctggagaagccgatactgtcacttcatccgccttggactactatctttaagggcgagagagttaccttgaagtgtgacggataccatcctctgctattggaattgcagccaatttccactttatggtaccttggccacctgcttcttccttctcacaaaaaatccatagaggtacagactcccggagtctaccgctgccagacaagaggcgcaccagtgagtgacccaatacacctgagtgtatctaacgactggttaattctgcaggttccctatgccccagtgttcgagggcgaaccactggttctgcggtgtagggggtggtatgacaaagtggtttacaagttacattattaccatgacggccaagccgtgagatattttcattcttctgctaactacaccgtgttacaggccagggccagcgactccggtcgataccagtgcagtggaactatgaggattccagtcgagtctgccccaatgttctcagccaaggtggccgtcaccgttcaggcagcaagatgcgccgcatcaaccggggctcctagtacacagtctcgaagtcccaggagccggtccagtaacaggacgggggctcgcagactgccccctcctgccgtgagcggaaacgccgtcaggggctgcagtagccgtggccgtgttttaccttggacaaggccgcctccacctccgcagcttcacggtccccagccctggttactggtgatcgggcgattcccgtctgagagccccaggtgtcctgataggtctcggtggagccctccttctggaactccacctcctccgggttgtagctctagacgggcagcccctcgccttaggggtcatccccctgcacttagaagaaggccgtggaacaaccgcttagagccctag

SEQ ID NO: 107256 - protein, 275 aa, Artificial Sequence
  derived and/or modified sequence
MWPLTALLLLVPSSGQAATLEKPILSLHPPWTTIFKGERVTLKCDGYHPLLLELQPISTLWYLGHLLLPSHKKSIEVQTPGVYRCQTRGAPVSDPIHLSVSNDWLILQVPYAPVFEGEPLVLRCRGWYDKVVYKLHYYHDGQAVRYFHSSANYTVLQARASDSGRYQCSGTMRIPVESAPMFSAKVAVTVQEARHAAAVRVLQVQPRGAPLRLGRRVHSPGARGRGARIVLVRGGYRHPQCPETQSVAAAPGAGFSPGPGLHHRPSSMGRSLGSW

SEQ ID NO: 107257 - DNA, 828 bp, Artificial Sequence
  derived and/or modified sequence
atgtggcccctgaccgccctgctgctgctggtgcccagcagcggccaggccgccaccctggagaagcccatcctgagcctgcaccccccctggaccaccatcttcaagggcgagagagtgaccctgaagtgcgacggctaccaccccctgctgctggagctgcagcccatcagcaccctgtggtacctgggccacctgctgctgcccagccacaagaagagcatcgaggtgcagacccccggcgtgtacagatgccagaccagaggcgcccccgtgagcgaccccatccacctgagcgtgagcaacgactggctgatcctgcaggtgccctacgcccccgtgttcgagggcgagcccctggtgctgagatgcagaggctggtacgacaaggtggtgtacaagctgcactactaccacgacggccaggccgtgagatacttccacagcagcgccaactacaccgtgctgcaggccagagccagcgacagcggcagataccagtgcagcggcaccatgagaatccccgtggagagcgcccccatgttcagcgccaaggtggccgtgaccgtgcaggaggccagacacgccgccgccgtgagagtgctgcaggtgcagcccagaggcgcccccctgagactgggcagaagagtgcacagccccggcgccagaggcagaggcgccagaatcgtgctggtgagaggcggctacagacacccccagtgccccgagacccagagcgtggccgccgcccccggcgccggcttcagccccggccccggcctgcaccacagacccagcagcatgggcagaagcctgggcagctggtag

SEQ ID NO: 107258 - DNA, 1193 bp, Artificial Sequence
  derived and/or modified sequence
cagtcagatccatcatgtggccactgacagcccttctgctcctggttccaagcagtgggcaagctgctactctggagaagcccatattgtctctacatccaccttggaccaccatcttcaaaggggagcgggtaactttgaagtgtgatggataccacccactgctcctggagctccagcccatcagcactctctggtatttgggccacctacttctgccctctcacaagaagagcattgaggtgcagacaccaggggtgtatcgatgccagacacggggagcacccgtcagtgaccccatccacctctctgtatccaatgattggctgattctgcaagtgccctatgcgccagtgttcgagggtgagccgctagtcctgcgctgccgcggctggtacgacaaggtggtctacaagcttcactactaccacgacggccaggccgtgcgctacttccactccagcgccaactacactgtgttacaggcgcgtgccagcgacagcgggcgctaccagtgctcgggcaccatgcgcatcccggtggagagcgcgcccatgttctccgctaaggtggctgtgacagtgcaagaagcgcgacacgccgctgcagttcgcgttttacaagtacagccgcgcggtgcgccgcttcgactggggcgccgagtacacagtcccggagcccgaggtcgaggagctcgaatcgtactggtgcgaggcggctaccgccacccgcagtgtccggaaacgcagtccgtggctgcagctcccggggccgggttctcccctggacccggcctccaccaccgccccagctccatgggccgcagccttggctcctggtaataggccgctttccttcagaaagcccccggtgtccagatcggtcccgttggtcacctccgtccggaacaccacctccaccgggctgcagttcccggcgagcggcgccccgactgcggggccacccgcctgcgctccgccgacgcccttggaacaatcggctggagccctgaaacccgacgtggaccttctgctccgagaaatgcagctgctcaaaggccttctgagccgggtggtcctggaattaaaggagccacaggccctccgggagctcaggggaacgcccgagacccccacctctcactttgctgtgagcccgggaaccccagagaccactcctgtggagagctgagg

SEQ ID NO: 107259 - DNA, 828 bp, Artificial Sequence
  derived and/or modified sequence
atgtggccattaaccgctctcctgttgctggtacctagctccggacaggcagccacactggagaagccaatactgagcctccaccccccttggactactatctttaaaggtgagagggtgaccttgaaatgcgatggctatcatccgctgcttttagagcttcagcctatcagcacactttggtatttaggccacctgctcctgccaagccataaaaagtcgatcgaggttcagactccaggagtttaccgctgtcagacccgcggagcgcccgtgtctgatcctatccaccttagcgtgtccaatgattggcttatcctacaagtgccctacgccccagtcttcgaaggagaaccactggttctacggtgccggggatggtatgataaagtcgtttacaagctgcactattatcacgatggacaggcagttaggtattttcactcatccgcaaattacacagtactccaggctagagcctccgattcagggaggtaccagtgttctggcacaatgcgcattcctgtagaatccgcgcctatgtttagcgcgaaggttgcagtaacagttcaggaggccagacacgcagccgccgtgcgagtccttcaagtccaacctagaggggcacctctccggctggggcggcgcgttcacagccccggtgcaagaggtcgtggggctcgtatcgtactggtgcgcggcggctaccggcacccgcagtgccccgagacgcaatccgtggccgccgcccccggcgccggattttctcctggaccagggcttcaccaccggccttcatcaatgggaaggtccttgggaagttggtag

SEQ ID NO: 107260 - DNA, 828 bp, Artificial Sequence
  derived and/or modified sequence
atgtggcccctgacagccctgctgctgctggtgcccagcagcggccaggccgccaccctggagaagcccatcctgagcctgcaccccccctggaccaccatcttcaagggggagcgggtgaccctgaagtgtgatggctaccaccccctgctgctggagctgcagcccatcagcaccctgtggtacctgggccacctgctgctgcccagccacaagaagagcattgaggtgcagaccccaggagtgtaccgctgccagaccaggggggcccctgtgtctgaccccatccacctgtctgtgtccaatgactggctgatcctgcaggtgccctatgcccctgtgtttgaaggagagcccctggtgctgcgctgccggggctggtatgacaaggtggtgtacaagctgcactactaccatgatggccaggccgtgcgctacttccacagcagcgccaactacacagtgctgcaggcccgggccagtgacagcggccgctaccagtgcagcggcaccatgagaattcctgtggagagcgcccccatgttttctgccaaggtggccgtgacagtgcaggaggcccggcatgctgctgctgtgcgggtgctgcaggtgcagcccaggggggcccccctgcggctgggcagaagagtgcacagccctggggcccggggccgcggggccagaattgtgctggtgcggggcggctaccgccacccccagtgcccagagacccagagcgtggccgccgcccctggagctggcttcagccctggccctggcctgcaccaccggcccagctccatgggccgcagcctgggctcctggtag

SEQ ID NO: 107261 - DNA, 828 bp, Artificial Sequence
  derived and/or modified sequence
atgtggcccctgaccgccctgctgctgctggtgcccagcagcggccaggcggccactctggagaaacctatcctgtccctgcatccaccctggacaactatttttaaaggcgagagggtcacccttaaatgcgatggatatcatcctctgttgctcgaactccagcccatttctaccctgtggtacttgggccatctgcttctcccttcccacaaaaagtcaattgaagtgcagactcctggcgtgtacagatgccagactagaggcgcccctgtgtctgatcctatacaccttagcgtgtcgaatgattggctcattctgcaagtaccatacgcacctgttttcgagggggagcctttggtcctgcgctgccgcggctggtacgacaaggtggtgtacaaacttcactattaccacgacgggcaggcggtccggtacttccactcttctgccaactatacggtcttgcaggcccgagcttctgactccggacgctaccaatgcagcggcaccatgcgaatacccgtggagagtgcccctatgttctctgcgaaagtagctgtgacagtgcaggaggcacggcatgccgctgctgtccgggtgcttcaggtccagccacgaggagctcccctgcgactgggacggcgcgtacatagcccaggcgcaaggggacgcggagcccggatagttctggtaagggggggctaccgacaccctcaatgccctgagacacagtccgtcgctgctgcgcccggggctggattcagccctggtccaggtttgcatcaccgtccatcgtctatgggcagaagcctggggtcatggtag

SEQ ID NO: 107262 - DNA, 828 bp, Artificial Sequence
  derived and/or modified sequence
atgtggcctctgaccgcactactgcttctagtgcctagtagcggccaggctgccaccctggagaagccaattctaagtctgcaccctccttggaccaccatcttcaagggagagagagttacattgaaatgtgatggatatcacccactcctgcttgaactacagcctataagcactctttggtaccttggccacttactattgccatcccataagaaatcgatcgaggttcagacccctggagtttatcggtgccagactagaggggctccagtgtcagatcctatccacctttccgtgtcaaatgactggttgattctccaggtgccgtatgcgcctgtgttcgaaggagaaccattggtccttcgctgtaggggctggtacgataaggtcgtgtataaattgcactactaccatgacggccaggcagtgcgctattttcatagttctgctaattacacagtgctgcaggccagagcctctgatagcggcaggtaccagtgctcggggaccatgagaatcccagtggaatccgctccgatgttcagtgcaaaggtagccgtcaccgtgcaagaggcccgtcatgccgcagccgttagagtgttgcaggtgcagccccgaggcgctccgctccggctcggtcgacgggtgcatagtccaggagctagggggaggggcgcaagaatcgtgctcgttcgtggcggttataggcatcctcagtgtcctgaaacccaaagcgtggccgctgccccaggcgcaggtttctcccccggaccgggactccaccatcgtccctccagcatgggtcgtagtctcggcagttggtag

SEQ ID NO: 107263 - protein, 268 aa, Artificial Sequence
  derived and/or modified sequence
MWPLTALLLLATLEKPILSLHPPWTTIFKGERVTLKCDGYHPLLLELQPISTLWYLGHLLLPSHKKSIEVQTPGVYRCQTRGAPVSDPIHLSVSNDWLILQVPYAPVFEGEPLVLRCRGWYDKVVYKLHYYHDGQAVRYFHSSANYTVLQARASDSGRYQCSGTMRIPVESAPMFSAKVAVTVQEARHAAAVRVLQVQPRGAPLRLGRRVHSPGARGRGARIVLVRGGYRHPQCPETQSVAAAPGAGFSPGPGLHHRPSSMGRSLGSW

SEQ ID NO: 107264 - DNA, 807 bp, Artificial Sequence
  derived and/or modified sequence
atgtggcccctgaccgccctgctgctgctggccaccctggagaagcccatcctgagcctgcaccccccctggaccaccatcttcaagggcgagagagtgaccctgaagtgcgacggctaccaccccctgctgctggagctgcagcccatcagcaccctgtggtacctgggccacctgctgctgcccagccacaagaagagcatcgaggtgcagacccccggcgtgtacagatgccagaccagaggcgcccccgtgagcgaccccatccacctgagcgtgagcaacgactggctgatcctgcaggtgccctacgcccccgtgttcgagggcgagcccctggtgctgagatgcagaggctggtacgacaaggtggtgtacaagctgcactactaccacgacggccaggccgtgagatacttccacagcagcgccaactacaccgtgctgcaggccagagccagcgacagcggcagataccagtgcagcggcaccatgagaatccccgtggagagcgcccccatgttcagcgccaaggtggccgtgaccgtgcaggaggccagacacgccgccgccgtgagagtgctgcaggtgcagcccagaggcgcccccctgagactgggcagaagagtgcacagccccggcgccagaggcagaggcgccagaatcgtgctggtgagaggcggctacagacacccccagtgccccgagacccagagcgtggccgccgcccccggcgccggcttcagccccggccccggcctgcaccacagacccagcagcatgggcagaagcctgggcagctggtag

SEQ ID NO: 107265 - DNA, 807 bp, Artificial Sequence
  derived and/or modified sequence
atgtggccactgacggctctcctgctcctagccactctggagaaaccaatcttgtccctgcatcctccatggaccaccatatttaagggggagcgagtgactctgaagtgtgacggataccatcccctccttctcgaactgcaacccataagtaccctgtggtacctgggtcacctcttattgcctagtcacaagaagtctattgaggtacagacgcccggcgtgtatagatgtcaaactagaggcgcaccagtgagtgaccctattcatctctcggtttcaaatgactggctgattctgcaagtcccatacgcgccagtttttgaaggggaacctctggtcctgcggtgccgaggctggtacgacaaggtggtgtataagctgcactactaccacgacggacaggctgttagatacttccacagctctgccaactacactgtgctgcaagccagagcttcggactctggtcggtaccagtgttccgggacgatgcggatcccagtcgagagcgctcctatgttcagcgcaaaggtagccgtgacagttcaagaggcgcgccacgcagccgccgtaagagtcctccaagttcagcccagaggggctcctctcaggttaggtcgtcgcgtccattcacccggagcgcgcggcaggggcgccaggatagtgttggtgcgggggggttacaggcacccacagtgcccggaaactcagtctgtggccgcggctccaggcgctggttttagccccggccccggcctgcaccaccgaccaagctctatgggcagatccctggggtcttggtag

SEQ ID NO: 107266 - DNA, 1172 bp, Artificial Sequence
  derived and/or modified sequence
cagtcagatccatcatgtggccactgacagcccttctgctcctggctactctggagaagcccatattgtctctacatccaccttggaccaccatcttcaaaggggagcgggtaactttgaagtgtgatggataccacccactgctcctggagctccagcccatcagcactctctggtatttgggccacctacttctgccctctcacaagaagagcattgaggtgcagacaccaggggtgtatcgatgccagacacggggagcacccgtcagtgaccccatccacctctctgtatccaatgattggctgattctgcaagtgccctatgcgccagtgttcgagggtgagccgctagtcctgcgctgccgcggctggtacgacaaggtggtctacaagcttcactactaccacgacggccaggccgtgcgctacttccactccagcgccaactacactgtgttacaggcgcgtgccagcgacagcgggcgctaccagtgctcgggcaccatgcgcatcccggtggagagcgcgcccatgttctccgctaaggtggctgtgacagtgcaagaagcgcgacacgccgctgcagttcgcgttttacaagtacagccgcgcggtgcgccgcttcgactggggcgccgagtacacagtcccggagcccgaggtcgaggagctcgaatcgtactggtgcgaggcggctaccgccacccgcagtgtccggaaacgcagtccgtggctgcagctcccggggccgggttctcccctggacccggcctccaccaccgccccagctccatgggccgcagccttggctcctggtaataggccgctttccttcagaaagcccccggtgtccagatcggtcccgttggtcacctccgtccggaacaccacctccaccgggctgcagttcccggcgagcggcgccccgactgcggggccacccgcctgcgctccgccgacgcccttggaacaatcggctggagccctgaaacccgacgtggaccttctgctccgagaaatgcagctgctcaaaggccttctgagccgggtggtcctggaattaaaggagccacaggccctccgggagctcaggggaacgcccgagacccccacctctcactttgctgtgagcccgggaaccccagagaccactcctgtggagagctgagg

SEQ ID NO: 107267 - DNA, 807 bp, Artificial Sequence
  derived and/or modified sequence
atgtggcccctgacagccctgctgctgctggccaccctggagaagcccatcctgagcctgcaccccccctggaccaccatcttcaagggggagcgggtgaccctgaagtgtgatggctaccaccccctgctgctggagctgcagcccatcagcaccctgtggtacctgggccacctgctgctgcccagccacaagaagagcattgaggtgcagaccccaggagtgtaccgctgccagaccaggggggcccctgtgtctgaccccatccacctgtctgtgtccaatgactggctgatcctgcaggtgccctatgcccctgtgtttgaaggagagcccctggtgctgcgctgccggggctggtatgacaaggtggtgtacaagctgcactactaccatgatggccaggccgtgcgctacttccacagcagcgccaactacacagtgctgcaggcccgggccagtgacagcggccgctaccagtgcagcggcaccatgagaattcctgtggagagcgcccccatgttcagcgccaaggtggccgtgacagtgcaggaggcccggcatgctgctgctgtgcgggtgctgcaggtgcagcccaggggggcccccctgcggctgggccggcgggtgcacagccctggggcccggggccgcggggcccgcatcgtgctggtgcggggcggctaccgccacccccagtgcccagagacccagagcgtggccgccgcccctggggccggcttcagccctggccctggcctgcaccaccggcccagctccatgggccgcagcctgggctcctggtag

SEQ ID NO: 107268 - DNA, 807 bp, Artificial Sequence
  derived and/or modified sequence
atgtggcccctgaccgccctgctgctgctggccaccctggagaagcctatcctgtctctgcatcccccgtggaccaccatcttcaagggggagcgtgtcaccttgaagtgcgatggataccaccctctgctgctggagttgcagcccatctcaacactgtggtatttgggccatctactgctaccttcgcacaagaagtctattgaagtgcagacacccggcgtgtatagatgccagacaaggggggccccagtgtcagacccaatccatcttagtgtgtctaatgactggctgatcttgcaggtaccttacgctccagtgtttgagggagagccactggtcctgagatgcagggggtggtacgacaaggttgtgtataagcttcactattatcatgacggccaggccgtgagatatttccatagctctgccaattatacggtactgcaggctcgggccagtgactcaggaagataccagtgttccggaacaatgcggatcccagtcgaaagtgcaccaatgttttccgctaaagtggccgtgacagtgcaggaggccagacacgcggcagccgtaagagtgctgcaggtgcagcctagaggagcacccctgcgcctgggacggagagtacattcaccaggtgcccgaggccgcggcgctagaatcgtgctagtacggggaggataccggcaccctcagtgccctgagacacaatccgtcgcagctgccccaggggcagggttctctcccggacctggccttcaccaccggccttcctccatgggcagatccttaggctcatggtag

SEQ ID NO: 107269 - DNA, 807 bp, Artificial Sequence
  derived and/or modified sequence
atgtggcccctgactgccttgctcttgctggctaccctggaaaagccaatcctaagccttcatcccccatggaccactatcttcaagggcgagcgcgtcaccctgaagtgtgatggataccacccattgctgctcgaactccagcccatcagtaccctttggtacctggggcatttgctcctgcccagccacaagaaatccattgaagtgcagacacccggtgtttaccgctgtcaaaccaggggagcgcctgtgtccgacccgatacatctgtccgtgagcaacgattggctcattctgcaggtcccgtacgccccagtgttcgagggtgagcccttggtgcttcggtgtcggggttggtatgataaggtcgtctacaagctgcattactaccacgacggccaggcagtgcggtacttccactcatcggccaactatactgttctgcaggccagggcgagtgacagcggtaggtaccagtgttccggcacaatgcggattcccgtggaatccgcaccgatgtttagcgccaaagtggccgtcaccgttcaggaggccaggcacgctgcagcagtccgcgttctgcaggtccaaccccgaggtgcacctctgaggctgggacgtagggtgcatagtcccggtgcgagaggacgcggagccaggattgtgctggtgcggggtggctacaggcacccgcagtgtcctgaaacgcaaagtgtggctgctgctcccggagcaggtttctcccccggacccggtttacatcaccggccatcctccatggggcgatctctagggtcctggtag

SEQ ID NO: 107270 - DNA, 1515 bp, Artificial Sequence
  derived and/or modified sequence
atggccaccagagacgtggtgctgagcagagtgcccgagcaggaggaggacagaaccgtgagcctgcagaacgccgccgccatctacgacctgctgagcatcaccctgggcagaagaggccagtacgtgatgctgagcgagtgcctggagagagccatgaagttcgccttcggcgagttccacctgtggtaccaggtggccctgagcatggtggcctgcggcaagagcgcctacgccgtgagcctgctgagagagtgcgtgaagctgagacccagcgaccccaccgtgcccctgatggccgccaaggtgtgcatcggcagcctgagatggctggaggaggccgagcacttcgccatgatggtgatcagcctgggcgaggaggccggcgagttcctgcccaagggctacctggccctgggcctgacctacagcctgcaggccaccgacgccaccctgaagagcaagcaggacgagctgcacagaaaggccctgcagaccctggagagagcccagcagctggcccccagcgacccccaggtgatcctgtacgtgagcctgcagctggccctggtgagacagatcagcagcgccatggagcagctgcaggaggccctgaaggtgagaaaggacgacgcccacgccctgcacctgctggccctgctgttcagcgcccagaagcaccaccagcacgccctggacgtggtgaacatggccatcaccgagcaccccgagaacttcaacctgatgttcaccaaggtgaagctggagcaggtgctgaagggccccgaggaggccctggtgacctgcagacaggtgctgagactgtggcagaccctgtacagcttcagccagctgggcggcctggagaaggacggcagcttcggcgagggcctgaccatgaagaagcagagcggcatgcacctgaccctgcccgacgcccacgacgccgacagcggcagcagaagagccagcagcatcgccgccagcagactggaggaggccatgagcgagctgaccatgcccagcagcgtgctgaagcagggccccatgcagctgtggaccaccctggagcagatctggctgcaggccgccgagctgttcatggagcagcagcacctgaaggaggccggcttctgcatccaggaggccgccggcctgttccccaccagccacagcgtgctgtacatgagaggcagactggccgaggtgaagggcaacctggaggaggccaagcagctgtacaaggaggccctgaccgtgaaccccgacggcgtgagaatcatgcacagcctgggcctgatgctgagcagactgggccacaagagcctggcccagaaggtgctgagagacgccgtggagagacagagcacctgccacgaggcctggcagggcctgggcgaggtgctgcaggcccagggccagaacgaggccgccgtggactgcttcctgaccgccctggagctggaggccagcagccccgtgctgcccttcagcatcatccccagagagctgtag

SEQ ID NO: 107271 - DNA, 2058 bp, Artificial Sequence
  derived and/or modified sequence
aagaagaagatcaacttcttcaagaagccccacagcctgagcctgagaaagaagagagaggaggaggtgatcacctgcttcgagagagccagctggatcgcccaggtgttcctgcaggagctggagaagaccaccaacaacagcaccagcagacacctgaagggctgccaccccctggactacgagctgacctacttcctggaggccgccctgcagagcgcctacgtgaagaacctgaagaagggcaacatcgtgaagggcatgagagagctgagagaggtgctgagaaccgtggagaccaaggccacccagaacttcaaggtgatggccgccaagcacctggccggcgtgctgctgcacagcctgagcgaggagtgctactggagccccctgagccaccccctgcccgagttcatgggcaaggaggagagcagcttcgccacccaggccctgagaaagccccacctgtacgagggcgacaacctgtactgccccaaggacaacatcgaggaggccctgctgctgctgctgatcagcgagagcatggccaccagagacgtggtgctgagcagagtgcccgagcaggaggaggacagaaccgtgagcctgcagaacgccgccgccatctacgacctgctgagcatcaccctgggcagaagaggccagtacgtgatgctgagcgagtgcctggagagagccatgaagttcgccttcggcgagttccacctgtggtaccaggtggccctgagcatggtggcctgcggcaagagcgcctacgccgtgagcctgctgagagagtgcgtgaagctgagacccagcgaccccaccgtgcccctgatggccgccaaggtgtgcatcggcagcctgagatggctggaggaggccgagcacttcgccatgatggtgatcagcctgggcgaggaggccggcgagttcctgcccaagggctacctggccctgggcctgacctacagcctgcaggccaccgacgccaccctgaagagcaagcaggacgagctgcacagaaaggccctgcagaccctggagagagcccagcagctggcccccagcgacccccaggtgatcctgtacgtgagcctgcagctggccctggtgagacagatcagcagcgccatggagcagctgcaggaggccctgaaggtgagaaaggacgacgcccacgccctgcacctgctggccctgctgttcagcgcccagaagcaccaccagcacgccctggacgtggtgaacatggccatcaccgagcaccccgagaacttcaacctgatgttcaccaaggtgaagctggagcaggtgctgaagggccccgaggaggccctggtgacctgcagacaggtgctgagactgtggcagaccctgtacagcttcagccagctgggcggcctggagaaggacggcagcttcggcgagggcctgaccatgaagaagcagagcggcatgcacctgaccctgcccgacgcccacgacgccgacagcggcagcagaagagccagcagcatcgccgccagcagactggaggaggccatgagcgagctgaccatgcccagcagcgtgctgaagcagggccccatgcagctgtggaccaccctggagcagatctggctgcaggccgccgagctgttcatggagcagcagcacctgaaggaggccggcttctgcatccaggaggccgccggcctgttccccaccagccacagcgtgctgtacatgagaggcagactggccgaggtgaagggcaacctggaggaggccaagcagctgtacaaggaggccctgaccgtgaaccccgacggcgtgagaatcatgcacagcctgggcctgatgctgagcagactgggccacaagagcctggcccagaaggtgctgagagacgccgtggagagacagagcacctgccacgaggcctggcagggcctgggcgaggtgctgcaggcccagggccagaacgaggccgccgtggactgcttcctgaccgccctggagctggaggccagcagccccgtgctgcccttcagcatcatccccagagagctgtag

SEQ ID NO: 107272 - DNA, 1515 bp, Artificial Sequence
  derived and/or modified sequence
atggccacacgggacgttgtactgtctcgggtgcctgaacaggaagaggatcggacagtgtcgcttcaaaacgcagctgctatttacgacctgctttcaatcacactagggagaagaggccagtacgtcatgctgagcgaatgtcttgaacgtgctatgaagttcgcctttggcgagttccatctctggtatcaagtcgcattaagcatggtggcttgtggcaaatctgcctatgccgtttcgttgctcagagagtgcgtgaagctgcggccgagcgatcccaccgttccactgatggccgccaaggtgtgcattggcagcttaagatggctcgaggaagccgagcattttgcgatgatggtgataagcctgggagaggaagccggggagttcctccccaaagggtatttggcactgggactgacctattccctccaggccacagacgctacactgaagagtaagcaggacgagctccacaggaaggctctccaaacgttagagcgcgcccagcagcttgcaccatccgacccccaggtcatcctgtatgtgtctctacagctggccctcgtgcgccagataagctccgctatggagcagctccaagaggccttaaaagtgcgcaaggacgatgcccacgcactgcaccttttagccctgctgttctcagcacagaaacatcaccagcacgcccttgatgtagtgaatatggcaataaccgagcatcccgagaacttcaacctcatgttcaccaaggtcaaactggaacaagtcctcaagggccccgaagaagctttggtcacctgccgtcaggttctgcggctttggcaaacactgtatagcttctcccagcttggaggcctggaaaaggacgggagcttcggtgaaggcctcactatgaaaaagcagtctggtatgcatctcaccctccccgacgcccacgatgccgactccgggagcaggcgtgcatcaagcatagctgcctcgcgcctggaggaagccatgtccgagctgactatgccaagtagcgtgctcaagcaggggcccatgcagttgtggaccacactggaacagatctggctccaggcggctgagcttttcatggaacagcagcacctgaaggaggccgggttctgcatacaggaggcagccgggctgttccccacctctcatagcgtactgtacatgagaggtcgtctggccgaggtcaaaggcaacctcgaagaggctaaacagctctataaagaggcattaactgttaaccccgacggcgtacgcatcatgcacagtttgggcttgatgttgtccagattaggccataagtcactggcgcagaaagtgctcagagacgctgttgaaagacagagcacttgccatgaggcctggcagggcctgggggaagtccttcaggcacagggacagaacgaggctgccgtcgattgtttcctcaccgccttggagttagaagccagctcccctgttctgcccttttctataattccccgtgaattgtag

SEQ ID NO: 107273 - DNA, 2058 bp, Artificial Sequence
  derived and/or modified sequence
aaaaagaaaattaacttttttaagaaacctcacagcctgagcttaagaaagaaaagggaggaggaggttattacttgtttcgagcgagcttcgtggatcgcccaagtgttcctccaagaactcgaaaagaccactaacaattcaacctctcggcatttgaaggggtgccaccctttggattacgaactgacttattttctagaagctgcactgcagagcgcttacgtgaagaacttaaagaagggaaacatcgtgaaggggatgagagagttgcgcgaagtccttcggacggtggagaccaaggccacacagaactttaaggtgatggccgcaaaacacctggccggtgtcctactgcactccctctctgaagagtgttattggtcaccattgagccatcctttgccagaattcatggggaaggaagagtccagcttcgctacccaggctctgcgcaagcctcatctctatgagggagataatctgtactgtcctaaagacaacattgaagaggccctgctcctcctcctcatcagcgaatctatggctacccgtgacgtggtcttaagtcgcgtgccggaacaggaggaagaccgtactgtgagcctgcagaacgctgctgccatctacgacctccttagcattacgcttgggcggcgaggacaatacgtgatgctcagcgagtgcctggagagggcaatgaagttcgcgttcggcgaattccatctttggtaccaagttgccctcagtatggtagcctgtggtaaatcagcctacgctgtaagcctgttaagggaatgtgtcaagctaagaccctcagatccaaccgtcccccttatggcagccaaggtgtgcatcgggtcactaaggtggctcgaggaggccgagcacttcgccatgatggtgatcagtttaggagaggaggccggagaattccttcccaaaggatatctggcactggggctgacgtattctctacaggctacagatgccacactcaaatctaaacaagacgagttacatcgcaaagcattgcagactttagaacgggcccagcagctggcgcccagcgacccccaggtcatcttgtatgtctctctccaattggcattggttcgccagatttcctccgccatggaacagttacaggaagccctgaaagtgaggaaagacgatgcccacgctctccatctcctcgcactgttgttttctgcccaaaaacatcaccagcatgccctggacgtggtcaacatggccattacggagcatcccgagaattttaacctcatgttcacaaaggtaaaattggagcaagtcctgaagggacctgaggaggcactggttacttgtaggcaggtgctgagactttggcagactctgtattccttttcacagctgggcggattggagaaagatggtagctttggcgaggggctcacaatgaagaagcagagcggtatgcacctcacactgccagacgcacatgatgcagactctggaagcagaagggcctccagtatagcagcatcacgactcgaagaggcaatgtctgagctgactatgccatcctcagttctgaaacaggggccgatgcagctctggacgactttggagcagatttggttacaggcagcagaactattcatggagcaacaacacctcaaggaggcaggtttttgcattcaggaggcagcagggctgttccctacctcacacagtgtactgtacatgagaggccggttggccgaagtgaaggggaatctggaggaggcgaagcagctgtacaaagaagcactgacagtgaatcccgacggagtgagaatcatgcatagcctggggctgatgctgtctagactgggacataagagtctggctcagaaggtcttaagagacgccgttgaacgccagtctacatgccacgaggcatggcagggcctgggggaagtgctgcaagctcagggacaaaacgaagccgctgtggattgctttctcacagcactagaactagaggcatcatcacccgtcctccccttcagcataatcccccgggaactatag

SEQ ID NO: 107274 - DNA, 1515 bp, Artificial Sequence
  derived and/or modified sequence
atggccaccagagatgtggtgctgagccgggtgcctgagcaggaggaggacagaacagtgtccctgcagaatgctgctgccatctatgacctgctgagcatcaccctgggccggcggggccagtatgtgatgctgtctgaatgtctggagcgggccatgaagtttgcctttggagagttccacctgtggtaccaggtggccctgtccatggtggcctgtgggaagagcgcctatgctgtgtccctgctgagagaatgtgtgaagctgcggcccagcgaccccaccgtgcccctgatggccgccaaggtgtgcatcggcagcctgcgctggctggaggaggccgagcactttgccatgatggtgatcagcctgggggaggaggccggggagttcctgcccaagggctacctggccctgggcctgacctacagcctgcaggccacagatgccaccctgaagagcaagcaggatgagctgcacaggaaggccctgcagaccctggagcgggcccagcagctggcccccagcgacccccaggtgatcctgtatgtgtccctgcagctggccctggtgcggcagatcagcagcgccatggagcagctgcaggaggccctgaaggtgaggaaggatgatgcccacgccctgcacctgctggccctgctcttcagcgcccagaagcaccaccagcacgccctggatgtggtgaacatggccatcacagagcaccctgagaacttcaacctgatgttcaccaaggtgaagctggagcaggtgctgaagggccctgaggaggccctggtgacctgccggcaggtgctgcggctgtggcagaccctgtacagcttcagccagctgggcggcctggagaaggatggcagctttggagagggcctgaccatgaagaagcagagcggcatgcacctgaccctgcctgatgcccatgatgctgacagcggcagcagaagagccagcagcattgctgccagccggctggaggaggccatgtctgagctgaccatgcccagctctgtgctgaagcagggccccatgcagctgtggaccaccctggagcagatctggctgcaggccgctgagctgttcatggagcagcagcacctgaaggaggccggcttctgcatccaggaggccgccggcctcttccccaccagccacagcgtgctgtacatgaggggccgcctggccgaggtgaagggcaacctggaggaggccaagcagctgtacaaggaggccctgactgtgaacccagatggagtgcgcatcatgcacagcctgggcctgatgctgagccggctgggccacaagagcctggcccagaaggtgctgagagatgctgtggagcggcagagcacctgccacgaggcctggcagggcctgggggaggtgctgcaggcccagggccagaatgaagctgctgtggactgcttcctgacagccctggagctggaggccagcagccctgtgctgcccttcagcatcatcccccgggagctgtag

SEQ ID NO: 107275 - DNA, 2058 bp, Artificial Sequence
  derived and/or modified sequence
aagaagaagatcaacttcttcaagaagccccacagcctgagcctgaggaagaagcgggaggaggaggtgatcacctgctttgagcgggcctcctggatcgcccaggtgttcctgcaggagctggagaagaccaccaacaacagcaccagccgccacctgaagggctgccaccccctggactatgagctgacctacttcctggaggccgccctgcagagcgcctacgtgaagaacctgaagaagggcaacatcgtgaagggcatgagggagctgcgggaggtgctgaggacagtggagaccaaggccacccagaacttcaaggtgatggccgccaagcacctggccggcgtgctgctgcacagcctgtctgaggagtgctactggagccccctgagccaccccctgcctgagttcatgggcaaggaggagagcagctttgccacccaggccctgaggaagccccacctgtatgaaggagacaacctgtactgccccaaggacaacatcgaggaggccctgctgctgctgctgatcagcgagagcatggccaccagagatgtggtgctgagccgggtgcctgagcaggaggaggacagaacagtgtccctgcagaatgctgctgccatctatgacctgctgagcatcaccctgggcagaagaggccagtatgtgatgctgtctgagtgcctggagcgggccatgaagtttgccttcggggagttccacctgtggtaccaggtggccctgtccatggtggcctgtgggaagagcgcctatgctgtgtccctgctgcgggagtgtgtgaagctgcggcccagcgaccccaccgtgcccctgatggccgccaaggtgtgcatcggcagcctgcgctggctggaggaggccgagcactttgccatgatggtgatcagcctgggggaggaggccggggagttcctgcccaagggctacctggccctgggcctgacctacagcctgcaggccacagatgccaccctgaagagcaagcaggatgagctgcacaggaaggccctgcagaccctggagcgggcccagcagctggcccccagcgacccccaggtgatcctgtatgtgtccctgcagctggccctggtgcggcagatcagcagcgccatggagcagctgcaggaggccctgaaggtgaggaaggatgatgcccacgccctgcacctgctggccctgctcttcagcgcccagaagcaccaccagcacgccctggatgtggtgaacatggccatcacagagcaccctgagaacttcaacctgatgttcaccaaggtgaagctggagcaggtgctgaagggccctgaggaggccctggtgacctgccggcaggtgctgcggctgtggcagaccctgtacagcttcagccagctgggcggcctggagaaggatggcagctttggagagggcctgaccatgaagaagcagagcggcatgcacctgaccctgcctgatgcccatgatgctgacagcggcagccggcgggccagcagcattgctgccagccggctggaggaggccatgtctgagctgaccatgcccagctctgtgctgaagcagggccccatgcagctgtggaccaccctggagcagatctggctgcaggccgctgagctgttcatggagcagcagcacctgaaggaggccggcttctgcatccaggaggccgccggcctcttccccaccagccacagcgtgctgtacatgaggggccgcctggccgaggtgaagggcaacctggaggaggccaagcagctgtacaaggaggccctgactgtgaacccagatggagtgcgcatcatgcacagcctgggcctgatgctgagccggctgggccacaagagcctggcccagaaggtgctgagagatgctgtggagcggcagagcacctgccacgaggcctggcagggcctgggggaggtgctgcaggcccagggccagaatgaggccgctgtggactgcttcctgacagccctggagctggaggccagcagccctgtgctgcccttcagcatcatcccccgggagctgtag

SEQ ID NO: 107276 - DNA, 1515 bp, Artificial Sequence
  derived and/or modified sequence
atggccacccgggacgtggtgctgagccgggtgcccgagcaggaggaggatcggaccgtctctctgcagaatgcagccgccatctatgatttgctgtccattactttggggcgacggggacagtacgtcatgctctcggagtgccttgagagagcaatgaaatttgccttcggtgagttccacctctggtatcaggttgcgctgtccatggtggcttgcggcaaaagtgcctacgccgtcagtctactgagggagtgcgtcaagctgcgaccatccgatccgacagtgcccctgatggcggccaaagtctgcatcggctctctccggtggctcgaggaagccgagcactttgctatgatggttattagcctgggagaagaagccggtgaattcctgcccaaaggatacctggctctgggactgacatattccctccaggccaccgatgcaactctcaagtcgaagcaggacgagctgcaccgcaaggccctgcaaacgctggagagagcacaacaactcgctccttctgaccctcaggtaattctgtatgtgtctttgcagctggcactcgtcagacagatctcctcagctatggaacagcttcaggaggcactgaaggtacggaaagatgacgcacacgccttgcacttgctggcactgctgttttctgcacagaagcaccatcagcatgccctcgacgtagtgaacatggctatcaccgaacaccctgagaattttaacctcatgttcaccaaggtgaagttggaacaagtgttaaagggtcctgaggaagcgctcgtgacatgtcgacaagttttacgcctctggcagacattatacagcttttcccagttagggggcctagagaaggatgggagttttggcgagggcctgactatgaagaaacaatcagggatgcacctaacattgcccgacgcgcatgacgcggactcggggagtcgccgggcatcctctatcgcagcctcaagactggaagaagctatgtccgagcttacaatgccttcttcggttctgaagcagggacccatgcagttgtggactacgttagaacagatttggctgcaggccgccgaactctttatggaacagcagcatctgaaggaggcaggtttctgtatccaagaggccgcaggcttattccccacctcacattcagttctctacatgcgagggagactggccgaagtgaaagggaacctggaagaggccaagcaactctacaaggaggcattgactgtgaatcctgatggcgtgagaatcatgcacagcttaggtctgatgctctcccgactgggccacaaaagccttgctcaaaaagtgctccgcgacgcagtggaacgccagtccacatgccacgaggcatggcagggactcggggaagtcctgcaggctcaggggcagaatgaagcagccgtagactgttttttgacggcactggaactggaggcctcaagccctgtactgcccttcagcataattccacgggaactttag

SEQ ID NO: 107277 - DNA, 2058 bp, Artificial Sequence
  derived and/or modified sequence
aagaagaagatcaacttcttcaagaagccccacagcctgagcctgcgcaagaaaagagaagaggaggtgatcacatgtttcgaaagagcttcgtggattgcccaggtattcctgcaggaactggaaaagaccaccaacaactccacaagtcgacatttaaagggctgtcatccacttgattatgagctcacttattttttagaagccgccctccagtctgcctacgttaagaatcttaagaaaggtaacattgtgaagggaatgcgagagctgcgtgaggtactcagaactgtcgagaccaaggcaacccagaactttaaagtcatggcggccaaacatctggcgggcgtactgcttcactcattgtctgaggaatgctattggtcccctctttcccacccgctgccagagtttatgggtaaagaagagtcatcattcgctacgcaggctttgcgaaaacctcatctatatgaaggtgataatctgtactgtcctaaagataacatcgaggaagcgctccttttgcttctgatctcagagagtatggcaacaagagacgtcgtgctgtcaagggtgcctgagcaagaagaggacaggacagtgtccctccagaacgctgccgctatttatgatctgctatctatcaccctggggcgtcgcggccaatatgtgatgctgagtgagtgtcttgagcgggcgatgaaattcgctttcggggagtttcatttgtggtaccaagttgcgctgagcatggtggcttgtggaaagagcgcttatgccgtatccttgctgcgggaatgcgtcaaactgagacccagcgaccctaccgtgcccctgatggcagcaaaggtgtgcattggctccctccgatggctggaggaggcagaacattttgctatgatggtaatctcattaggcgaggaagctggcgagttcctgccaaaaggatatctagccctcggcctgacgtactccctgcaggctaccgacgctactctcaagtcgaagcaggatgaactgcacagaaaggccctccagaccctggagcgcgctcagcagctggccccgagcgacccacaggtcatcctctatgtaagcctacagctggcactcgtgaggcaaatctcttccgctatggagcagctacaagaggctttgaaggtgagaaaggacgacgctcacgcgctgcacctacttgccctgctcttctctgctcagaagcaccaccagcatgcgctggatgtggtgaacatggccattaccgagcatcccgagaattttaatctgatgtttacaaaagtaaagctcgagcaggttctcaagggtccagaggaggcgttggtgacttgtaggcaggtgctgcggctctggcaaacactctactcattctctcaactgggtgggctcgagaaggatggatcatttggcgagggcctaactatgaaaaagcaaagtggcatgcacctgacgctcccagacgctcacgatgctgacagcggtagccgccgggcatcctccatcgccgcatcaagactggaagaggcaatgagtgagctgacaatgccctccagcgtcctgaaacaaggacccatgcagctatggacaactctggaacagatttggttacaggctgctgagctctttatggagcagcagcatctgaaggaggctggcttttgtatccaggaggcggccggtctttttccgacctcccacagcgtactctacatgcgaggccggctagctgaagtgaaggggaatttagaggaggcgaagcagctctataaagaagctctcaccgttaatccagatggagtgagaattatgcactccttgggtcttatgcttagtcggctgggccataaatccctggcacagaaggtccttcgtgacgccgtggaaaggcaatccacgtgccacgaggcctggcaaggactcggcgaggtcctccaggctcagggccagaatgaggctgctgtggactgcttcttaacagcgctcgagctcgaagcttcaagccctgtcctgcctttctccatcattcctcgggagctttag

SEQ ID NO: 107278 - DNA, 1515 bp, Artificial Sequence
  derived and/or modified sequence
atggccacgagagatgtggtcctgtcaagagtccccgaacaggaggaagaccgcacagtttcactgcaaaacgctgctgcaatctatgacctgctttcaattacactgggacgtagaggccagtacgtaatgttgagcgagtgcttagaaagggccatgaagtttgccttcggggagttccatctctggtaccaggtcgcactgagcatggtagcctgtggaaagtccgcctacgctgtctctcttctgcgggagtgcgtgaagctacgtcccagtgatccaaccgttccgctgatggctgctaaggtgtgtattggttccttgaggtggttagaggaggcggagcacttcgccatgatggttatctcgctaggtgaagaggccggagagttcctccccaaagggtacctcgccctgggcctgacctattctttacaggcgacagacgccacactgaaatcaaaacaggacgagctgcatcggaaggctctccagaccctggagagggctcaacagctggccccttcagacccccaggtaatcctctacgtatcactgcagctcgcactggtgagacagatctcaagcgcgatggagcagctacaagaggccctgaaagtgagaaaagacgacgctcacgcgctgcatttgctagccctgctgttctccgcccagaagcatcaccagcatgccctagacgtggtcaacatggccattactgagcaccccgagaatttcaacctcatgtttactaaggtcaagctggagcaagtcctgaagggcccagaagaagcactggttacatgccggcaggtacttcggctctggcagaccctttattcattttcacaactaggcggactggagaaggatggaagcttcggtgaagggctgactatgaaaaaacaaagtggcatgcatctgaccctacctgatgctcacgacgccgacagtggttctcgcagagcttcctctattgctgcgagccgcttggaagaggccatgagcgagttgacaatgccttcctccgtcctcaagcagggcccaatgcaactgtggacgactctcgaacagatctggctgcaagctgctgaactttttatggagcagcagcacctcaaggaggccggattctgtattcaagaagccgctggcttatttcctacctcgcacagcgtcctatatatgcgaggaaggttagccgaggtgaaaggcaatctggaagaagccaaacaactgtataaagaggctctgactgtgaatcccgatggcgttcgcatcatgcacagcctcggcctgatgctcagcaggctaggacacaaatccctcgcgcaaaaggtcctacgcgatgccgttgagcgacagagcacctgtcatgaagcctggcagggcctgggagaagtgctgcaggcgcagggccaaaacgaagctgccgtcgactgtttcctcaccgcactcgagcttgaggcaagtagtccagtgctgcctttcagcattatccctcgtgaactgtag

SEQ ID NO: 107279 - DNA, 2058 bp, Artificial Sequence
  derived and/or modified sequence
aaaaaaaagatcaatttcttcaaaaagccccacagcctgtccttaagaaagaaacgcgaagaggaggtgattacgtgctttgagcgcgctagttggatcgcccaggtttttttacaagaactggagaagacgaccaacaattctacgagccgtcacttgaaagggtgtcatcccctcgattatgaactgacctatttcctggaagccgctctacaatcagcatacgtgaagaatctaaagaaggggaacattgttaagggaatgagagaactccgcgaagtcctacgcacggtagaaaccaaagccactcagaatttcaaagtcatggcggcaaaacacttagccggagtcctgctccattccctgagcgaggagtgctactggagtccgcttagccacccattgccagagtttatgggtaaggaggaaagttccttcgccacacaggcacttcgaaagcctcacctttacgagggtgataatctctattgcccaaaggacaacattgaggaagcactcttactcctgcttatttctgagtcaatggccacccgggatgttgtgttaagccgggtacctgaacaggaggaagacaggacagtgagtcttcaaaatgccgctgcaatctacgatttgctgtcgatcaccctcggtaggcgtggtcagtatgttatgttgtcagaatgtctggagcgagcaatgaagtttgcattcggcgagtttcatttatggtaccaagtggctctcagcatggtggcctgtggcaaatctgcgtatgccgtaagcttgctcagagagtgtgtgaagttgaggcctagtgatccgactgttccgctgatggcagctaaagtgtgcattgggagcctgcgctggcttgaggaggcggagcactttgcgatgatggtgatctctcttggcgaagaagctggagagttcctgccaaaggggtacctcgccttgggcctcacctatagcttgcaggctactgacgccaccctgaagtctaagcaggatgagttgcacaggaaagcccttcagactcttgaacgtgcccagcagcttgccccatcggacccgcaggtgatcttatacgtgagcctgcaactggccctggttcgccagatttccagtgcgatggaacagctgcaggaggcgctcaaagtccgaaaggatgatgcacacgccctgcacctcctggccctgctcttttcagctcaaaagcaccatcagcacgccctggatgtggtgaatatggctatcactgagcatcccgaaaatttcaaccttatgtttaccaaggtaaagctggagcaagtgttaaagggtcctgaggaagccctggtgacctgtagacaggtgctccggctgtggcagacactttattccttctcacagctggggggactcgaaaaagatggtagctttggtgaaggactgactatgaaaaagcagagcggcatgcacctcacgctccctgatgcacatgacgctgactcgggctccagacgggctagctcaatcgccgcatcaaggcttgaagaggccatgtctgaactcactatgccaagctccgtcctgaaacagggcccaatgcagctgtggacgactttggagcaaatctggctccaagcggctgagttgttcatggaacagcaacacctgaaggaggcaggcttctgcattcaggaagcagcagggctcttcccaacctctcatagcgttctgtatatgaggggtaggcttgccgaggttaagggaaacctggaggaggcaaagcagttgtataaagaggctctgaccgtgaacccggatggagtgcgtatcatgcacagtttaggactgatgctgtcgaggctgggccataagagtctcgctcaaaaagttctgagggacgccgtagaaagacaatccacttgccatgaagcgtggcagggattgggcgaggtcttacaggcccaggggcagaacgaggcagcggtggactgtttcctgacagctttggagcttgaggcgtcttcgcccgtactccctttctctatcattcctcgggaactttag

SEQ ID NO: 107280 - DNA, 2418 bp, Artificial Sequence
  derived and/or modified sequence
tggctgcgaagggcgcgcacggctcctacctgaaggtggagagcgagctggagcgctgccgcgccgagggccactgggaccgcatgccggagctggtccggcagctgcagacgctgagcatgcccggcggcggaggtaacaggcgaggcagcccgagcgcagcgttcacctttccggacaccgatgactttgggaaattgctgctggctgaggccctcctggagcagtgtttgaaggagaaccatgccaaaataaaagactccatgcctttgctggagaagaatgagccgaagatgagcgaagccaaaaattatctaagcagtatccttaaccatgggaggctctcgccacagtacatgtgtgaggccatgctgatcctgggcaaactgcattacgtggagggctcataccgagatgccatcagcatgtacgcacgggccgggattgatgacatgtccatggagaacaagcccctgtatcagatgcggctgctgtcggaggcttttgtcatcaaaggcctctctctggaacgcctacccaactccatcgcctcccgcttccgcctgacagagagggaggaggaagtgatcacctgttttgagagggcctcctggatcgctcaggtgttcctgcaggaattggagaagaccacaaataacagcacgtcgaggcatctgaaaggctgtcacccgcttgactatgagctcacctacttcctggaagctgccctccagagcgcctatgtgaaaaacctgaagaaggggaacatcgtgaagggcatgagagagctccgggaggtgctgcggactgtggagaccaaagcaactcagaacttcaaagtgcctctactgccccaaggacaacatcgaggaagccctcctgctcctcctcatcagcgaatccatggcaactcgagatgtggtgctgagccgggtgccggagcaggaggaggaccggacagtgagcttgcagaatgccgcagccatctatgacctcctgagcatcacgttgggcagaaggggacagtacgtcatgctctcggagtgcctggagcgagccatgaagtttgcgtttggagaatttcacctttggtaccaggtggccctctccatggtggcttgtgggaagtcagcctacgctgtgtccctgctgcgggagtgtgtgaagttgcggccctcggaccccaccgtgcccctgatggccgcgaaggtctgcatcgggtcccttcgctggctagaggaagcagagcactttgccatgatggtgatcagcctcggagaggaagccggggagttcctccccaagggctacctggctctgggtctcacctatagcctgcaggccaccgacgccaccctgaagtccaagcaagatgaattgcaccggaaggcactgcagacgctggagagggctcagcagctggcgcccagtgacccccaggtcatcctctatgtctcgctgcagctggccctcgtccgacagatctccagtgccatggagcagctgcaggaggccctgaaggtacgcaaggatgatgcccacgccctccacctgctggcactgctcttctctgcccagaagcaccaccagcatgccctggatgttgtcaacatggccatcaccgagcaccctgagaacttcaacctgatgttcaccaaggtgaagctggagcaggtgctgaaaggcccagaggaagccctcgtgacctgcagacaagtgctgaggctgtggcagaccctgtacagcttctcccagctgggaggcctagaaaaggatggcagcttcggtgagggcctcaccatgaagaagcagagtggcatgcacctgactttgcctgatgcccatgatgcagactctggctcccggcgggcttcgtccatcgccgcctcccggctggaggaggccatgtcagagctgactatgccctcttcggtcctgaagcagggccccatgcagctgtggaccacgctggaacagatctggctgcaggctgctgagctgttcatggagcagcagcacctcaaggaagcaggtttctgcatccaggaggcggcgggcctcttccccacttctcactcagtactctatatgcggggccggctggctgaggtgaagggcaacctggaggaggccaagcagctgtacaaggaggcgctcacggtgaacccagatggcgtgcgcatcatgcatagcctgggtctgatgctgagtcggctgggccacaagagcttggcccagaaggtgcttcgtgatgccgtggagaggcagagtacgtgccacgaggcgtggcagggcctgggcgaggtgctgcaggcccagggccagaacgaggctgccgttgactgcttcctcaccgcccttgagctggaggccagcagccctgtactgcccttctccatcatccccagagagctctga

SEQ ID NO: 107281 - DNA, 4270 bp, Artificial Sequence
  derived and/or modified sequence
aagaaaaaaataaatttttttaaaaaacctcattctctttcgcttagaaaaaagagggaggaggaagtgatcacctgttttgagagggcctcctggatcgctcaggtgttcctgcaggaattggagaagaccacaaataacagcacgtcgaggcatctgaaaggctgtcacccgcttgactatgagctcacctacttcctggaagctgccctccagagcgcctatgtgaaaaacctgaagaaggggaacatcgtgaagggcatgagagagctccgggaggtgctgcggactgtggagaccaaagcaactcagaacttcaaagtgatggcggccaagcacctggcgggggtcctgctgcactccctgagtgaggagtgctactggagccccctgtcccaccctctgcctgagttcatgggcaaggaggagagttctttcgccactcaggccctgcggaaacctcacctctatgaaggagacaacctctactgccccaaggacaacatcgaggaagccctcctgctcctcctcatcagcgaatccatggcaactcgagatgtggtgctgagccgggtgccggagcaggaggaggaccggacagtgagcttgcagaatgccgcagccatctatgacctcctgagcatcacgttgggcagaaggggacagtacgtcatgctctcggagtgcctggagcgagccatgaagtttgcgtttggagaatttcacctttggtaccaggtggccctctccatggtggcttgtgggaagtcagcctacgctgtgtccctgctgcgggagtgtgtgaagttgcggccctcggaccccaccgtgcccctgatggccgcgaaggtctgcatcgggtcccttcgctggctagaggaagcagagcactttgccatgatggtgatcagcctcggagaggaagccggggagttcctccccaagggctacctggctctgggtctcacctatagcctgcaggccaccgacgccaccctgaagtccaagcaagatgaattgcaccggaaggcactgcagacgctggagagggctcagcagctggcgcccagtgacccccaggtcatcctctatgtctcgctgcagctggccctcgtccgacagatctccagtgccatggagcagctgcaggaggccctgaaggtacgcaaggatgatgcccacgccctccacctgctggcactgctcttctctgcccagaagcaccaccagcatgccctggatgttgtcaacatggccatcaccgagcaccctgagaacttcaacctgatgttcaccaaggtgaagctggagcaggtgctgaaaggcccagaggaagccctcgtgacctgcagacaagtgctgaggctgtggcagaccctgtacagcttctcccagctgggaggcctagaaaaggatggcagcttcggtgagggcctcaccatgaagaagcagagtggcatgcacctgactttgcctgatgcccatgatgcagactctggctcccggcgggcttcgtccatcgccgcctcccggctggaggaggccatgtcagagctgactatgccctcttcggtcctgaagcagggccccatgcagctgtggaccacgctggaacagatctggctgcaggctgctgagctgttcatggagcagcagcacctcaaggaagcaggtttctgcatccaggaggcggcgggcctcttccccacttctcactcagtactctatatgcggggccggctggctgaggtgaagggcaacctggaggaggccaagcagctgtacaaggaggcgctcacggtgaacccagatggcgtgcgcatcatgcatagcctgggtctgatgctgagtcggctgggccacaagagcttggcccagaaggtgcttcgtgatgccgtggagaggcagagtacgtgccacgaggcgtggcagggcctgggcgaggtgctgcaggcccagggccagaacgaggctgccgttgactgcttcctcaccgcccttgagctggaggccagcagccctgtactgcccttctccatcatccccagagagctctgacgacgctgcagccgcagggagggaggggctggccagagggagaggcagcagggaacgtgggtcagggtggggcaacagtggcatcaggtgcggggcctcagggaaatacatctttagtgaacgcctctgcagctgcagccctcgttctcttggctgggccaagagggccttcctggatttctttgttggtgccttgggaaacagtctgacttgaaccctaagtgcctttggagagttttgtggtgaccagacttgctccccaagagctgggcagcggggagcctcacagctgtccttcaccctcacccatgcctctggcttggagtctgggtggggggttctcactccccactctcagcacagtacagacttctggatctctctcaggtcttgcccagggcggtcacaatgtgaagaaactgcgggcaagtgggaagactatgagatttctgggttcccttctcagacttggagttagtagatgattcctgcattgcccctgcttgccctctgagaccagctgggccccaccttgctctttccccctgctaccaagtgcctttggggtctgaccaggggtactgagcaccggccctaacacttccatctccacccaccccatctccctggcgatgtgctccagcccaagcagcctccgtaggctttagatcctgtggttgctagatccagtcctttctaataccctgagtcaacacattactcctgcaggtcttaggctacaatgcaggtcccttgagggccaccaacatggaggtaggcagtttctaggactgtccccagtacatctcaccacccacagccctttttttgccttgattcgagcctcaccctggccttttggcttcccctgcctgagagagacctgaggaggggacagagcccagcccctctcctgtggctgagcaggcctctgtgtccatgacacctgtcttccgggcctgggggctgtgggtgtatgtcctccctactggcttccccggcccctgctgcatgatgctcttggaactcttctccaaggagtcagtcccccaggcctatcaggggatccttttgtatctgcactttgggttttagtttcaaagctccatcaggtacagcttgcatttcaggatgtgtggaaagctcgggtgagggctgccctggttcatcatagctccaccttcctcggaaggagtgggctgttggagaccccccatccatggcacactagctcagcactgcatttcccgagatgattcccaagacagctggtgcctcctggctttcctgtgccaggccaaggggcaccacagaggaccctggatcctttgcctcttcttggttgaaggatctctatgtatgtgtgtatataaatatagttttttatctatatatataaaatagagatctattttttttctggaattctgttagaaaagtaaagaaaaagcaaatgctgttggtttatctcagggtgcccaaagtggttatagtcaatttttggtactaggaaaggcacccaatgcatttcctgacttttaagcatttccttgttggaagcagcagagggccaggccaagttgctgacagtgactttgcaggttgaataaagaaacccttggaggggaagcaggcttgtctgaagcagcatgtatattcactgggcatgtagctcccacaccagccttgagccaggccctggacaggaggggctgttgcaggatgagggaggccagagaaggcatcgaagccaagacctgggcccacctggggagggatgtgggaaaggaaggatgggagggaggaccctctgggaaaatgtggatttgagctggtgagagtgttgctaaggctgggctaaagcctggagagggtaggaggaggcaagaggggtccaggcagggctgatcctggcctctgacctgtccagggcgacccctgaagcccctgctgcctctgggcattgctgggagaggccaaggcaggactcacgtctgaacagagatcccctcgggcattgctgatgggccaccttcagctgcagggaagaagcctaggagaggaggcatgggagggacctgggccttgttcagattggccacctctgctgagaagtccataccagtacacccctaataagttatgccacataccaacgtactgtggatattataacctgcattaaaacaactctaaagaacgctgctcattt

SEQ ID NO: 107282 - protein, 504 aa, Artificial Sequence
  derived and/or modified sequence
MATRDVVLSRVPEQEEDRTVSLQNAAAIYDLLSITLGRRGQYVMLSECLERAMKFAFGEFHLWYQVALSMVACGKSAYAVSLLRECVKLRPSDPTVPLMAAKVCIGSLRWLEEAEHFAMMVISLGEEAGEFLPKGYLALGLTYSLQATDATLKSKQDELHRKALQTLERAQQLAPSDPQVILYVSLQLALVRQISSAMEQLQEALKVRKDDAHALHLLALLFSAQKHHQHALDVVNMAITEHPENFNLMFTKVKLEQVLKGPEEALVTCRQVLRLWQTLYSFSQLGGLEKDGSFGEGLTMKKQSGMHLTLPDAHDADSGSRRASSIAASRLEEAMSELTMPSSVLKQGPMQLWTTLEQIWLQAAELFMEQQHLKEAGFCIQEAAGLFPTSHSVLYMRGRLAEVKGNLEEAKQLYKEALTVNPDGVRIMHSLGLMLSRLGHKSLAQKVLRDAVERQSTCHEAWQGLGEVLQAQGQNEAAVDCFLTALELEASSPVLPFSIIPREL

SEQ ID NO: 107283 - protein, 122 aa, Artificial Sequence
  derived and/or modified sequence
MEASALTSSAVTSVAKVVRVASGSAVVLPLARIATVVIGGVASIVAVPMVLSAMGFTAAGIASSSIAAKMMSAAAIANGGGVASGSLVATLQSLGATGLSGLTKFILGSIGSAIAAVIARFY

SEQ ID NO: 107284 - protein, 40 aa, Artificial Sequence
  derived and/or modified sequence
MEASALTSSAVTSVAKVVRVASGSAVVLPLARIATVVIGG

SEQ ID NO: 107285 - DNA, 369 bp, Artificial Sequence
  derived and/or modified sequence
atggaagcttcggccctgaccagctcagctgttacttccgttgcgaaggtggtgcgtgtggcatccggctcggctgtcgtattaccgcttgctagaatcgcaaccgtggttattggcggcggcgagtcagttgtggctgtcccaatggtgctatcagccatgggatttacggcagccgggatcgccagttccagtatcgctgccaaaatgatgtccgcagccgccatcgccaatggtggcggtgttgcatccggctccttggttgccacactgcagagtctcggagcaactggattgagcggcctgacaaaattcatacttggttcaatcggctctgcaatcgccgccgtgatagctagattttactag

SEQ ID NO: 107286 - DNA, 369 bp, Artificial Sequence
  derived and/or modified sequence
atggaagcgtccgccctcacatctagcgccgtcacctctgtggcgaaagtggtccgggtcgctagcggctctgccgtggtgctacctctggctcgaattgccaccgtggtaatcggaggggtggctagcattgtggccgtgccaatggtgctctcagcaatgggcttcacagcagcaggcatagcaagttcctcgatcgccgccaaaatgatgtcggctgccgccattgccaacggtggcggggtggcttcgggctctctggtggctacacttcagagcctcggagctactgggctgagcggcctgactaaatttattctgggttccataggctccgccattgctgcagtcatagcaagattttactag

SEQ ID NO: 107287 - DNA, 661 bp, Artificial Sequence
  derived and/or modified sequence
gggaacacatccaagcttaagacggtgaggtcagcttcacattctcaggaactctccttctttgggtctggctgaagttgaggatctcttactctctaggccacggaattaacccgagcaggcatggaggcctctgctctcacctcatcagcagtgaccagtgtggccaaagtggtcagggtggcctctggctctgccgtagttttgcccctggccaggattgctacagttgtgattggaggaggtgagtctgtggtggctgtgcccatggtgctcagtgccatgggcttcactgcggcgggaatcgcctcgtcctccatagcagccaagatgatgtccgcggcggccattgccaatgggggtggagttgcctcgggcagccttgtggctactctgcagtcactgggagcaactggactctccggattgaccaagttcatcctgggctccattgggtctgccattgcggctgtcattgcgaggttctactagctccctgcccctcgccctgcagagaagagaaccatgccaggggagaaggcacccagccatcctgacccagcgaggagccaactatcccaaatatacctggggtgaaatataccaaattctgcatctccagaggaaaataagaaataaagatgaattgttgcaactcttc

SEQ ID NO: 107288 - DNA, 661 bp, Artificial Sequence
  derived and/or modified sequence
gggaacacatccaagcttaagacggtgaggtcagcttcacattctcaggaactctccttctttgggtctggctgaagttgaggatctcttactctctaggccacggaattaacccgagcaggcatggaggcctctgctctcacctcatcagcagtgaccagtgtggccaaagtggtcagggtggcctctggctctgccgtagttttgcccctggccaggattgctacagttgtgattggaggagttgcttccattgtggctgtgcccatggtgctcagtgccatgggcttcactgcggcgggaatcgcctcgtcctccatagcagccaagatgatgtccgcggcggccattgccaatgggggtggagttgcctcgggcagccttgtggctactctgcagtcactgggagcaactggactctccggattgaccaagttcatcctgggctccattgggtctgccattgcggctgtcattgcgaggttctactagctccctgcccctcgccctgcagagaagagaaccatgccaggggagaaggcacccagccatcctgacccagcgaggagccaactatcccaaatatacctggggtgaaatataccaaattctgcatctccagaggaaaataagaaataaagatgaattgttgcaactcttc

SEQ ID NO: 107289 - DNA, 369 bp, Artificial Sequence
  derived and/or modified sequence
atggaggccagcgccctgaccagcagcgctgtgacctctgtggccaaggtggtgcgggtggccagcggcagcgctgtggtgctgcccctggccagaattgccaccgtggtgattggaggaggagagagcgtggtggccgtgcccatggtgctgagcgccatgggcttcaccgctgctggcatcgccagcagcagcattgctgccaagatgatgtctgctgctgccatcgccaacggcggcggcgtggccagcggcagcctggtggccaccctgcagagcctgggcgccaccggcctgagcggcctgaccaagttcatcctgggcagcatcggcagcgccatcgccgccgtcatcgcccgcttctactag

SEQ ID NO: 107290 - DNA, 369 bp, Artificial Sequence
  derived and/or modified sequence
atggaggccagcgccctgaccagcagcgctgtgacctctgtggccaaggtggtgcgggtggccagcggcagcgctgtggtgctgcccctggccagaattgccaccgtggtgattggaggagtggccagcatcgtggccgtgcccatggtgctgagcgccatgggcttcaccgctgctggcatcgccagcagcagcattgctgccaagatgatgtctgctgctgccatcgccaacggcggcggcgtggccagcggcagcctggtggccaccctgcagagcctgggcgccaccggcctgagcggcctgaccaagttcatcctgggcagcatcggcagcgccatcgccgccgtcatcgcccgcttctactag

SEQ ID NO: 107291 - DNA, 369 bp, Artificial Sequence
  derived and/or modified sequence
atggaggccagcgccctgaccagcagcgccgtgaccagcgtggccaaggtagtcagggtggcctccggcagcgcagtggtgctacctttggccagaatcgctacggtcgtgattgggggaggggaatcagtggtggctgtaccaatggtcctcagtgcaatgggtttcactgccgccgggatagcgtcctcctccatcgccgctaaaatgatgtccgctgcagctatcgcaaatggcggcggggttgcaagcgggagcttggttgcaactttacagagcctcggtgcaactgggttatctggattgacaaagtttatcctgggtagcatcggaagcgccatcgctgccgtaatcgctcggttttattag

SEQ ID NO: 107292 - DNA, 369 bp, Artificial Sequence
  derived and/or modified sequence
atggaggccagcgccctgaccagcagcgccgtgaccagcgtggccaaggtggtcagggtggcttccggctctgcagttgtgttgcctctggcaagaatcgctactgtggtgattggcggcgtggcgtccatagtggccgttccaatggtgctttctgctatgggttttacagctgctggaatcgcctcgtccagcattgctgccaaaatgatgagtgccgcggccatcgccaacggagggggggttgcctccggctccttagtagccaccctgcagtctcttggcgctacaggcttgagcggcctcactaagttcattcttggaagcatcggctcagccatcgccgcggtgatcgccaggttctattag

SEQ ID NO: 107293 - DNA, 369 bp, Artificial Sequence
  derived and/or modified sequence
atggaggcaagcgctctcacatcaagtgccgtcacctcagttgcgaaagttgttagagtcgccagcggttccgccgttgtgctgcccttggctaggattgcaaccgtagtgattggaggtggtgagtccgtggttgctgttccaatggtgctcagcgctatgggcttcaccgccgcaggaattgcatctagctccatcgcagcaaagatgatgagcgctgcggcaattgcaaatgggggtggtgtggctagtggatcactagtcgctaccttacagagcttaggcgcaacaggcctaagcgggctcactaagtttattttgggttccataggctccgcaattgcagcggtgatagccaggttttattag

SEQ ID NO: 107294 - DNA, 369 bp, Artificial Sequence
  derived and/or modified sequence
atggaggcctccgccctcactagctcagccgtaaccagcgttgctaaggtcgtgagagtagcatcagggtccgcagtagtactgccactcgctcgcattgcaaccgtggtcatcggaggtgtggcaagcatcgttgctgtgcccatggtgttgtcagctatgggttttacagccgctggtattgcgtcttcctcaatcgcggctaaaatgatgtctgctgccgctatcgccaacgggggtggtgtggcaagcggatcgttggtggccacgctccagagccttggcgcaaccggcctgtcagggctgaccaagtttattctgggctccataggctccgccatcgcagctgtcatcgcaaggttctactag

SEQ ID NO: 107295 - DNA, 369 bp, Artificial Sequence
  derived and/or modified sequence
atggaggccagcgccctgaccagcagcgccgtgaccagcgtggccaaggtggtgagagtggccagcggcagcgccgtggtgctgcccctggccagaatcgccaccgtggtgatcggcggcggcgagagcgtggtggccgtgcccatggtgctgagcgccatgggcttcaccgccgccggcatcgccagcagcagcatcgccgccaagatgatgagcgccgccgccatcgccaacggcggcggcgtggccagcggcagcctggtggccaccctgcagagcctgggcgccaccggcctgagcggcctgaccaagttcatcctgggcagcatcggcagcgccatcgccgccgtgatcgccagattctactag

SEQ ID NO: 107296 - DNA, 369 bp, Artificial Sequence
  derived and/or modified sequence
atggaggccagcgccctgaccagcagcgccgtgaccagcgtggccaaggtggtgagagtggccagcggcagcgccgtggtgctgcccctggccagaatcgccaccgtggtgatcggcggcgtggccagcatcgtggccgtgcccatggtgctgagcgccatgggcttcaccgccgccggcatcgccagcagcagcatcgccgccaagatgatgagcgccgccgccatcgccaacggcggcggcgtggccagcggcagcctggtggccaccctgcagagcctgggcgccaccggcctgagcggcctgaccaagttcatcctgggcagcatcggcagcgccatcgccgccgtgatcgccagattctactag

SEQ ID NO: 107297 - protein, 601 aa, Artificial Sequence
  derived and/or modified sequence
MDWGTELWDQFEVLERHTQWGLDLLDRYVKFVKERTEVEQAYAKQLRSLVKKYLPKRPAKDDPESKFSQQQSFVQILQEVNDFAGQRELVAENLSVRVCLELTKYSQEMKQERKMHFQEGRRAQQQLENGFKQLENSKRKFERDCREAEKAAQTAERLDQDINATKADVEKAKQQAHLRSHMAEESKNEYAAQLQRFNRDQAHFYFSQMPQIFDKLQDMDERRATRLGAGYGLLSEAELEVVPIIAKCLEGMKVAANAVDPKNDSHVLIELHKSGFARPGDVEFEDFSQPMNRAPSDSSLGTPSDGRPELRGPGRSRTKRWPFGKKNKPRPPPLSPLGGPVPSALPNGPPSPRSGRDPLAILSEISKSVKPRLASFRSLRGSRGTVVTEDFSHLPPEQQRKRLQQQLEERSRELQKEVDQREALKKMKDVYEKTPQMGDPASLEPQIAETLSNIERLKLEVQKYEAWLAEAESRVLSNRGDSLSRHARPPDPPASAPPDSSSNSASQDTKESSEEPPSEESQDTPIYTEFDEDFEEEPTSPIGHCVAIYHFEGSSEGTISMAEGEDLSLMEEDKGDGWTRVRRKEGGEGYVPTSYLRVTLN

SEQ ID NO: 107298 - DNA, 1806 bp, Artificial Sequence
  derived and/or modified sequence
atggactggggcaccgagctgtgggaccagttcgaggtgctggagagacacacccagtggggcctggacctgctggacagatacgtgaagttcgtgaaggagagaaccgaggtggagcaggcctacgccaagcagctgagaagcctggtgaagaagtacctgcccaagagacccgccaaggacgaccccgagagcaagttcagccagcagcagagcttcgtgcagatcctgcaggaggtgaacgacttcgccggccagagagagctggtggccgagaacctgagcgtgagagtgtgcctggagctgaccaagtacagccaggagatgaagcaggagagaaagatgcacttccaggagggcagaagagcccagcagcagctggagaacggcttcaagcagctggagaacagcaagagaaagttcgagagagactgcagagaggccgagaaggccgcccagaccgccgagagactggaccaggacatcaacgccaccaaggccgacgtggagaaggccaagcagcaggcccacctgagaagccacatggccgaggagagcaagaacgagtacgccgcccagctgcagagattcaacagagaccaggcccacttctacttcagccagatgccccagatcttcgacaagctgcaggacatggacgagagaagagccaccagactgggcgccggctacggcctgctgagcgaggccgagctggaggtggtgcccatcatcgccaagtgcctggagggcatgaaggtggccgccaacgccgtggaccccaagaacgacagccacgtgctgatcgagctgcacaagagcggcttcgccagacccggcgacgtggagttcgaggacttcagccagcccatgaacagagcccccagcgacagcagcctgggcacccccagcgacggcagacccgagctgagaggccccggcagaagcagaaccaagagatggcccttcggcaagaagaacaagcccagacccccccccctgagccccctgggcggccccgtgcccagcgccctgcccaacggcccccccagccccagaagcggcagagaccccctggccatcctgagcgagatcagcaagagcgtgaagcccagactggccagcttcagaagcctgagaggcagcagaggcaccgtggtgaccgaggacttcagccacctgccccccgagcagcagagaaagagactgcagcagcagctggaggagagaagcagagagctgcagaaggaggtggaccagagagaggccctgaagaagatgaaggacgtgtacgagaagaccccccagatgggcgaccccgccagcctggagccccagatcgccgagaccctgagcaacatcgagagactgaagctggaggtgcagaagtacgaggcctggctggccgaggccgagagcagagtgctgagcaacagaggcgacagcctgagcagacacgccagaccccccgacccccccgccagcgccccccccgacagcagcagcaacagcgccagccaggacaccaaggagagcagcgaggagccccccagcgaggagagccaggacacccccatctacaccgagttcgacgaggacttcgaggaggagcccaccagccccatcggccactgcgtggccatctaccacttcgagggcagcagcgagggcaccatcagcatggccgagggcgaggacctgagcctgatggaggaggacaagggcgacggctggaccagagtgagaagaaaggagggcggcgagggctacgtgcccaccagctacctgagagtgaccctgaactag

SEQ ID NO: 107299 - DNA, 1806 bp, Artificial Sequence
  derived and/or modified sequence
atggactggggaaccgaactgtgggaccagtttgaggtcctggaaagacacacccagtggggactggatcttctcgataggtatgtgaagttcgtgaaggagcgcacagaggtcgagcaggcgtacgccaagcagctccgcagcctcgtcaagaagtaccttccgaaacggccagccaaggacgacccggagtcaaaattctcacagcagcaaagctttgtgcagatcctgcaggaggttaacgactttgccggacagagagagctcgttgcagagaatctgagcgtgcgggtgtgtttagagctgacaaaatattctcaggagatgaagcaggagcgcaaaatgcacttccaggaagggaggcgggcccagcagcagttggaaaatggattcaaacagctggagaatagcaagcgcaagtttgagcgggattgccgcgaggcggagaaagccgcacagactgctgagcggttagaccaagacattaatgccactaaagcagatgtcgaaaaggcaaaacagcaggcacatctgaggagccacatggcggaagaatcaaaaaacgagtatgccgctcaactacaaaggttcaacagagatcaagctcatttctactttagccagatgcctcagattttcgataagctacaagacatggatgagcgtcgggccacccgtcttggcgcaggctatggactcctctcagaagctgagctggaagtggtacctatcatcgccaagtgccttgaagggatgaaagtggccgccaatgccgtggatccaaagaatgactcccatgtcctgattgagttgcacaagtccggattcgccagacctggtgatgtggagtttgaggacttttcccagcctatgaaccgcgcaccctccgatagcagcttaggcacgcctagtgacggccggccagagctgcgaggacctggcagatcaagaaccaagcgctggcccttcggtaaaaaaaacaagccacgaccccctcctctatctcctctcggcgggcccgtaccaagtgccctgcccaatgggccgcctagcccacgctctgggagagatcccctggccattttgtccgaaatttctaaaagtgtaaaaccccggctcgcttcctttcgatctctgaggggaagcaggggaaccgtcgtcacagaggacttcagtcatctgcctcctgaacagcaaagaaaaagactgcaacaacagttggaggagcgatcccgtgagctccagaaggaagtcgaccagcgcgaggctctgaagaagatgaaggatgtatatgagaaaaccccgcagatgggagaccccgcatctctggagccccagatcgcggaaactctgtcgaacatcgagagactgaagcttgaagtccagaaatatgaggcttggcttgctgaggctgagtccagagtgttaagtaatcgcggggactcactatcgagacatgcgaggcccccagatccgccggcttctgccccccctgatagttcgtccaactctgctagccaggacaccaaagaaagctcggaagaacctccctccgaggagtcacaggacacacccatctatactgagtttgacgaggatttcgaagaagaaccgactagtcccatcggccactgtgttgcaatctatcattttgaggggtcctcggaagggactatttcaatggctgaaggagaagacctgtcattgatggaagaagacaaaggagatgggtggacgcgagtgaggcgaaaagaaggtggagaaggatacgtacccactagctatctacgcgtgacgctgaattag

SEQ ID NO: 107300 - DNA, 1806 bp, Artificial Sequence
  derived and/or modified sequence
atggactggggcacagagctgtgggaccagtttgaggtgctggagcggcacacccagtggggcctggacctgctggaccgctacgtgaagtttgtgaaggagaggacagaggtggagcaggcctatgccaagcagctgcggagcctggtgaagaagtacctgcccaagaggcctgccaaggatgatcctgagagcaagttcagccagcagcagagctttgtgcagatcctgcaggaggtgaatgactttgctggccagcgggagctggtggccgagaacctgtctgtgcgggtgtgcctggagctgaccaagtacagccaggagatgaagcaggagaggaagatgcacttccaggagggcagaagagcccagcagcagctggagaatggcttcaagcagctggagaacagcaagaggaagtttgagcgggactgccgggaggccgagaaggccgcccagacagctgagcggctggaccaggacatcaatgccaccaaggcagatgtggagaaggccaagcagcaggcccacctgcggagccacatggccgaggagagcaagaatgaatatgctgcccagctgcagcgcttcaacagagaccaggcccacttctacttcagccagatgccccagatctttgacaagctgcaggacatggatgagcggcgggccacccggctgggcgccggctacggcctgctgtctgaggccgagctggaggtggtgcccatcatcgccaagtgcctggagggcatgaaggtggccgccaatgctgtggaccccaagaatgacagccacgtgctgattgagctgcacaagagcggctttgcccggcctggagatgtggagtttgaggacttcagccagcccatgaacagagcccccagcgacagcagcctgggcacccccagtgatggccggcctgagctgcggggccctggccgcagcaggaccaagcgctggccctttgggaagaagaacaagccccggcccccacccctgagccccctgggcggccctgtgcccagcgccctgcccaatggaccacccagccccaggagcggccgggaccccctggccatcctgtctgagatcagcaagtctgtgaagccccggctggccagcttccgcagcctgcggggcagccggggcaccgtggtgacagaggacttcagccacctgcccccagagcagcagaggaagaggctgcagcagcagctggaggagaggagccgggagctgcagaaggaggtggaccagcgggaggccctgaagaagatgaaggatgtgtatgagaagaccccccagatgggagaccctgccagcctggagccccagattgctgagaccctgagcaacatcgagcggctgaagctggaggtgcagaagtatgaggcctggctggccgaggccgagagccgggtgctgagcaacagaggagacagcctgagcagacatgcccggcccccagaccccccagccagcgcccccccagacagcagcagcaacagcgccagccaggacaccaaggagagcagcgaggagccccccagcgaggagagccaggacacccccatctacacagaatttgatgaggactttgaggaggagcccaccagccccatcggccactgtgtggccatctaccactttgagggcagcagcgagggcaccatctccatggccgagggggaggacctgagcctgatggaggaggacaagggagatggctggaccagggtgcggaggaaggagggcggggagggctacgtgcccaccagctacctgcgggtgaccctgaactag

SEQ ID NO: 107301 - DNA, 1806 bp, Artificial Sequence
  derived and/or modified sequence
atggactggggcaccgagctgtgggaccagttcgaggtgctggagcggcacacccaatggggactcgatctgctggacagatacgtaaaattcgtgaaggagaggaccgaggtggagcaggcatatgccaagcaactccgaagtctagtgaagaaatatctgccgaaacgtcccgccaaagatgaccctgagtcaaagttttcgcagcaacagtcctttgtgcaaatcttgcaggaggtcaatgacttcgctggacaaagggaactggtggctgagaacctatccgtgcgagtctgtcttgagctgactaagtacagccaagaaatgaaacaggagaggaaaatgcactttcaggaaggacggcgtgcgcaacagcaactggaaaatggcttcaaacaattggagaattctaaacggaagttcgagagggactgtcgcgaggctgagaaagctgcacaaacagcagagcgattggaccaggacatcaatgctactaaagcggatgttgaaaaagctaaacaacaagcccatttaaggagtcatatggcagaagagagtaagaacgagtacgcggctcagctccagcggttcaatcgggatcaggctcacttctatttctcccagatgccacaaatcttcgacaaattgcaggatatggacgaaagaagagcaacgcgtttgggagctggttacggccttttatcagaggctgagctggaagtggtgcctatcatcgctaagtgcctggagggcatgaaagtggctgccaatgctgtggaccccaagaatgactcgcacgtgctcattgagctccataagagcggcttcgcccggcctggagacgtagagtttgaggacttctcccagcccatgaatcgtgccccttccgattccagcctgggtacccccagcgatggtcggcctgagctgcggggccctgggcggtcacggaccaagagatggcccttcggtaagaaaaacaaaccacgacctccgcccttaagccctctgggcggcccggtgccatctgccctgcccaacggtcctccttcaccacgcagcggaagggatcctctcgctatcctttccgaaatcagtaagtcagtcaagccaagactggcctcattcagaagtttgcgaggatcaagaggaactgtggttaccgaggatttcagtcacctgccccccgagcagcagagaaagcggctgcagcagcagctggaggagcgcagccgggagctgcaaaaagaagttgaccagagagaagctctgaaaaaaatgaaagacgtttatgagaaaacacctcaaatgggcgatcctgcttctctggagccccagatcgctgagacactttccaatatcgaaaggctcaaactcgaagtccagaagtatgaggcttggctcgctgaggctgagtctcgcgtgctctccaacaggggagattccctgagtaggcacgcaagacccccagaccctccggcctccgctccaccagacagctcaagcaacagcgcgagccaagatacaaaagagagctcagaagaaccaccatccgaggaaagtcaagataccccaatttacaccgagttcgacgaagattttgaggaggagcccacaagtcccatcggccattgtgtggcaatctatcatttcgaggggagcagcgaagggaccattagcatggctgaaggggaagacctgagccttatggaggaggacaagggtgatggctggaccagagttaggagaaaggaaggaggggaaggatatgtgccgacgtcatacttaagggttactttgaactag

SEQ ID NO: 107302 - DNA, 1806 bp, Artificial Sequence
  derived and/or modified sequence
atggattggggaactgagttgtgggatcaattcgaagtcctagaacgacatacccaatgggggctagatctcctggaccgatatgtgaagttcgtcaaggaacgaaccgaagtggaacaggcgtacgccaaacagttaaggtcactcgtgaaaaagtatctgccaaagcgtccggctaaggatgacccggagtctaaattctctcagcaacagtccttcgtgcagatcttacaggaggttaacgattttgcaggccaacgtgaactggtcgccgagaacctgtccgtccgtgtctgtcttgagctaacaaagtatagtcaggagatgaagcaagagcgaaagatgcactttcaggaaggacgacgagctcagcagcagttggagaatggcttcaaacagctagagaatagtaagcgcaagttcgagagggactgtcgtgaggcagagaaggcggcacagacagccgagaggctggatcaggacattaatgccaccaaagctgatgtggagaaggccaaacagcaggcccacctccggagccacatggccgaggaatcaaagaacgaatacgctgcccagctccagaggtttaaccgcgaccaggcacatttctatttctctcagatgccccaaatctttgacaaacttcaggatatggacgaacgccgtgccacccgactgggggctggatatggactgcttagcgaggcggaacttgaggtcgtccctattatcgccaaatgcttggaaggcatgaaggttgccgctaatgcagtagatccaaagaacgattcccacgtcctcattgagctgcacaaaagtggctttgccagaccaggagatgtggagttcgaagacttcagtcaacctatgaatagggcaccaagcgacagctcactcggtacaccttccgatgggcgtcctgaactgaggggccctggaaggtcgaggacaaagaggtggccctttggaaaaaaaaacaaaccacgaccgccacctctgtccccattaggtggaccggtgccatccgctctgcctaatggccctccctcacctaggtcagggcgtgatccgttggccattctctcagagatcagcaaaagtgtgaagccacggttagcctccttcaggagtctaagagggagcaggggcactgtcgttaccgaggacttctctcacctgcccccagaacagcagagaaagaggcttcagcagcagctggaggaaaggtcccgggaattgcaaaaggaagtggaccaaagggaggccttgaagaaaatgaaagatgtgtacgaaaagaccccccaaatgggggatccagcgtcgctggagccgcagattgccgaaacgctgtcaaatatcgagagattaaagctggaagtgcagaagtatgaggcctggttggccgaggccgaaagccgagtgctaagcaatcgcggtgactctttgtcaagacacgcccgtccgcctgacccacctgcctccgctccgccagactcgtcttctaacagtgccagccaggacaccaaggagtcatcagaggaacctccctctgaagagtcccaggacaccccaatttacaccgaatttgatgaggattttgaggaggagccaacaagccccattggacactgcgtggctatctaccactttgaaggttcctccgagggtaccatatcaatggctgagggagaggatttgagcctcatggaagaagataaaggggacggttggacaagagtgcggagaaaagaagggggtgaggggtatgtgcccacttcataccttagggtgactctcaattag

SEQ ID NO: 107303 - DNA, 2114 bp, Artificial Sequence
  derived and/or modified sequence
gcggtggtggctgcggcggcggcggcgggagcagcatggattggggcactgagctgtgggatcagttcgaggtgctcgagcgccacacgcagtgggggctggacctgttggacagatatgtaaagttcgtgaaagaacgcaccgaagtggaacaggcttacgccaaacaactgcggagcctggtgaaaaaatatctgcccaagagacctgccaaggatgatcctgagtccaaattcagccagcaacagtccttcgtacagattctccaggaggtgaatgactttgcaggccagcgggagctggtggctgagaacctcagtgtccgtgtatgtcttgagctgaccaagtactcacaagagatgaaacaggagaggaagatgcacttccaagaagggcggcgggcccagcagcagctggaaaatggctttaaacagctggagaatagtaagcgtaaatttgagcgggactgccgggaggcagagaaggcagcccagactgctgaacggctagaccaggatatcaacgccaccaaggctgatgtggagaaggccaagcagcaagcccaccttcggagtcacatggccgaagaaagcaaaaacgaatatgcggctcaactgcagcgcttcaaccgagaccaagcccacttctatttttcacagatgccccagatattcgataagctccaagacatggatgaacgcagggccacccgcctgggtgccgggtatgggctcctgtcggaggccgagctggaggtggtgcccataatagccaagtgcttggagggcatgaaggtggctgcaaatgctgtggatcccaagaacgactcccacgtccttatagagctgcacaagtcaggttttgcccgcccgggcgacgtggaattcgaggacttcagccagcccatgaaccgtgcaccctccgacagcagtctgggcaccccctcggatggacggcctgaactccgaggcccgggtcgcagccgcaccaagcgctggccttttggcaagaagaacaagcctcgccccccacccctctcccccctggggggccccgtaccctcggcattgcctaacggacccccgtccccccgctccggccgtgaccccttggccatactgagcgagatcagtaagtcggtcaaaccgaggctagcatccttccgcagccttcgaggcagccgtgggacagtggtgaccgaggattttagccacttgcccccagagcagcagcgaaaacggcttcaacagcagttggaagaacgcagtcgtgaacttcagaaggaggttgaccagagggaagccctaaagaaaatgaaggatgtctatgagaagacacctcagatgggggaccccgccagcttggagccccagatcgctgaaaccctgagcaacattgaacggctgaaattggaagtgcagaagtatgaggcgtggctggcagaagctgaaagtcgagtccttagcaaccggggagacagcctgagccggcacgcccggcctcccgacccccccgctagcgccccgccagacagcagcagcaacagcgcatcacaggacaccaaggagagctctgaagagcctccctcagaagagagccaggacacccccatttacacggagtttgatgaggatttcgaggaggaacccacatcccccataggtcactgtgtggccatctaccactttgaagggtccagcgagggcactatctctatggccgagggtgaagacctcagtcttatggaagaagacaaaggggacggctggacccgggtcaggcggaaagagggaggcgagggctacgtgcccacctcctacctccgagtcacgctcaattgaaccctgccagagacgggaagaggggggctgtcggctgctgcttctgggccacggggagccccaggacctatgcactttatttctgaccccgtggcttcggctgagacctgtgtaacctgctgccccctccacccccaacccagtcctacctgtcacaccggacggacccgctgtgccttctaccatcgttccaccattgatgtacatactcatgttttacatcttttctttctgccgctcggctccggccattttgttttatacaaaaatggg

SEQ ID NO: 107304 - protein, 593 aa, Artificial Sequence
  derived and/or modified sequence
MDWGTELWDQFEVLERHTQWGLDLLDRYVKFVKERTEVEQAYAKQLRSLVKKYLPKRPAKDDPESKFSQQQSFVQILQEVNDFAGQRELVAENLSVRVCLELTKYSQEMKQERKMHFQEGRRAQQQLENGFKQLENSKRKFERDCREAEKAAQTAERLDQDINATKADVEKAKQQAHLRSHMAEESKNEYAAQLQRFNRDQAHFYFSQMPQIFDKLQDMDERRATRLGAGYGLLSEAELEVVPIIAKCLEGMKVAANAVDPKNDSHVLIELHKSGFARPGDVEFEDFSQPMNRAPSDSSLGTPSDGRPELRGPGRSRTKRWPFGKKNKTVVTEDFSHLPPEQQRKRLQQQLEERSRELQKEVDQREALKKMKDVYEKTPQMGDPASLEPQIAETLSNIERLKLEVQKYEAWLAEAESRVLSNRGDSLSRHARPPDPPASAPPDSSSNSASQDTKESSEEPPSEESQDTPIYTEFDEDFEEEPTSPIGHCVAIYHFEDLGPPPPPSQGPARALSLWPRVKTSVLWKKTKGTAGPGSGGKREARATCPPPTSESRSIEPCQRREEGGCRLLLLGHGEPQDLCTLFLTPWLRLRPV

SEQ ID NO: 107305 - DNA, 1782 bp, Artificial Sequence
  derived and/or modified sequence
atggactggggcaccgagctgtgggaccagttcgaggtgctggagagacacacccagtggggcctggacctgctggacagatacgtgaagttcgtgaaggagagaaccgaggtggagcaggcctacgccaagcagctgagaagcctggtgaagaagtacctgcccaagagacccgccaaggacgaccccgagagcaagttcagccagcagcagagcttcgtgcagatcctgcaggaggtgaacgacttcgccggccagagagagctggtggccgagaacctgagcgtgagagtgtgcctggagctgaccaagtacagccaggagatgaagcaggagagaaagatgcacttccaggagggcagaagagcccagcagcagctggagaacggcttcaagcagctggagaacagcaagagaaagttcgagagagactgcagagaggccgagaaggccgcccagaccgccgagagactggaccaggacatcaacgccaccaaggccgacgtggagaaggccaagcagcaggcccacctgagaagccacatggccgaggagagcaagaacgagtacgccgcccagctgcagagattcaacagagaccaggcccacttctacttcagccagatgccccagatcttcgacaagctgcaggacatggacgagagaagagccaccagactgggcgccggctacggcctgctgagcgaggccgagctggaggtggtgcccatcatcgccaagtgcctggagggcatgaaggtggccgccaacgccgtggaccccaagaacgacagccacgtgctgatcgagctgcacaagagcggcttcgccagacccggcgacgtggagttcgaggacttcagccagcccatgaacagagcccccagcgacagcagcctgggcacccccagcgacggcagacccgagctgagaggccccggcagaagcagaaccaagagatggcccttcggcaagaagaacaagaccgtggtgaccgaggacttcagccacctgccccccgagcagcagagaaagagactgcagcagcagctggaggagagaagcagagagctgcagaaggaggtggaccagagagaggccctgaagaagatgaaggacgtgtacgagaagaccccccagatgggcgaccccgccagcctggagccccagatcgccgagaccctgagcaacatcgagagactgaagctggaggtgcagaagtacgaggcctggctggccgaggccgagagcagagtgctgagcaacagaggcgacagcctgagcagacacgccagaccccccgacccccccgccagcgccccccccgacagcagcagcaacagcgccagccaggacaccaaggagagcagcgaggagccccccagcgaggagagccaggacacccccatctacaccgagttcgacgaggacttcgaggaggagcccaccagccccatcggccactgcgtggccatctaccacttcgaggacctgggccccccccccccccccagccagggccccgccagagccctgagcctgtggcccagagtgaagaccagcgtgctgtggaagaagaccaagggcaccgccggccccggcagcggcggcaagagagaggccagagccacctgccccccccccaccagcgagagcagaagcatcgagccctgccagagaagagaggagggcggctgcagactgctgctgctgggccacggcgagccccaggacctgtgcaccctgttcctgaccccctggctgagactgagacccgtgtag

SEQ ID NO: 107306 - DNA, 1782 bp, Artificial Sequence
  derived and/or modified sequence
atggattggggaacagaactttgggatcagttcgaagtgttggagagacatacccagtgggggctcgacctgcttgatcgctacgtcaagtttgtcaaggagcgcacagaagtggaacaggcgtatgccaagcagcttagatctctggttaagaagtacctgccgaaacgcccagcaaaggacgatcccgaatctaaattctcacagcaacagtcttttgtgcaaatcctgcaagaagtgaatgactttgcaggtcaaagagaacttgtagcggaaaatctgagcgtgagagtgtgtctggagctcacaaagtattcgcaggaaatgaaacaggaaaggaagatgcatttccaggaggggaggcgagcacaacagcaactagagaatggctttaagcagctcgaaaactccaaacggaagttcgaaagggattgtagggaggcagaaaaagccgcccagaccgcggagagactggatcaggatattaacgcaaccaaggccgatgtcgagaaggctaagcaacaggctcacttgaggtcccacatggcagaagagtccaagaatgagtacgccgcccagttgcagcgttttaacagggaccaggcccacttctattttagccagatgccacagattttcgacaagctgcaggacatggacgagaggcgagctaccagactcggggcaggatatgggcttctgagcgaggcggagctggaggtcgtgcccattattgctaagtgtctggagggtatgaaggtggcggcaaacgctgtcgacccgaagaacgactcccatgtcctaatagaactccataagtccggattcgccagacctggtgatgtggaatttgaagacttttctcagccaatgaaccgcgcaccgtctgacagttcacttggcacaccgagcgacggacgaccagaactgaggggtcctgggagatctcgcaccaaacgatggcctttcggaaaaaaaaataaaaccgtcgtcaccgaagacttttcacatctaccgcctgagcagcagagaaagcggcttcagcaacaattagaggaaaggtctagagagcttcagaaagaggttgaccagagagaagcattgaagaagatgaaggatgtctacgagaagacaccccagatgggagacccagcctcattggaacctcagatcgcggaaaccctatccaacattgagcggctgaaattagaggtgcagaaatatgaggcctggcttgcagaggccgagagtagggtgctgtctaaccgcggtgatagtctatcaagacacgccagaccccccgacccccccgcttccgctccaccagattcctctagcaacagtgcatctcaggatacaaaggaaagttcagaggagccacctagtgaggagtctcaggatacacccatatacaccgagtttgacgaggactttgaggaagagccaacgtccccaattggccattgtgtcgctatttaccatttcgaagacttagggccccctccaccgccctcccagggcccagcccgcgctctctccctctggccgagggtaaagaccagtgtactgtggaaaaaaaccaaggggacggcggggccgggctctggaggcaaaagagaggcacgtgctacctgcccaccaccaacatccgagtctcggtctattgagccatgccagcgccgagaggagggtgggtgtcgcctgctcttgttaggtcacggggagccccaagacttatgcaccctgtttctgactccttggctgagacttcggcctgtctag

SEQ ID NO: 107307 - DNA, 1782 bp, Artificial Sequence
  derived and/or modified sequence
atggactggggcacagagctgtgggaccagtttgaggtgctggagcggcacacccagtggggcctggacctgctggaccgctacgtgaagtttgtgaaggagaggacagaggtggagcaggcctatgccaagcagctgcggagcctggtgaagaagtacctgcccaagaggcctgccaaggatgatcctgagagcaagttcagccagcagcagagctttgtgcagatcctgcaggaggtgaatgactttgctggccagcgggagctggtggccgagaacctgtctgtgcgggtgtgcctggagctgaccaagtacagccaggagatgaagcaggagaggaagatgcacttccaggagggcagaagagcccagcagcagctggagaatggcttcaagcagctggagaacagcaagaggaagtttgagcgggactgccgggaggccgagaaggccgcccagacagctgagcggctggaccaggacatcaatgccaccaaggcagatgtggagaaggccaagcagcaggcccacctgcggagccacatggccgaggagagcaagaatgaatatgctgcccagctgcagcgcttcaacagagaccaggcccacttctacttcagccagatgccccagatctttgacaagctgcaggacatggatgagcggcgggccacccggctgggcgccggctacggcctgctgtctgaggccgagctggaggtggtgcccatcatcgccaagtgcctggagggcatgaaggtggccgccaatgctgtggaccccaagaatgacagccacgtgctgattgagctgcacaagagcggctttgcccggcctggagatgtggagtttgaggacttcagccagcccatgaacagagcccccagcgacagcagcctgggcacccccagtgatggccggcctgagctgcggggccctggccgcagcaggaccaagcgctggccctttgggaagaagaacaagacagtggtgacagaggacttcagccacctgcccccagagcagcagaggaagaggctgcagcagcagctggaggagaggagccgggagctgcagaaggaggtggaccagcgggaggccctgaagaagatgaaggatgtgtatgagaagaccccccagatgggagaccctgccagcctggagccccagattgctgagaccctgagcaacatcgagcggctgaagctggaggtgcagaagtatgaggcctggctggccgaggccgagagccgggtgctgagcaacagaggagacagcctgagcagacatgcccggcccccagaccccccagccagcgcccccccagacagcagcagcaacagcgccagccaggacaccaaggagagcagcgaggagccccccagcgaggagagccaggacacccccatctacacagaatttgatgaggactttgaggaggagcccaccagccccatcggccactgtgtggccatctaccactttgaggacctgggccccccacctccacccagccagggccctgcccgggccctgagcctgtggccccgggtgaagacctctgtgctgtggaagaagaccaagggcacagctggccctggcagcggcggcaagcgggaggcccgggccacctgccccccacccaccagcgagagccgcagcattgagccctgccagaggcgggaggagggcggctgccgcctgctgctgctgggccatggagagccccaggacctgtgcaccctcttcctgaccccctggctgcggctgcggcctgtgtag

SEQ ID NO: 107308 - DNA, 1782 bp, Artificial Sequence
  derived and/or modified sequence
atggactggggcaccgagctgtgggaccagttcgaggtgctggagcgccatacccagtggggccttgacctcctggatcgctacgtgaagttcgtgaaagaacgcacggaagttgagcaagcttacgcaaagcaactgcgctcgttggtgaagaagtacttgccaaaaaggccagcaaaagacgatcctgagagcaagttttcacagcagcaatcgttcgttcagatactccaggaagtgaacgactttgcagggcagagggaacttgtggccgaaaatctgagcgtcagggtgtgcctcgaactgaccaagtactctcaggaaatgaagcaggaacggaaaatgcacttccaagaaggacgtcgtgctcagcagcagctggagaatggttttaagcaactggagaactcaaagaggaagttcgagcgcgactgccgggaagcggaaaaagctgcccaaaccgcagagcgcctggatcaggacatcaatgcgaccaaagccgacgtggaaaaagccaaacagcaggctcatttaagatcacacatggccgaagagagtaagaacgaatatgccgcacagctccagcgatttaacagagatcaggcccatttttatttctctcagatgcctcagatcttcgacaaattgcaagatatggacgaacgcagggctacacgtttgggtgccggttatggccttctctcagaggcggagcttgaagtcgtgcctattattgcaaagtgcctggagggaatgaaggtcgcagccaatgctgtcgaccctaagaacgattcacacgtcttgatcgagcttcataagagtggtttcgcccgtcctggcgacgtcgagttcgaggattttagtcagcctatgaatagggctcctagcgacagcagtctgggcactccttctgatggacgtccagagctacgagggcccggccggtcccgcaccaaacgttggcccttcggcaaaaaaaacaagactgtcgtcacggaagactttagtcaccttccccctgaacaacagagaaagaggttgcagcaacagctggaagagagaagtcgagagttacagaaagaagtggaccagcgcgaagcactgaaaaaaatgaaggacgtctacgaaaagacccctcagatgggcgatccagcctcattggagccgcagatcgctgaaacactctctaacatcgaaagactgaagttggaggtacagaaatatgaagcttggcttgccgaggccgagtctcgcgtgcttagcaaccggggtgattctttgagtcggcatgcccggcctccagatccccctgcctccgccccaccagattccagttcgaactcagctagtcaggatactaaagagtcttctgaagagcccccttccgaagagtctcaggatacgcctatctacaccgagtttgacgaagatttcgaggaggaaccaacctctcccatcggacactgcgttgccatttaccactttgaagacctgggcccccctccaccaccgtcacaaggacctgcccgagccttgtcactatggccaagggtgaaaacctccgtcctgtggaaaaaaacaaagggcacagccggccccgggagcggtgggaagagagaggctcgcgcgacttgtcctcccccaacaagcgagtcacggtcaattgagccatgccagaggagggaagaagggggttgtagactactcctgctcgggcacggtgaaccccaggacctatgtacactgtttttgaccccttggctgcgacttcggcccgtttag

SEQ ID NO: 107309 - DNA, 1782 bp, Artificial Sequence
  derived and/or modified sequence
atggattgggggaccgaactttgggaccaattcgaggtgttggaacgacatacgcagtggggactggatctgctagaccggtacgtgaagtttgtgaaagaacgcacagaggtggagcaggcctacgctaagcagctgcgctccctggtaaaaaagtacctcccgaagcggccagccaaagacgatccagagagtaagttctctcaacagcaatcctttgtgcaaatcctccaagaggtgaatgactttgcagggcagagagaactggtcgctgaaaatctgtcggtccgggtgtgccttgagcttaccaagtatagccaagaaatgaagcaagaacgtaagatgcacttccaggagggccgacgggctcagcaacaactggagaatgggttcaagcagcttgaaaactccaaaagaaagtttgaacgcgattgccgagaagcagagaaagccgcacagactgcggagcggctggatcaggatatcaacgccactaaggccgatgttgaaaaggctaaacagcaggcgcatcttagatcacacatggccgaagaaagcaaaaacgagtatgcagcccaacttcaacgttttaatcgcgaccaggctcacttctacttttcacaaatgccacagatattcgacaagctccaagatatggatgagcggcgagcaaccaggctgggtgcagggtacggactgctgtcagaggccgaacttgaggtggttcccattattgcaaaatgcctcgagggcatgaaagtagcagccaatgcagttgacccaaagaacgacagccatgtgctgatagagctgcataaatcaggctttgcacggcctggcgacgtcgagttcgaagactttagtcagcctatgaaccgggcacctagcgacagttctctggggacaccatcagatggacggccagaactgcggggtcccggacggtccaggaccaagcggtggcctttcggtaaaaaaaataagacagtggtgactgaagacttcagccacttgccacccgagcaacagcgtaaaagattacagcagcagctggaggagcgtagtagggagctgcaaaaagaggtagaccagcgcgaagccctcaagaaaatgaaagacgtgtacgaaaaaacccctcagatgggcgatccagccagcctagaacctcagatcgcagaaaccctctcaaacattgagcgcctgaaacttgaggtacaaaaatacgaggcttggcttgcagaagctgaatcacgcgttctctcaaatcgtggagactccctctcccggcatgcgcgtcccccagatcctcccgcttctgcgccacccgattcctctagcaactctgctagccaggatactaaggagagtagcgaagaaccacctagcgaggagtcccaagataccccaatctataccgaattcgatgaagactttgaagaagaacctacctcccccatcggtcattgcgtggccatttaccacttcgaggacctgggccctccacccccaccatcccagggccctgctcgcgcactcagtttatggccaagggtaaaaacttccgtcctgtggaagaaaaccaagggcacagctggacccggatcaggtgggaagagagaggcccgagccacgtgcccaccacctacgtcggagagccggagcatcgagccttgtcaaagaagggaagaaggaggctgtagattgttactactgggccacggcgagccacaggacctctgcaccctctttctcactccatggctgaggctgcgaccagtttag

SEQ ID NO: 107310 - DNA, 1920 bp, Artificial Sequence
  derived and/or modified sequence
atggattggggcactgagctgtgggatcagttcgaggtgctcgagcgccacacgcagtgggggctggacctgttggacagatatgtaaagttcgtgaaagaacgcaccgaagtggaacaggcttacgccaaacaactgcggagcctggtgaaaaaatatctgcccaagagacctgccaaggatgatcctgagtccaaattcagccagcaacagtccttcgtacagattctccaggaggtgaatgactttgcaggccagcgggagctggtggctgagaacctcagtgtccgtgtatgtcttgagctgaccaagtactcacaagagatgaaacaggagaggaagatgcacttccaagaagggcggcgggcccagcagcagctggaaaatggctttaaacagctggagaatagtaagcgtaaatttgagcgggactgccgggaggcagagaaggcagcccagactgctgaacggctagaccaggatatcaacgccaccaaggctgatgtggagaaggccaagcagcaagcccaccttcggagtcacatggccgaagaaagcaaaaacgaatatgcggctcaactgcagcgcttcaaccgagaccaagcccacttctatttttcacagatgccccagatattcgataagctccaagacatggatgaacgcagggccacccgcctgggtgccgggtatgggctcctgtcggaggccgagctggaggtggtgcccataatagccaagtgcttggagggcatgaaggtggctgcaaatgctgtggatcccaagaacgactcccacgtccttatagagctgcacaagtcaggttttgcccgcccgggcgacgtggaattcgaggacttcagccagcccatgaaccgtgcaccctccgacagcagtctgggcaccccctcggatggacggcctgaactccgaggcccgggtcgcagccgcaccaagcgctggccttttggcaagaagaacaagacagtggtgaccgaggattttagccacttgcccccagagcagcagcgaaaacggcttcaacagcagttggaagaacgcagtcgtgaacttcagaaggaggttgaccagagggaagccctaaagaaaatgaaggatgtctatgagaagacacctcagatgggggaccccgccagcttggagccccagatcgctgaaaccctgagcaacattgaacggctgaaattggaagtgcagaagtatgaggcgtggctggcagaagctgaaagtcgagtccttagcaaccggggagacagcctgagccggcacgcccggcctcccgacccccccgctagcgccccgccagacagcagcagcaacagcgcatcacaggacaccaaggagagctctgaagagcctccctcagaagagagccaggacacccccatttacacggagtttgatgaggatttcgaggaggaacccacatcccccataggtcactgtgtggccatctaccactttgaagatctgggcccacccccacccccatcacagggtccagcgagggcactatctctatggccgagggtgaagacctcagtcttatggaagaagacaaaggggacggctggacccgggtcaggcggaaagagggaggcgagggctacgtgcccacctcctacctccgagtcacgctcaattgaaccctgccagagacgggaagaggggggctgtcggctgctgcttctgggccacggggagccccaggacctatgcactttatttctgaccccgtggcttcggctgagacctgtgtaacctgctgccccctccacccccaacccagtcctacctgtcacaccggacggacccgctgtgccttctaccatcgttccaccattgatgtacatactcatgttttacatcttttctttctgccgctcggctccggccatt

SEQ ID NO: 107311 - protein, 278 aa, Artificial Sequence
  derived and/or modified sequence
MAARPLPVSPARALLLALAGALLAPCEARGVSLWNQGRADEVVSASVGSGDLWIPVKSFDSKNHPEVLNIRLQRESKELIINLERNEGLIASSFTETHYLQDGTDVSLARNYTGHCYYHGHVRGYSDSAVSLSTCSGLRGLIVFENESYVLEPMKSATNRYKLFPAKKLKSVRGSCGSHHNTPNLAAKNVFPPPSQTWARRHKRETLKATKYVELVIVADNREFQRQGKDLEKVKQRLIEIANHVDKFYRPLNIRIVLVGVEVWNDMDKCSVSQDPFT

SEQ ID NO: 107312 - DNA, 837 bp, Artificial Sequence
  derived and/or modified sequence
atggcagcccgccccctcccagtgagtcccgcaagagctctgttattagctctcgcaggcgctttgttagcaccttgtgaggctagaggagtctcattatggaaccagggtcgagccgacgaagtggtttctgcgtccgtgggatcaggtgatctgtggatcccagtgaaaagtttcgactctaaaaaccacccagaagtcctaaacatccggctgcaaagagaatcaaaggagttaattattaacttagagcggaatgagggactcatagcctcctcgtttaccgagactcactatcttcaggacgggaccgacgtgtctcttgcgcgcaactatacggggcattgctactatcacggacacgtgaggggctacagcgactcggctgtgtctctctctacctgttcaggtcttcgaggcctcattgtgttcgaaaacgagtcttatgtgcttgaacccatgaagtcagccacgaatcgttataagcttttccctgctaagaaattgaagtctgttagaggctcatgcggatcccaccataacactccaaacctagctgctaagaatgttttccctcccccgagtcagacctgggcacgaaggcataaaagagagacgctcaaggccacaaagtatgtggagctcgttatcgtcgccgataaccgagagttccagcggcaaggaaaggacctggaaaaagtcaagcagcgcttaattgagattgccaaccatgtggacaagttctatagacctctgaacataaggatagtcctggtgggcgtggaagtctggaacgacatggataagtgttccgtctctcaggacccgttcacgtag

SEQ ID NO: 107313 - DNA, 837 bp, Artificial Sequence
  derived and/or modified sequence
atggccgcccggcccctgcctgtgtccccagcccgggccctgctgctggccctggccggggccctgctggccccctgtgaggcccggggcgtgtccctgtggaaccagggccgggcagatgaggtggtgtctgcctctgtgggcagcggggacctgtggatccctgtgaagagctttgacagcaagaaccaccctgaggtgctgaacatccggctgcagcgggagagcaaggagctgatcatcaacctggagagaaatgaaggcctcatcgccagcagcttcacagagacccactacctgcaggacggcacagatgtgtccctggccaggaactacacaggccactgctactaccacggccacgtgcggggctacagcgacagcgctgtgtccctgagcacctgcagcggcctgcggggcctcatcgtgtttgaaaatgaaagctatgtgctggagcccatgaagagcgccaccaaccgctacaagctgtttcctgccaagaagctgaagtctgtgcggggcagctgtggcagccaccacaacacccccaacctggccgccaagaatgtgttccccccacccagccagacctgggcccggcggcacaagcgggagaccctgaaggccaccaagtatgtggagctggtgattgtggccgacaaccgggagttccagaggcagggcaaggacctggagaaggtgaagcagaggctgattgaaattgccaaccacgtggacaagttctaccggcccctgaacatccgcatcgtgctggtgggcgtggaggtgtggaatgacatggacaagtgcagcgtgtcccaggaccccttcacctag

SEQ ID NO: 107314 - DNA, 837 bp, Artificial Sequence
  derived and/or modified sequence
atggccgcccggcccctgcccgtgagccccgcccgggccctgctgttggccttagcgggggccttgcttgccccctgtgaagcgaggggagtctccctgtggaaccagggtagagccgatgaagtggtgtctgcaagtgttgggtcaggagacctgtggataccagtcaaaagctttgactctaaaaaccatccggaagtgctgaacatccggttacagcgggaatcaaaggaactgatcatcaacctcgaacgcaatgagggtttaattgccagcagtttcactgaaacacactacctgcaggatggcacagatgtatcattggcacggaactatactgggcattgttactatcacgggcacgttagggggtactccgactcagctgtgagtctcagcacttgttctggcctgcgaggcctcatcgtctttgaaaacgagtcatatgttctggaacctatgaagtccgccacaaaccggtacaagctgttccctgccaagaaactgaagtccgtgcgcgggtcttgcgggagtcaccacaatacgccaaatctggccgctaaaaatgtctttcctccgcccagccaaacttgggcccgcagacacaaacgggaaaccctcaaggccactaagtatgtagagctcgtgatcgtcgccgataatcgggagtttcaaaggcagggaaaggatcttgagaaggtgaaacagagactgatagagatcgctaaccacgtggacaagttttaccgtccactgaatattaggattgtgttagtgggtgtagaggtgtggaacgacatggataaatgctctgtgtctcaggaccccttcacttag

SEQ ID NO: 107315 - DNA, 837 bp, Artificial Sequence
  derived and/or modified sequence
atggcagcccgtcctctgcctgtgagccccgctagagctctcctgttggcactggctggcgcattactcgctccatgtgaggcgcgtggtgtgagtctgtggaaccagggtcgggctgacgaggttgtgtcggcctcagtgggctccggcgatctctggattcctgttaagtccttcgactctaagaatcaccccgaggtcctgaatatccgcttacaacgcgaatctaaagagctgattatcaacctggagagaaacgagggcctgatcgctagttcattcacggaaacacactacttacaggacggtacagacgtctcactggcgaggaattacaccgggcactgctactaccacggccacgtgagaggctactctgacagcgccgtaagtctttctacttgttcaggtctccggggactgattgtgtttgaaaatgaatcttacgtccttgagccaatgaagagcgccactaataggtacaaattgttcccagccaaaaaacttaagagcgttcgagggtcttgtggatctcaccacaacacacctaacttggccgctaagaatgtatttccccctccctcgcaaacttgggcaagacgacacaagagggagacactgaaagctactaagtatgtggagttggtgattgtggccgataacagggaattccaacggcaaggcaaggatcttgaaaaagtgaagcagcggctgatcgaaattgctaaccatgtcgacaaattttatagaccactgaacattcgaatagtgctcgtaggagttgaggtgtggaacgacatggataagtgctcagtttcgcaggaccccttcacctag

SEQ ID NO: 107316 - DNA, 837 bp, Artificial Sequence
  derived and/or modified sequence
atggccgccagacccctgcccgtgagccccgccagagccctgctgctggccctggccggcgccctgctggccccctgcgaggccagaggcgtgagcctgtggaaccagggcagagccgacgaggtggtgagcgccagcgtgggcagcggcgacctgtggatccccgtgaagagcttcgacagcaagaaccaccccgaggtgctgaacatcagactgcagagagagagcaaggagctgatcatcaacctggagagaaacgagggcctgatcgccagcagcttcaccgagacccactacctgcaggacggcaccgacgtgagcctggccagaaactacaccggccactgctactaccacggccacgtgagaggctacagcgacagcgccgtgagcctgagcacctgcagcggcctgagaggcctgatcgtgttcgagaacgagagctacgtgctggagcccatgaagagcgccaccaacagatacaagctgttccccgccaagaagctgaagagcgtgagaggcagctgcggcagccaccacaacacccccaacctggccgccaagaacgtgttccccccccccagccagacctgggccagaagacacaagagagagaccctgaaggccaccaagtacgtggagctggtgatcgtggccgacaacagagagttccagagacagggcaaggacctggagaaggtgaagcagagactgatcgagatcgccaaccacgtggacaagttctacagacccctgaacatcagaatcgtgctggtgggcgtggaggtgtggaacgacatggacaagtgcagcgtgagccaggaccccttcacctag

SEQ ID NO: 107317 - DNA, 1145 bp, Artificial Sequence
  derived and/or modified sequence
cactaacgctcttcctagtccccgggccaactcggacagtttgctcatttattgcaacggtcaaggctggcttgtgccagaacggcgcgcgcgcgcgcacgcacgcacacacacggggggaaacttttttaaaaatgaaaggctagaagagctcagcggcggcgcgggcgctgcgcgagggctccggagctgactcgccgaggcaggaaatccctccggtcgcgacgcccggccccggctcggcgcccgcgtgggatggtgcagcgctcgccgccgggcccgagagctgctgcactgaaggccggcgacgatggcagcgcgcccgctgcccgtgtcccccgcccgcgccctcctgctcgccctggccggtgctctgctcgcgccctgcgaggcccgaggggtgagcttatggaaccaaggaagagctgatgaagttgtcagtgcctctgttgggagtggggacctctggatcccagtgaagagcttcgactccaagaatcatccagaagtgctgaatattcgactacaacgggaaagcaaagaactgatcataaatctggaaagaaatgaaggtctcattgccagcagtttcacggaaacccactatctgcaagacggtactgatgtctccctcgctcgaaattacacgggtcactgttactaccatggacatgtacggggatattctgattcagcagtcagtctcagcacgtgttctggtctcaggggacttattgtgtttgaaaatgaaagctatgtcttagaaccaatgaaaagtgcaaccaacagatacaaactcttcccagcgaagaagctgaaaagcgtccggggatcatgtggatcacatcacaacacaccaaacctcgctgcaaagaatgtgtttccaccaccctctcagacatgggcaagaaggcataaaagagagaccctcaaggcaactaagtatgtggagctggtgatcgtggcagacaaccgagagtttcagaggcaaggaaaagatctggaaaaagttaagcagcgattaatagagattgctaatcacgttgacaagttttacagaccactgaacattcggatcgtgttggtaggcgtggaagtgtggaatgacatggacaaatgctctgtaagtcaggacccattcacca

SEQ ID NO: 107318 - protein, 609 aa, Artificial Sequence
  derived and/or modified sequence
MSGWESYYKTEGDEEAEEEQEENLEASGDYKYSGRDSLIFLVDASKAMFESQSEDELTPFDMSIQCIQSVYISKIISSDRDLLAVVFYGTEKDKNSVNFKNIYVLQELDNPGAKRILELDQFKGQQGQKRFQDMMGHGSDYSLSEVLWVCANLFSDVQFKMSHKRIMLFTNEDNPHGNDSAKASRARTKAGDLRDTGIFLDLMHLKKPGGFDISLFYRDIISIAEDEDLRVHFEESSKLEDLLRKVRAKETRKRALSRLKLKLNKDIVISVGIYNLVQKALKPPPIKLYRETNEPVKTKTRTFNTSTGGLLLPSDTKRSQIYGSRQIILEKEETEELKRFDDPGLMLMGFKPLVLLKKHHYLRPSLFVYPEESLVIGSSTLFSALLIKCLEKEVAALCRYTPRRNIPPYFVALVPQEEELDDQKIQVTPPGFQLVFLPFADDKRKMPFTEKIMATPEQVGKMKAIVEKLRFTYRSDSFENPVLQQHFRNLEALALDLMEPEQAVDLTLPKVEAMNKRLGSLVDEFKELVYPPDYNPEGKVTKRKHDNEGSGSKRPKVEYSEEELKTHISKGTLGKFTVPMLKEACRAYGLKSGLKKQELLEALTKHFQD

SEQ ID NO: 107319 - protein, 557 aa, Artificial Sequence
  derived and/or modified sequence
MSGWESYYKTEGDEEAEEEQEENLEASGDYKYSGRDSLIFLVDASKAMFESQSEDELTPFDMSIQCIQSVYISKIISSDRDLLAVVFYGTEKDKNSVNFKNIYVLQELDNPGAKRILELDQFKGQQGQKRFQDMMGHGSDYSLSEVLWVCANLFSDVQFKMSHKRIMLFTNEDNPHGNDSAKASRARTKAGDLRDTGIFLDLMHLKKPGGFDISLFYRDIISIAEDEDLRVHFEESSKLEDLLRKVRAKETRKRALSRLKLKLNKDIVISVGIYNLVQKALKPPPIKLYRETNEPVKTKTRTFNTSTGGLLLPSDTKRSQIYGSRQIILEKEETEELKRFDDPGLMLMGFKPLVLLKKHHYLRPSLFVYPEESLVIGSSTLFSALLIKCLEKEVAALCRYTPRRNIPPYFVALVPQEEELDDQKIQVTPPGFQLVFLPFADDKRKMPFTEKIMATPEQVGKMKAIVEKLRFTYRSDSFENPVLQQHFRNLEALALDLMEPEQAVDLTLPKVEAMNKRLGSLVDEFKELVYPPDYNPEGKVTKRKHAKGPRWSIQKRS

SEQ ID NO: 107320 - protein, 476 aa, Artificial Sequence [sequence omitted]

SEQ ID NO: 107321 - DNA, 1830 bp, Artificial Sequence
  derived and/or modified sequence
atgagcggctgggagagctactacaagaccgagggcgacgaggaggccgaggaggagcaggaggagaacctggaggccagcggcgactacaagtacagcggcagagacagcctgatcttcctggtggacgccagcaaggccatgttcgagagccagagcgaggacgagctgacccccttcgacatgagcatccagtgcatccagagcgtgtacatcagcaagatcatcagcagcgacagagacctgctggccgtggtgttctacggcaccgagaaggacaagaacagcgtgaacttcaagaacatctacgtgctgcaggagctggacaaccccggcgccaagagaatcctggagctggaccagttcaagggccagcagggccagaagagattccaggacatgatgggccacggcagcgactacagcctgagcgaggtgctgtgggtgtgcgccaacctgttcagcgacgtgcagttcaagatgagccacaagagaatcatgctgttcaccaacgaggacaacccccacggcaacgacagcgccaaggccagcagagccagaaccaaggccggcgacctgagagacaccggcatcttcctggacctgatgcacctgaagaagcccggcggcttcgacatcagcctgttctacagagacatcatcagcatcgccgaggacgaggacctgagagtgcacttcgaggagagcagcaagctggaggacctgctgagaaaggtgagagccaaggagaccagaaagagagccctgagcagactgaagctgaagctgaacaaggacatcgtgatcagcgtgggcatctacaacctggtgcagaaggccctgaagcccccccccatcaagctgtacagagagaccaacgagcccgtgaagaccaagaccagaaccttcaacaccagcaccggcggcctgctgctgcccagcgacaccaagagaagccagatctacggcagcagacagatcatcctggagaaggaggagaccgaggagctgaagagattcgacgaccccggcctgatgctgatgggcttcaagcccctggtgctgctgaagaagcaccactacctgagacccagcctgttcgtgtaccccgaggagagcctggtgatcggcagcagcaccctgttcagcgccctgctgatcaagtgcctggagaaggaggtggccgccctgtgcagatacacccccagaagaaacatccccccctacttcgtggccctggtgccccaggaggaggagctggacgaccagaagatccaggtgaccccccccggcttccagctggtgttcctgcccttcgccgacgacaagagaaagatgcccttcaccgagaagatcatggccacccccgagcaggtgggcaagatgaaggccatcgtggagaagctgagattcacctacagaagcgacagcttcgagaaccccgtgctgcagcagcacttcagaaacctggaggccctggccctggacctgatggagcccgagcaggccgtggacctgaccctgcccaaggtggaggccatgaacaagagactgggcagcctggtggacgagttcaaggagctggtgtacccccccgactacaaccccgagggcaaggtgaccaagagaaagcacgacaacgagggcagcggcagcaagagacccaaggtggagtacagcgaggaggagctgaagacccacatcagcaagggcaccctgggcaagttcaccgtgcccatgctgaaggaggcctgcagagcctacggcctgaagagcggcctgaagaagcaggagctgctggaggccctgaccaagcacttccaggactag

SEQ ID NO: 107322 - DNA, 1674 bp, Artificial Sequence
  derived and/or modified sequence
atgagcggctgggagagctactacaagaccgagggcgacgaggaggccgaggaggagcaggaggagaacctggaggccagcggcgactacaagtacagcggcagagacagcctgatcttcctggtggacgccagcaaggccatgttcgagagccagagcgaggacgagctgacccccttcgacatgagcatccagtgcatccagagcgtgtacatcagcaagatcatcagcagcgacagagacctgctggccgtggtgttctacggcaccgagaaggacaagaacagcgtgaacttcaagaacatctacgtgctgcaggagctggacaaccccggcgccaagagaatcctggagctggaccagttcaagggccagcagggccagaagagattccaggacatgatgggccacggcagcgactacagcctgagcgaggtgctgtgggtgtgcgccaacctgttcagcgacgtgcagttcaagatgagccacaagagaatcatgctgttcaccaacgaggacaacccccacggcaacgacagcgccaaggccagcagagccagaaccaaggccggcgacctgagagacaccggcatcttcctggacctgatgcacctgaagaagcccggcggcttcgacatcagcctgttctacagagacatcatcagcatcgccgaggacgaggacctgagagtgcacttcgaggagagcagcaagctggaggacctgctgagaaaggtgagagccaaggagaccagaaagagagccctgagcagactgaagctgaagctgaacaaggacatcgtgatcagcgtgggcatctacaacctggtgcagaaggccctgaagcccccccccatcaagctgtacagagagaccaacgagcccgtgaagaccaagaccagaaccttcaacaccagcaccggcggcctgctgctgcccagcgacaccaagagaagccagatctacggcagcagacagatcatcctggagaaggaggagaccgaggagctgaagagattcgacgaccccggcctgatgctgatgggcttcaagcccctggtgctgctgaagaagcaccactacctgagacccagcctgttcgtgtaccccgaggagagcctggtgatcggcagcagcaccctgttcagcgccctgctgatcaagtgcctggagaaggaggtggccgccctgtgcagatacacccccagaagaaacatccccccctacttcgtggccctggtgccccaggaggaggagctggacgaccagaagatccaggtgaccccccccggcttccagctggtgttcctgcccttcgccgacgacaagagaaagatgcccttcaccgagaagatcatggccacccccgagcaggtgggcaagatgaaggccatcgtggagaagctgagattcacctacagaagcgacagcttcgagaaccccgtgctgcagcagcacttcagaaacctggaggccctggccctggacctgatggagcccgagcaggccgtggacctgaccctgcccaaggtggaggccatgaacaagagactgggcagcctggtggacgagttcaaggagctggtgtacccccccgactacaaccccgagggcaaggtgaccaagagaaagcacgccaagggccccagatggagcatccagaagagaagctag

SEQ ID NO: 107323 - DNA, 1830 bp, Artificial Sequence
  derived and/or modified sequence
atgtcaggttgggaatcctattataagactgaaggggatgaggaggccgaggaggaacaggaagagaatctggaagccagcggagactacaaatattcaggtcgagactcattaattttcctggtggacgcttctaaggccatgtttgagagccagtcagaggatgagctgactccctttgacatgtcaattcaatgtattcagtccgtgtacatcagtaaaataatttccagcgatagagacttgctggccgtggtcttttacggcactgaaaaggacaagaattctgtcaattttaagaacatttacgtgctgcaggagctcgacaacccgggagccaaaagaatcctggagctcgaccaattcaaaggacaacagggacaaaaacgctttcaggatatgatgggccatggcagtgactatagcctgtctgaagtgctgtgggtatgtgccaacctctttagtgatgtccagtttaaaatgtcccataaacggattatgctgttcacgaacgaggataacccccatgggaacgactcagctaaagcatcccgggctaggacaaaagccggcgacttacgtgacaccgggatcttccttgacctgatgcatctgaagaaacctggtgggtttgacatcagcttgttttatcgggacatcatatcaattgcagaggatgaagacctgcgagtacattttgaagaatctagcaagctggaggatctgttgaggaaggtacgggccaaagagacccgaaaaagagccctgtcacgactgaaactgaaactaaacaaagatatcgtcatcagtgtcggcatttacaaccttgtccagaaggctctaaaaccaccacctatcaaattgtaccgagagacgaatgagcccgtaaagactaaaacaaggactttcaatacatctacaggggggcttctcctccctagcgacaccaaaaggtcccagatttacggttcaaggcagattattctagagaaggaagaaactgaggaactgaaacgatttgacgaccctggactgatgctaatgggctttaagccccttgtcttgttgaaaaagcaccattaccttaggccatccctttttgtgtatcctgaggagtctctcgtcattggctccagcaccttattttctgcccttctaatcaagtgccttgaaaaggaagtggcagcactgtgtcgttacactccaagacgaaacatccccccctactttgttgccttagtgccgcaggaagaggagctagacgaccaaaaaatccaggtgactcccccgggcttccagctcgtttttctgccctttgctgatgacaagcggaaaatgccatttactgagaaaatcatggctacccctgaacaggtcggcaaaatgaaggcaatagtggagaagctgagatttacctaccggagcgacagctttgaaaatccagtgttgcagcaacacttcagaaaccttgaggctcttgccttagatctgatggagcctgagcaagctgtggacctcactctgcctaaagtagaagccatgaataagcgcctcgggtcattggttgacgagttcaaggagctggtgtatcccccagattataacccggagggtaaagtgacaaagcggaagcacgacaacgaaggctccggtagcaagcggccgaaggtcgaatatagcgaagaagagcttaagacccacataagcaagggtacgctggggaagtttaccgtgccgatgctgaaggaggcatgtagagcatacgggctgaaatccggactgaaaaaacaagaacttctggaggcactgacaaagcacttccaggattag

SEQ ID NO: 107324 - DNA, 1830 bp, Artificial Sequence
  derived and/or modified sequence
atgtcagggtgggagtcctactataaaaccgagggagatgaagaggccgaagaagagcaggaggaaaacctggaggcatccggcgactataaatattccggccgtgacagcctgattttcctggttgacgcttccaaagcaatgttcgaatctcaatccgaagatgaactcaccccttttgatatgtccatccagtgtattcaaagcgtatacatcagcaaaatcatctcttcagatagagacctgctggctgtagtgttttacggaactgagaaggacaagaactctgtcaatttcaaaaatatctatgttttgcaggaactcgataacccaggtgctaaacggattctggaactggatcagttcaaaggacagcaggggcaaaagagatttcaggatatgatgggccacggtagtgattatagcctgagcgaagtcctgtgggtgtgtgctaatctattcagtgatgtgcagtttaagatgtctcacaagagaatcatgctttttaccaatgaggacaatcctcacggtaacgattccgcaaaagctagtagggccaggaccaaggctggcgacctccgtgatacaggcatctttctcgacctaatgcacctgaagaaaccaggtgggttcgatatctcactgttctatcgagacatcattagtatcgcagaggacgaggacctgagggtccacttcgaggaaagttctaagctcgaagatcttttgaggaaggtgcgcgccaaggagaccaggaagcgcgctctcagtcgtctgaagctcaagcttaacaaggacatcgtcatctcagttggcatctataacttggtgcagaaggccttgaaacctcctcctattaagttatatagagaaacgaatgagcccgtgaagaccaagacacggacattcaacacgtctaccgggggtctattgctcccgagcgacactaaaagaagtcagatttacgggagccggcagatcatcctggaaaaggaggagacagaggagctaaagcgctttgatgatcccggtcttatgctgatggggtttaagcctctggtcttactcaaaaaacatcactatcttagaccaagtctctttgtataccccgaggagtctctggttatcggctcctctacgctctttagcgcactcctaattaagtgtctcgagaaggaggttgcggctctttgcagatacacccctcgtagaaatattcctccgtacttcgtggccctcgtgccccaagaagaggagttagacgaccagaaaatccaggttacacctcctggattccagcttgtatttctccccttcgctgacgataagaggaagatgccctttacagagaagatcatggccacccccgagcaggtcggaaagatgaaagctatcgtggaaaagcttcgttttacatatcgttcagatagttttgaaaaccctgtgctacagcagcattttaggaatctggaagccctagctctcgacctgatggaacctgaacaggccgtagacctgaccctgccgaaagtagaggccatgaacaagcggctaggctccctggtggacgaatttaaggaattagtttacccacccgactacaacccggaaggaaaggttaccaaacggaaacacgacaacgagggcagcggcagtaagaggccaaaagtcgagtattccgaggaagaattgaagacccatatctccaagggtacccttggcaaatttaccgtgccaatgctcaaagaggcttgtcgagcttacggactgaaaagtggtctgaagaagcaggaactccttgaggcccttaccaaacactttcaggactag

SEQ ID NO: 107325 - DNA, 1674 bp, Artificial Sequence
  derived and/or modified sequence
atgagtggctgggaatcttactacaaaactgagggcgacgaagaagcagaggaggaacaggaggaaaatcttgaagcaagtggtgactacaagtatagcggccgggacagcctcatctttcttgtcgatgctagtaaggctatgttcgaatcacaatccgaagatgagctgacccctttcgatatgtccattcaatgtattcagtcggtgtatatttccaaaatcataagttcggacagggacctgctggccgttgtcttttatggcactgagaaggacaaaaattccgtgaattttaaaaacatctacgtcttgcaagaacttgacaatccaggggctaaaaggattctggagctcgatcagttcaaggggcaacagggccaaaagaggtttcaggatatgatgggccatggaagcgactacagtcttagcgaagtgctgtgggtgtgcgccaatctgttttctgatgtgcagttcaaaatgtcccacaagagaataatgttgtttacgaatgaggataacccccatggtaacgattccgccaaagcttccagggctcggacaaaggcgggcgatctgcgggatactggcatctttttggacctcatgcacctcaagaaaccgggaggcttcgatatttcgctgttttaccgagacattatcagcatagctgaagatgaggaccttcgtgttcactttgaggaaagcagcaaactcgaggatctgcttagaaaggtacgcgccaaagagacccgcaaacgggccctcagccggctaaaactcaaactgaacaaggatatcgtcatctcagtgggcatttacaacctggtccaaaaggctctgaaacccccaccaatcaaactgtatagagaaacgaacgagccagttaagacaaagactcgaaccttcaacacctctacaggggggttgctactgccatccgatactaagcggtcacagatttacggaagtagacagatcatactggagaaggaagaaacagaagagttgaaacggtttgacgatccagggcttatgcttatgggattcaagcctttagtcctgcttaaaaagcaccactatctaaggccttcactattcgtctatcccgaggagagcctggtcattggatctagtaccttgttcagtgctcttctgatcaagtgccttgagaaagaagtggccgccctgtgtaggtatacccctagaagaaacattccgccgtacttcgtcgctttggtgccacaggaggaggaattggacgaccagaagatccaagttactccacctgggtttcagctggtttttctccccttcgctgacgacaagcgcaagatgccttttactgagaagatcatggccacaccagagcaggtggggaagatgaaggccatcgtggagaagctccgcttcacctatagaagtgactccttcgagaatcctgtcctgcagcaacacttcaggaatctagaagcgctggcgctggatttgatggagcctgaacaggccgtggacctgactctgccaaaggtagaggctatgaacaaaaggcttggttctctggttgacgaatttaaggagctcgtgtatcccccagactacaacccagagggaaaggtgactaagcgtaaacatgctaagggtcctaggtggagtatccaaaagaggagttag

SEQ ID NO: 107326 - DNA, 1830 bp, Artificial Sequence
  derived and/or modified sequence
atgtcaggctgggagagttattacaaaactgaaggtgatgaggaagccgaagaggagcaagaggagaatctcgaagcctccggcgattataaatattcaggccgagactcgctcatattcctcgtggatgcaagcaaagccatgtttgaatcacaatctgaggacgagctgacccccttcgatatgagcatacagtgcattcagagcgtctatatcagcaagattatctcctctgatagggatctactggctgttgtcttctatggaacagagaaagataaaaacagcgttaatttcaagaacatctatgtcctgcaagagctcgacaacccaggcgctaaacggattctggagctggaccaatttaaagggcagcagggccagaagcgttttcaggacatgatgggacacggctcagactatagtctgagtgaggtcttgtgggtgtgcgccaaccttttcagcgatgttcagttcaagatgtcacataaaagaatcatgttgttcacgaacgaagacaacccgcacgggaatgactcagctaaggcatcccgggctaggacgaaggctggcgacctgagggacacagggatcttcctggatttgatgcaccttaaaaagcctggagggttcgacatctccttgttttatagggacatcatctctatcgctgaggacgaggacctgcgggtgcattttgaagagtcgagcaagctcgaagatctgctgagaaaagttagagcgaaggagacaagaaagagagctctcagccggcttaagctgaagttgaataaggacattgtcatctcggtgggcatctacaacctggtgcagaaggctctcaagcccccgcccattaagctgtatcgagagactaacgagcccgttaaaaccaaaacccgcactttcaacacctctactggaggtctcctcctcccgagtgacacaaaaaggagccagatttacggctcaagacaaattattctggaaaaggaagaaaccgaagaactgaaacgattcgatgatcctgggctgatgctgatgggtttcaaaccgctggtgttgttgaagaagcaccattacctgaggcctagtctgttcgtctatcccgaggaaagcttggtgataggcagctccacgctgtttagcgccctgttgatcaagtgtctggagaaagaagtcgcggcactttgccgctatacgccccggcgcaacatccccccttactttgtggccttggtgccacaggaggaagagctggatgaccaaaaaattcaggtgactccacccggctttcaactcgtgttcctcccctttgccgatgataagaggaaaatgccattcactgaaaagatcatggcaacccctgagcaggttggtaagatgaaggccatcgtggaaaagctccgcttcacatatcgatctgacagttttgaaaaccccgtactccaacagcacttccgcaatctcgaggcactagctctagaccttatggaacctgagcaggctgtagacctcacacttcctaaggtagaagctatgaataagaggttaggctcactcgtggacgaattcaaagagctggtgtatccccccgactacaatcccgagggcaaggttactaagcgcaaacatgataacgaagggagtggatccaagaggcctaaggtggagtactccgaagaagagctgaagactcacatctctaaaggcacacttggaaaattcaccgtccccatgctgaaagaggcctgccgggcttatgggttgaaaagtggcctgaagaagcaggagctactcgaagctctcactaaacatttccaggactag

SEQ ID NO: 107327 - DNA, 1830 bp, Artificial Sequence
  derived and/or modified sequence
atgagcggctgggagagctactacaagacagaaggagatgaggaggccgaggaggagcaggaggagaacctggaggccagcggggactacaagtacagcggccgggacagcctcatcttcctggtggatgccagcaaggccatgtttgagagccagagtgaagatgagctgaccccatttgacatgagcatccagtgcatccagagcgtgtacatcagcaagatcatcagcagtgaccgggacctgctggccgtggtgttctacggcacagagaaggacaagaacagcgtgaacttcaagaacatctacgtgctgcaggagctggacaaccctggggccaagaggatcctggagctggaccagttcaagggccagcagggccagaagcgcttccaggacatgatgggccacggcagtgactacagcctgtctgaggtgctgtgggtgtgtgccaacctcttcagtgatgtgcagttcaagatgagccacaagaggatcatgctgttcaccaatgaagacaacccccacggcaatgacagcgccaaggccagccgggcccggaccaaggccggggacctgcgggacaccggcatcttcctggacctgatgcacctgaagaagccaggcggctttgacatcagcctcttctacagagacatcatcagcattgctgaagatgaggacctgcgggtgcactttgaggagagcagcaagctggaggacctgctgaggaaggtgcgggccaaggagaccaggaagagggccctgagccggctgaagctgaagctgaacaaggacatcgtcatctctgtgggcatctacaacctggtgcagaaggccctgaagcccccacccatcaagctgtaccgggagaccaatgaacctgtgaagaccaagaccaggaccttcaacaccagcactggaggcctgctgctgcccagcgacaccaagaggagccagatctacggcagccggcagatcatcctggagaaggaggagacagaggagctgaagagatttgatgatcctggcctgatgctgatgggcttcaagcccctggtgctgctgaagaagcaccactacctgcggcccagcctgtttgtgtacccagaggagagcctggtgattggcagcagcaccctcttcagcgccctgctgatcaagtgcctggagaaggaggtggccgccctgtgccgctacaccccaagaagaaacatccccccctactttgtggccctggtgccccaggaggaggagctggatgaccagaagatccaggtgaccccacctggcttccagctggtgttcctgccctttgctgatgacaagaggaagatgcccttcacagagaagatcatggccaccccagagcaggtgggcaagatgaaggccatcgtggagaagctgcgcttcacctacagaagtgacagctttgaaaatcctgtgctgcagcagcacttcaggaacctggaggccctggccctggacctgatggagcctgagcaggccgtggacctgaccctgcccaaggtggaggccatgaacaagaggctgggcagcctggtggatgagttcaaggagctggtgtaccccccagactacaaccctgagggcaaggtgaccaagaggaagcatgacaatgaaggcagcggcagcaagaggcccaaggtggagtacagcgaggaggagctgaagacccacatcagcaagggcaccctgggcaagttcaccgtgcccatgctgaaggaggcctgccgggcctacggcctgaagagcggcctgaagaagcaggagctgctggaggccctgaccaagcacttccaggactag

SEQ ID NO: 107328 - DNA, 1674 bp, Artificial Sequence
  derived and/or modified sequence
atgagcggctgggagagctactacaagacagaaggagatgaggaggccgaggaggagcaggaggagaacctggaggccagcggggactacaagtacagcggccgggacagcctcatcttcctggtggatgccagcaaggccatgtttgagagccagagtgaagatgagctgaccccatttgacatgagcatccagtgcatccagagcgtgtacatcagcaagatcatcagcagtgaccgggacctgctggccgtggtgttctacggcacagagaaggacaagaacagcgtgaacttcaagaacatctacgtgctgcaggagctggacaaccctggggccaagaggatcctggagctggaccagttcaagggccagcagggccagaagcgcttccaggacatgatgggccacggcagtgactacagcctgtctgaggtgctgtgggtgtgtgccaacctcttcagtgatgtgcagttcaagatgagccacaagaggatcatgctgttcaccaatgaagacaacccccacggcaatgacagcgccaaggccagccgggcccggaccaaggccggggacctgcgggacaccggcatcttcctggacctgatgcacctgaagaagccaggcggctttgacatcagcctcttctacagagacatcatcagcattgctgaagatgaggacctgcgggtgcactttgaggagagcagcaagctggaggacctgctgaggaaggtgcgggccaaggagaccaggaagagggccctgagccggctgaagctgaagctgaacaaggacatcgtcatctctgtgggcatctacaacctggtgcagaaggccctgaagcccccacccatcaagctgtaccgggagaccaatgaacctgtgaagaccaagaccaggaccttcaacaccagcactggaggcctgctgctgcccagcgacaccaagaggagccagatctacggcagccggcagatcatcctggagaaggaggagacagaggagctgaagagatttgatgatcctggcctgatgctgatgggcttcaagcccctggtgctgctgaagaagcaccactacctgcggcccagcctgtttgtgtacccagaggagagcctggtgattggcagcagcaccctcttcagcgccctgctgatcaagtgcctggagaaggaggtggccgccctgtgccgctacaccccaagaagaaacatccccccctactttgtggccctggtgccccaggaggaggagctggatgaccagaagatccaggtgaccccacctggcttccagctggtgttcctgccctttgctgatgacaagaggaagatgcccttcacagagaagatcatggccaccccagagcaggtgggcaagatgaaggccatcgtggagaagctgcgcttcacctacagaagtgacagctttgaaaatcctgtgctgcagcagcacttcaggaacctggaggccctggccctggacctgatggagcctgagcaggccgtggacctgaccctgcccaaggtggaggccatgaacaagaggctgggcagcctggtggatgagttcaaggagctggtgtaccccccagactacaaccctgagggcaaggtgaccaagaggaagcacgccaagggcccccgctggagcatccagaagaggagctag

SEQ ID NO: 107329 - DNA, 1830 bp, Artificial Sequence
  derived and/or modified sequence
atgagcggctgggagagctactacaagaccgagggcgacgaggaggcagaagaggagcaggaagaaaatctggaagcatccggggattacaaatattctggacgggattccctcatttttctcgtggacgctagcaaggccatgttcgagtcacagagtgaagacgagctcactcctttcgatatgagcattcaatgtatccagagtgtgtatatctccaagattatatcaagtgatagggatcttctcgctgttgtgttttacggcacagagaaagataagaacagtgtgaattttaagaatatttacgtgctgcaggaactggacaacccaggcgccaaacggatcttggaattggaccagttcaagggccagcaggggcagaaaaggtttcaggatatgatgggccacggaagtgattatagcctctccgaggtgctgtgggtctgtgcgaacctcttctctgatgtccagttcaaaatgagccacaagagaatcatgttgtttacaaacgaagataatccccatggcaacgactccgccaaagcctctagggccaggacaaaagccggagacctgagggacacgggcatttttttggacctgatgcacctcaaaaagcccgggggatttgacatcagcctgttctaccgcgacattatttcaatcgcggaggatgaggatttgagggtgcattttgaggagagcagtaaactcgaagacctgctgaggaaggtgagagcaaaggagaccagaaagagggccctgtctaggctgaaactgaagttgaataaggacattgtaatatctgtcggtatctacaaccttgtccagaaggctctaaaacctcctccaatcaaactctaccgggaaacaaacgaacctgtcaagaccaaaactcgaaccttcaacacctcaaccggaggactactgttgcccagcgatacaaaacgctcccaaatctacgggtctcggcagatcatcctggaaaaagaggaaacggaagaactcaagcgtttcgacgaccccggactgatgctaatgggattcaagcctctcgtgttgctgaaaaaacaccactacctgcgccctagcctattcgtgtacccagaggaaagtctcgtcattggctcaagcaccctgttttccgccttactgatcaaatgtcttgaaaaggaggtggccgcgttgtgccgctatactcctaggagaaatatccccccgtattttgtcgccctggtgcctcaggaggaagaattggatgatcagaagatccaggtcacacccccgggtttccagctcgtgttcctaccctttgccgatgacaagagaaaaatgccatttactgaaaaaataatggcaacccccgaacaggtcgggaagatgaaagctatcgtggagaagctcaggtttacttaccggtctgatagcttcgagaaccctgtgctgcagcagcactttaggaaccttgaagcactggcactggacttgatggaaccagaacaggcggtggatctgacccttcccaaagtggaagccatgaataaaaggctgggcagtctagtagacgagttcaaggagctggtttacccgccagactacaaccccgaaggcaaggtaacgaagcggaagcacgataacgaaggctccggcagcaagagacctaaggtggagtacagtgaagaagagctcaaaacacacatctccaaaggtacactggggaaatttacggtcccaatgctgaaggaggcatgtagggcctatggactgaaaagcggtctgaaaaagcaggagctgttagaggctttaactaaacactttcaggactag

SEQ ID NO: 107330 - DNA, 1830 bp, Artificial Sequence
  derived and/or modified sequence
atgagcggctgggagagctactacaagaccgagggcgacgaggaggctgaagaggagcaggaggagaacctggaggcctccggcgactacaagtatagtggtcgcgattccttgatctttttggtggatgcttcgaaagccatgttcgaatcccagtcagaagacgagctgacaccgttcgacatgagtattcaatgtatacagagcgtttacattagcaaaattataagctcggatcgcgatcttctggccgtcgtgttttatggaactgagaaagacaagaactcagtgaactttaaaaatatttacgttctgcaggaactggataacccaggcgccaagagaatacttgagctcgatcagtttaaggggcaacagggccagaaaagatttcaggacatgatgggtcacggttcagactattctctgagcgaggtcctttgggtttgtgcaaatctgttctcagacgttcagtttaaaatgtcccacaagcgcataatgctgtttaccaatgaagataatcctcacggaaatgatagcgcaaaggcctctcgggctagaactaaggccggcgacttgagggataccgggatcttccttgaccttatgcaccttaagaagcctggcgggtttgatatcagcctattctacagggatatcatatcaattgccgaagatgaagatcttcgcgtgcatttcgaggagtcatctaagttagaggacctgctgcggaaagtacgcgcaaaagagacccgcaagcgcgccttaagtcgactgaaacttaagcttaataaggacattgtgatatctgttggaatctacaatctcgtgcagaaagctttgaaaccccccccaattaaactctatagggagactaatgagcccgtcaaaacgaaaactaggaccttcaatacctcgacgggcggacttctccttccatctgatacaaagaggagccagatttacggaagcagacaaataatactggagaaggaggaaacagaggagctcaaacgtttcgacgacccagggctgatgctgatgggtttcaagccactcgtcctcctcaagaaacatcattacttgagaccctcattgttcgtgtaccccgaggagagtctcgttataggaagcagcaccctgtttagcgccctcctcatcaaatgcctggagaaagaagtggccgcactgtgtagatatacccctaggcgcaatattccgccatactttgttgcactcgtgccgcaggaggaggagctggatgatcagaaaatacaagtgacaccacctggtttccagttggtgttcctcccctttgcagatgataagagaaagatgccgtttaccgagaagatcatggcaacaccagagcaggtaggcaagatgaaagccattgtggaaaagctgcggtttacctatagaagtgattcttttgaaaacccagtgctgcagcagcattttagaaatctggaggctctggcccttgatctaatggagcctgagcaggccgtcgacttgacactacccaaagtggaggccatgaataagagactcggatccctggtggacgagtttaaggagctcgtctatccaccagactacaatccagaaggtaaagtgacgaagcgaaagcatgacaacgagggatccggctctaagaggccaaaggtggagtattctgaggaggaacttaaaacccacattagtaagggtactctaggtaagttcacggtgccaatgctcaaagaggcttgtcgcgcctacggtctgaaatccggactcaagaaacaagagctgctagaggccttgacaaagcatttccaggactag

SEQ ID NO: 107331 - DNA, 1674 bp, Artificial Sequence
  derived and/or modified sequence
atgagcggctgggagagctactacaagaccgagggcgacgaggaggccgaggaagaacaggaagagaatctggaagcatccggggattacaagtactctggacgggactcactgatctttctggtggatgctagcaaggcaatgtttgagagccaaagcgaggacgagctgaccccctttgacatgtcaattcagtgtatacaaagtgtctacatctctaagattatttcttctgatagagacctgctggccgtggtgttctacggcaccgaaaaggataaaaactccgtcaacttcaaaaatatctacgtactgcaagagctcgataacccgggggccaaaagaatcctcgaactggaccagtttaaggggcaacagggccaaaagcgtttccaagacatgatgggccacgggtccgactacagtctctccgaggtcctgtgggtctgcgctaatctgttcagtgatgtgcagttcaaaatgagccacaagaggattatgctctttaccaacgaggataacccacacgggaacgatagcgctaaagcctcaagggctcgcactaaggcaggcgacctgcgcgatactggcatcttcctggatttaatgcatctaaagaagcccggcgggttcgatataagcctcttctaccgggacataatcagcatcgccgaggacgaggacctgcgggtgcatttcgaagagtctagtaagctagaagacttgctcaggaaagtgcgtgccaaagaaacgagaaaacgcgccctcagccgcctcaaactcaagttgaataaagacatagtaatctccgtcggcatttacaaccttgtccagaaggcgctgaaaccgccccccatcaagctgtatagagagacgaacgagcctgtgaaaactaagacacgcacatttaacacctcgaccgggggattgctgctgccatccgacactaagaggtcccagatctatggctcccgtcagatcatcctggagaaggaagaaactgaagagctcaaaagatttgatgacccaggccttatgcttatggggtttaaacctctcgtgctgcttaaaaagcaccactacctgcgaccttcactttttgtgtatcctgaagaatccctcgttataggctctagcacactcttttctgccctactgatcaaatgtctagaaaaggaggtcgctgcactatgccgttataccccccgccgcaatattcctccctacttcgtggccctggtcccacaggaagaggagctagacgaccagaagatccaagtcaccccacccggcttccagttggtgttccttcccttcgcagacgataagaggaaaatgcctttcaccgagaagatcatggctacacctgaacaggtcggcaagatgaaggcgattgtggaaaaattgaggtttacttatcgctcagatagttttgaaaatcctgtgttacaacagcactttcgtaatctcgaagccctcgccctggacctcatggaaccagaacaggctgtggacttaaccctcccaaaggtggaggcgatgaataaaagacttggatccttggtggacgagttcaaggaactggtttacccaccagactataaccctgagggtaaggtgaccaagcgaaagcacgctaaagggcctaggtggtcgatacaaaagcggtcgtag

SEQ ID NO: 107332 - DNA, 1830 bp, Artificial Sequence
  derived and/or modified sequence
atgagcggctgggagagctactacaagaccgagggcgacgaggaggctgaagaggagcaggaagagaaccttgaagcgtctggggactataaatatagcgggcgtgacagtctgatcttcctggtggatgctagcaaggccatgttcgagagccagagcgaggatgagctcactcctttcgatatgtctattcagtgtatccagtccgtgtatatttctaagatcatctcatcagacagggaccttctggccgtcgttttttatgggacggaaaaggataagaactcagtcaactttaagaacatatacgtgttgcaggagctggacaatcctggcgctaaacggattcttgagctggaccagtttaagggccagcagggacagaaacgattccaggatatgatgggacatggtagcgattacagcctgtctgaggtcctttgggtgtgcgcgaatttgttttccgacgtacagtttaaaatgagccataaacggatcatgctgtttaccaatgaggacaaccctcacgggaatgatagcgcgaaagcctcccgcgctcggaccaaggcaggtgatctcagagacactggtatcttcctggacctgatgcacttgaaaaaacctggtggattcgatatctccttgttctaccgggatatcatttctatagcagaagacgaagaccttagggtgcatttcgaagagagcagcaagctggaggacctcttgcgtaaagtgcgggccaaggaaacacggaagcgggccctgagcagactgaaacttaaattgaataaggacattgtgatctctgtagggatctacaatttagtccagaaggccttgaagccacctcctataaaactgtatagagaaacaaatgagccagttaagacaaagacgcgcactttcaacacatctaccggtggcttgttgctcccttctgatacaaagaggagccaaatttacggcagtcggcagatcattctggagaaggaagagactgaggaactcaaaagatttgacgaccctggactgatgctaatgggttttaagcctctggttctgttgaagaagcaccactacctgaggcctagcctattcgtttacccagaagagtctcttgtgatcggaagttcaacattgttctcagccctcctaattaagtgtctggaaaaagaagtcgccgccctctgccgatataccccgcggagaaacatacctccatacttcgtggctttagtaccacaggaagaggagcttgacgatcaaaagatacaggttactccgcccgggtttcagctggtcttcctcccatttgctgatgataaacgtaagatgccgttcaccgaaaaaatcatggctacacctgaacaggttggaaaaatgaaggccatcgtcgagaagctgagattcacatacagatcagacagcttcgagaatcctgttctgcagcagcacttccgaaatctcgaagccctggccctcgaccttatggaacctgagcaggctgtagatctgaccctgcctaaggtggaggctatgaacaaacgattgggctcgttggtcgacgagtttaaagaactagtatatcctcctgattacaatcccgagggaaaggtcacaaaacggaaacacgacaatgagggaagcggctcaaaaaggccaaaggtggagtatagtgaggaggaactcaagacccatatctccaagggaactttaggaaagttcacagttcccatgctcaaagaagcctgccgggcctacgggctcaagagtgggcttaagaaacaggaactcctcgaagctttgaccaaacacttccaagactag

SEQ ID NO: 107333 - DNA, 1830 bp, Artificial Sequence
  derived and/or modified sequence
atgtctggctgggagagctactacaaaacagagggtgatgaagaggcagaggaggagcaagaggaaaatttggaagcctctggggactataagtacagtggaagggacagccttattttcttagtggacgcatctaaggcaatgtttgagagccagtccgaagatgaattgacaccctttgacatgagcatccagtgtattcagagcgtatacattagcaagatcatctcatcagatcgtgaccttctcgctgtagtattctatggcacggagaaagataagaactcagttaattttaagaatatttatgtcctccaggagctggacaaccccggagccaagaggattctggaactcgatcagttcaaggggcagcagggacagaagcgctttcaagatatgatgggccacggatctgattatagtttatcggaggtgttgtgggtgtgcgccaacttgtttagcgacgtgcagttcaagatgtctcataaacgcattatgctgtttactaatgaggacaacccacatgggaatgattcagcaaaagcttcccgggcacgtactaaagctggcgatctcagagatacaggaatcttcctggacctgatgcacctgaaaaaacctggtggttttgacatctcactcttttacagggatataatttctattgctgaagacgaagatcttcgcgtgcacttcgaggagtcctccaaactggaggatctgctgagaaaggtgcgcgctaaggagacacgaaagcgggcattgagcaggctgaagctgaaactcaacaaggatatcgtgatttccgttggaatatataatctggtccagaaagccctaaagccgccacccatcaagctgtatcgggagaccaacgaacccgtgaagaccaagacacggacgttcaacactagtaccggaggactgctgttaccaagtgataccaagagaagtcagatctatggcagccgccagatcatcctggagaaagaagagactgaagagttgaagcgctttgacgatcccggattgatgctgatgggctttaagccgttggtgctcctgaaaaagcaccactacctgaggccgtcgctgtttgtgtatcctgaagagtcccttgtgataggctccagcactttgttttcagcactgctgatcaagtgtctcgagaaagaggtggctgcactgtgccggtacacgccgaggcgcaacatcccgccttacttcgtagctttagttccacaggaggaagaactcgatgatcaaaaaattcaggtgaccccacccggttttcaactggtcttcttgccgtttgcagacgacaagcggaaaatgccttttacagaaaagattatggctaccccagagcaggtgggcaaaatgaaagctatagtggaaaaactccgattcacctaccgcagcgatagctttgaaaacccagtgctccagcagcacttccgcaatctcgaagcattggcgctggatctgatggagccggaacaagccgttgacttgactcttccaaaagtggaagccatgaataagagattagggagtctagtggatgagttcaaagaacttgtctaccccccagattataatcctgaaggaaaggtgactaagagaaagcatgataatgaggggtcggggagcaaacggcctaaagtagagtactcggaggaggaactcaagacacatatttctaaagggacacttgggaaattcacagtgccaatgctcaaggaggcttgtcgcgcatatggacttaaaagcgggttgaagaaacaggagctcttagaggccctgactaaacatttccaggattag

SEQ ID NO: 107334 - DNA, 1830 bp, Artificial Sequence
  derived and/or modified sequence
atgtctggctgggagtcctactacaagacagaaggtgacgaggaggccgaagaagagcaggaagagaatttagaggcctcaggcgactacaagtattctgggagagactctctgatttttctagtggacgcatcaaaggcgatgtttgagtcccaaagtgaggacgagctcacaccgtttgacatgagtatccagtgcattcagtccgtctacatttctaagattatctcttctgatcgagacctgctggcagtggtcttttacgggaccgagaaagacaagaactctgtgaactttaagaatatctacgtcctgcaggaactggacaatcctggcgctaagcgtattttggagcttgaccaatttaagggccagcagggtcagaaacgtttccaggacatgatggggcatgggagcgactactcgttaagtgaggtcttatgggtgtgcgccaatctgttcagtgacgttcagttcaagatgtcgcacaagagaattatgttatttactaacgaagataacccgcatgggaatgattccgccaaggccagcagggctcggacaaaagctggcgatctgagagatacaggcatatttctcgatctgatgcatcttaaaaagccaggcggatttgacatcagtttgttctatagagatataatatccatcgcagaggacgaggatctaagggtccactttgaggagtcctcaaaactggaggatctgttacgcaaggtgcgggctaaagaaaccagaaagagggccttgtcaaggctgaagctcaaacttaataaggatattgttatctctgttggtatttacaacttagtccaaaaggccctgaagccccctcctattaagctttaccgggagactaatgagcctgtgaagaccaagacgcgaacattcaacacatctacaggaggacttctgttgccgagcgacactaaacggtcccaaatctacggctcccgtcaaatcatcctggagaaggaggaaacagaagagcttaagagattcgacgacccgggactcatgctcatgggcttcaagccactggtgcttctaaaaaagcaccactatctgcggccaagtctgttcgtgtatcctgaagagagtctggtgatagggtcctctacattgttctctgccctactgataaaatgcctagagaaggaggttgccgctctgtgcaggtatacacctcggaggaacattccaccatacttcgtcgccctggttccacaagaggaggaactggacgaccagaagatccaggtgaccccccctggttttcaattggtcttcttgcccttcgccgacgacaaacgcaagatgcccttcaccgagaagatcatggccaccccagaacaggtggggaagatgaaggctatcgtggagaaactgcgttttacttaccggtccgattcctttgaaaatccagttctgcagcaacacttccggaacctagaggcgctggccctggacttaatggagcctgagcaggccgtggacctaaccctgcccaaggtggaggctatgaacaaacggcttgggtctctggtggacgagtttaaggaactggtgtaccccccagattataatcccgagggtaaggtgactaaacggaaacacgataacgaaggttccggctccaaaaggcctaaagttgagtacagcgaggaggaattgaagacccacatctccaagggaaccctgggcaaattcacagtacccatgctcaaggaagcctgccgcgcatatggactcaagagcggcctgaagaaacaagaactgttggaggcacttacgaagcatttccaggattag

SEQ ID NO: 107335 - DNA, 1674 bp, Artificial Sequence
  derived and/or modified sequence
atgtccggctgggagagctactataagactgaaggcgacgaagaggcagaggaggagcaggaggaaaatctagaggcaagtggcgactataagtactccggtagagatagcctgattttcctggtcgatgcctcgaaagcgatgtttgagtctcaatccgaggacgagcttaccccatttgatatgtcgatccagtgtattcagagcgtttacatctcaaaaatcatttcaagcgatagagaccttctagcagtagtgttctacggaactgaaaaggataaaaatagtgtgaacttcaaaaatatttatgtcctgcaggaactggacaatccgggagcaaagagaatcttagaactggatcagttcaaggggcagcagggccagaaacgcttccaagacatgatggggcacggcagcgactattcactgtctgaagtattatgggtgtgcgccaacctgttttctgatgtgcagttcaaaatgagccacaaacgcataatgctctttactaacgaagataacccccacggaaacgattctgccaaggcttccagagctcggaccaaggcgggagatttgagagatacggggatctttcttgacctgatgcatttgaagaagccaggcggattcgatatttccctcttctacagagatatcatctctatcgcagaggacgaggacctcagagtgcactttgaagaaagtagtaaattggaagacctgctccgtaaggtgcgggctaaggagactcgcaagagggccctatctagattgaagttgaagttgaataaagacattgtgattagcgtcggtatttacaacttagtacaaaaagccctcaaacctcccccaattaagttataccgagagaccaatgaacccgtgaaaaccaaaacgagaacattcaacacctctaccggcggactgttgctacccagtgataccaaaagatcacagatctatggctctaggcagatcatcctggagaaagaggaaacagaagagctgaagaggttcgatgaccccggtctcatgctaatggggtttaagccgctggtgttgctgaagaagcaccattatctccgaccctctctgttcgtctaccccgaggagtcactggtaatcggaagctccaccttgttctcggcgctgttgatcaaatgcctggaaaaggaagtggccgcactgtgcagatatacacccagaaggaacatacccccttacttcgtcgcacttgtaccccaggaggaagagctcgacgaccagaagatccaggttactccccctgggttccagcttgtgtttctcccgtttgcggatgacaaacggaaaatgccctttactgaaaagattatggccactcctgagcaggtggggaagatgaaggctatcgttgagaagctgcgctttacttatcgaagcgattcctttgaaaaccctgtgctgcagcaacattttcgtaatctggaggcactcgctctggatctgatggaacctgagcaggccgtggacctgacattgccaaaagtggaagcaatgaacaagcgtctcggatccctggtagatgaatttaaagagttagtgtacccaccggactataatccagagggtaaggtaaccaaacgcaaacacgctaagggcccaaggtggtctatacagaagcggagttag

SEQ ID NO: 107336 - DNA, 1830 bp, Artificial Sequence
  derived and/or modified sequence
atgtctgggtgggaatcttactacaagactgagggagatgaggaggctgaggaagagcaagaggaaaatctggaggcctctggcgattacaaatatagtggtagagacagtttaatttttttggtcgatgcttctaaggctatgttcgagtctcagagtgaggatgaactgactccatttgacatgagcattcaatgcatccaatcagtttacatttctaagatcattagtagcgatcgggatcttttggcggttgtcttttacggaacggagaaggacaaaaattcggtgaatttcaagaacatctacgtgttgcaggagctcgataatccgggagccaagcggatactcgaactcgatcagtttaaggggcagcagggccagaagcgattccaggacatgatgggtcacggctcagattacagtctaagcgaagtcctgtgggtttgtgcgaatctgttcagcgacgtgcagttcaagatgtcacacaaacgcatcatgctgttcacaaatgaggacaatccccatggcaatgattccgcgaaggcatcacgcgcaaggacaaaagccggtgatctgcgcgacactggcatcttcctcgaccttatgcatctcaaaaaacctggaggcttcgacatctcactgttctaccgggatattatcagcatcgctgaggacgaggacctgcgcgttcatttcgaagaatcgtcaaagctggaggacttgctgcggaaagtcagagcaaaggagacaagaaaacgggcactgagccgattgaaactgaaactgaacaaggacatagttatctcagttggaatttacaatctggtccagaaagcccttaagcctcccccaatcaaactgtatcgtgaaaccaatgaaccagtcaagaccaagactaggacctttaatacatctaccgggggtttgctcctgccgtccgatacgaagcggagccaaatatacggctcccgtcagataatcttagagaaagaagagacagaggagttaaagcggtttgacgatcccggtctgatgctcatggggttcaagccgttggttctgctgaagaaacatcattatctcagaccgtccttgttcgtctaccctgaagagtcgttggttataggttcttcgactcttttttccgccctgctgattaaatgcctggagaaagaggtggccgctctttgccgttacacacccagaagaaacatccccccatacttcgtggctctggtgccccaggaagaggaactcgatgatcaaaaaatccaggtgacccccccagggtttcagttggtcttcttacctttcgctgatgataagcgcaagatgccttttactgaaaaaattatggctacccctgaacaggttggaaaaatgaaggctatcgttgagaaactgagattcacttatcggtctgattcgttcgagaatcccgttttgcagcagcactttcggaatctagaggcactggctttagatctgatggagcccgagcaagctgtagacctcactctgcctaaggtagaggctatgaataaacggcttggatccctagtggatgaattcaaagaattagtttatccccctgattacaatcctgaaggcaaagtaaccaagaggaagcacgacaacgagggaagtgggtcaaagagacccaaagtagagtactcggaggaggagctgaaaactcacattagtaaggggactctgggcaaatttaccgtgccaatgctgaaggaggcctgcagagcgtacgggctgaagtcaggattaaagaagcaggagcttctcgaggcactgacaaagcacttccaggactag

SEQ ID NO: 107337 - DNA, 2709 bp, Artificial Sequence
  derived and/or modified sequence
gcgggccgttatccatttgtgttgttcgccagctaggcctggcctcgtcccgcttcgctcggtcggtctcgcgcgcccccatagccttgctagagggttagcgttagccttaagtgtgcgaatccgaggagcagcgacagactcgagaccacgctccttcctcgggaaggaggcggcacctcgcgtttgaggcccgcctgcgtttgaggcccgcctgcgcttgcggcccgcctgcgcttgaggcctgtctgcgtttgagatctcattgggcgtgattgaggaatttggggaggtttttgggcggtattgaggacgagggggtccgttagtcagcatagaatcctggagcgggaatccctcaccgtctaaatggcgtcgggggcgggacctccgggatctggcttccgcgggccgccgccggccctgaaacgtgagggatagctgagatgaggcagctactgggatggcccccatgcgcatttacatgcagtccgactgccgagctttcgaggcagcaggatttaccgtccacattcctcactactaaccaagcttttagaacagatctcacaagaacctagaggtcggtattttttcgatttaaatttgcctgttactgacgttaacgtctttcgcctagtgagcagtagccaacatgtcagggtgggagtcatattacaaaaccgagggcgatgaagaagcagaggaagaacaagaagagaaccttgaagcaagtggagactataaatattcaggaagagatagtttgatttttttggttgatgcctccaaggctatgtttgaatctcagagtgaagatgagttgacaccttttgacatgagcatccagtgtatccaaagtgtgtacatcagtaagatcataagcagtgatcgagatctcttggctgtggtgttctatggtaccgagaaagacaaaaattcagtgaattttaaaaatatttacgtcttacaggagctggataatccaggtgcaaaacgaattctagagcttgaccagtttaaggggcagcagggacaaaaacgtttccaagacatgatgggccacggatctgactactcactcagtgaagtgctgtgggtctgtgccaacctctttagtgatgtccaattcaagatgagtcataagaggatcatgctgttcaccaatgaagacaacccccatggcaatgacagtgccaaagccagccgggccaggaccaaagccggtgatctccgagatacaggcatcttccttgacttgatgcacctgaagaaacctgggggctttgacatatccttgttctacagagatatcatcagcatagcagaggatgaggacctcagggttcactttgaggaatccagcaagctagaagacctgttgcggaaggttcgcgccaaggagaccaggaagcgagcactcagcaggttaaagctgaagctcaacaaagatatagtgatctctgtgggcatttataatctggtccagaaggctctcaagcctcctccaataaagctctatcgggaaacaaatgaaccagtgaaaaccaagacccggacctttaatacaagtacaggcggtttgcttctgcctagcgataccaagaggtctcagatctatgggagtcgtcagattatactggagaaagaggaaacagaagagctaaaacggtttgatgatccaggtttgatgctcatgggtttcaagccgttggtactgctgaagaaacaccattacctgaggccctccctgttcgtgtacccagaggagtcgctggtgattgggagctcaaccctgttcagtgctctgctcatcaagtgtctggagaaggaggttgcagcattgtgcagatacacaccccgcaggaacatccctccttattttgtggctttggtgccacaggaagaagagttggatgaccagaaaattcaggtgactcctccaggcttccagctggtctttttaccctttgctgatgataaaaggaagatgccctttactgaaaaaatcatggcaactccagagcaggtgggcaagatgaaggctatcgttgagaagcttcgcttcacatacagaagtgacagctttgagaaccccgtgctgcagcagcacttcaggaacctggaggccttggccttggatttgatggagccggaacaagcagtggacctgacattgcccaaggttgaagcaatgaataaaagactgggctccttggtggatgagtttaaggagcttgtttacccaccagattacaatcctgaagggaaagttaccaagagaaaacacgataatgaaggttctggaagcaaaaggcccaaggtggagtattcagaagaggagctgaagacccacatcagcaagggtacgctgggcaagttcactgtgcccatgctgaaagaggcctgccgggcttacgggctgaagagtgggctgaagaagcaggagctgctggaagccctcaccaagcacttccaggactgaccagaggccgcgcgtccagctgcccttccgcagtgtggccaggctgcctggccttgtcctcagccagttaaaatgtgtttctcctgagctaggaagagtctacccgacataagtcgagggactttatgtttttgaggctttctgttgccatggtgatggtgtagccctcccactttgctgttccttactttactgcctgaataaagagccctaagtttgtacta

SEQ ID NO: 107338 - DNA, 2296 bp, Artificial Sequence
  derived and/or modified sequence
gtaggaaggggcggggctttgccgaagggggcggggctctcgctgatgggttggctttcgtcagggacataggtagaagctggttggggagtgtgcgtgccagcctgacgcgatatagtgcgcacatgcgtgatgacgtagagggcgttgattgggaccgagtacagggcccgcgcatgcgtggattgtcgtcttctgtccaagttggtcgcttccctgcgccaaagtgagcagtagccaacatgtcagggtgggagtcatattacaaaaccgagggcgatgaagaagcagaggaagaacaagaagagaaccttgaagcaagtggagactataaatattcaggaagagatagtttgatttttttggttgatgcctccaaggctatgtttgaatctcagagtgaagatgagttgacaccttttgacatgagcatccagtgtatccaaagtgtgtacatcagtaagatcataagcagtgatcgagatctcttggctgtggtgttctatggtaccgagaaagacaaaaattcagtgaattttaaaaatatttacgtcttacaggagctggataatccaggtgcaaaacgaattctagagcttgaccagtttaaggggcagcagggacaaaaacgtttccaagacatgatgggccacggatctgactactcactcagtgaagtgctgtgggtctgtgccaacctctttagtgatgtccaattcaagatgagtcataagaggatcatgctgttcaccaatgaagacaacccccatggcaatgacagtgccaaagccagccgggccaggaccaaagccggtgatctccgagatacaggcatcttccttgacttgatgcacctgaagaaacctgggggctttgacatatccttgttctacagagatatcatcagcatagcagaggatgaggacctcagggttcactttgaggaatccagcaagctagaagacctgttgcggaaggttcgcgccaaggagaccaggaagcgagcactcagcaggttaaagctgaagctcaacaaagatatagtgatctctgtgggcatttataatctggtccagaaggctctcaagcctcctccaataaagctctatcgggaaacaaatgaaccagtgaaaaccaagacccggacctttaatacaagtacaggcggtttgcttctgcctagcgataccaagaggtctcagatctatgggagtcgtcagattatactggagaaagaggaaacagaagagctaaaacggtttgatgatccaggtttgatgctcatgggtttcaagccgttggtactgctgaagaaacaccattacctgaggccctccctgttcgtgtacccagaggagtcgctggtgattgggagctcaaccctgttcagtgctctgctcatcaagtgtctggagaaggaggttgcagcattgtgcagatacacaccccgcaggaacatccctccttattttgtggctttggtgccacaggaagaagagttggatgaccagaaaattcaggtgactcctccaggcttccagctggtctttttaccctttgctgatgataaaaggaagatgccctttactgaaaaaatcatggcaactccagagcaggtgggcaagatgaaggctatcgttgagaagcttcgcttcacatacagaagtgacagctttgagaaccccgtgctgcagcagcacttcaggaacctggaggccttggccttggatttgatggagccggaacaagcagtggacctgacattgcccaaggttgaagcaatgaataaaagactgggctccttggtggatgagtttaaggagcttgtttacccaccagattacaatcctgaagggaaagttaccaagagaaaacacgataatgaaggttctggaagcaaaaggcccaaggtggagtattcagaagaggagctgaagacccacatcagcaagggtacgctgggcaagttcactgtgcccatgctgaaagaggcctgccgggcttacgggctgaagagtgggctgaagaagcaggagctgctggaagccctcaccaagcacttccaggactgaccagaggccgcgcgtccagctgcccttccgcagtgtggccaggctgcctggccttgtcctcagccagttaaaatgtgtttctcctgagctaggaagagtctacccgacataagtcgagggactttatgtttttgaggctttctgttgccatggtgatggtgtagccctcccactttgctgttccttactttactgcctgaataaagagccctaagtttgtacta

SEQ ID NO: 107339 - DNA, 2025 bp, Artificial Sequence
  derived and/or modified sequence
tcgcctagtgagcagtagccaacatgtcagggtgggagtcatattacaaaaccgagggcgatgaagaagcagaggaagaacaagaagagaaccttgaagcaagtggagactataaatattcaggaagagatagtttgatttttttggttgatgcctccaaggctatgtttgaatctcagagtgaagatgagttgacaccttttgacatgagcatccagtgtatccaaagtgtgtacatcagtaagatcataagcagtgatcgagatctcttggctgtggtgttctatggtaccgagaaagacaaaaattcagtgaattttaaaaatatttacgtcttacaggagctggataatccaggtgcaaaacgaattctagagcttgaccagtttaaggggcagcagggacaaaaacgtttccaagacatgatgggccacggatctgactactcactcagtgaagtgctgtgggtctgtgccaacctctttagtgatgtccaattcaagatgagtcataagaggatcatgctgttcaccaatgaagacaacccccatggcaatgacagtgccaaagccagccgggccaggaccaaagccggtgatctccgagatacaggcatcttccttgacttgatgcacctgaagaaacctgggggctttgacatatccttgttctacagagatatcatcagcatagcagaggatgaggacctcagggttcactttgaggaatccagcaagctagaagacctgttgcggaaggttcgcgccaaggagaccaggaagcgagcactcagcaggttaaagctgaagctcaacaaagatatagtgatctctgtgggcatttataatctggtccagaaggctctcaagcctcctccaataaagctctatcgggaaacaaatgaaccagtgaaaaccaagacccggacctttaatacaagtacaggcggtttgcttctgcctagcgataccaagaggtctcagatctatgggagtcgtcagattatactggagaaagaggaaacagaagagctaaaacggtttgatgatccaggtttgatgctcatgggtttcaagccgttggtactgctgaagaaacaccattacctgaggccctccctgttcgtgtacccagaggagtcgctggtgattgggagctcaaccctgttcagtgctctgctcatcaagtgtctggagaaggaggttgcagcattgtgcagatacacaccccgcaggaacatccctccttattttgtggctttggtgccacaggaagaagagttggatgaccagaaaattcaggtgactcctccaggcttccagctggtctttttaccctttgctgatgataaaaggaagatgccctttactgaaaaaatcatggcaactccagagcaggtgggcaagatgaaggctatcgttgagaagcttcgcttcacatacagaagtgacagctttgagaaccccgtgctgcagcagcacttcaggaacctggaggccttggccttggatttgatggagccggaacaagcagtggacctgacattgcccaaggttgaagcaatgaataaaagactgggctccttggtggatgagtttaaggagcttgtttacccaccagattacaatcctgaagggaaagttaccaagagaaaacacgcaaaaggcccaaggtggagtattcagaagaggagctgaagacccacatcagcaagggtacgctgggcaagttcactgtgcccatgctgaaagaggcctgccgggcttacgggctgaagagtgggctgaagaagcaggagctgctggaagccctcaccaagcacttccaggactgaccagaggccgcgcgtccagctgcccttccgcagtgtggccaggctgcctggccttgtcctcagccagttaaaatgtgtttctcctgagctaggaagagtctacccgacataagtcgagggactttatgtttttgaggctttctgttgccatggtgatggtgtagccctcccactttgctgttccttacttt

SEQ ID NO: 107340 - DNA, 2200 bp, Artificial Sequence
  derived and/or modified sequence
aagtgtgcgaatccgaggagcagcgacagactcgagaccacgctccttcctcgggaaggaggcggcacctcgcgtttgaggcccgcctgcgtttgaggcccgcctgcgcttgcggcccgcctgcgcttgagtgagcagtagccaacatgtcagggtgggagtcatattacaaaaccgagggcgatgaagaagcagaggaagaacaagaagagaaccttgaagcaagtggagactataaatattcaggaagagatagtttgatttttttggttgatgcctccaaggctatgtttgaatctcagagtgaagatgagttgacaccttttgacatgagcatccagtgtatccaaagtgtgtacatcagtaagatcataagcagtgatcgagatctcttggctgtggtgttctatggtaccgagaaagacaaaaattcagtgaattttaaaaatatttacgtcttacaggagctggataatccaggtgcaaaacgaattctagagcttgaccagtttaaggggcagcagggacaaaaacgtttccaagacatgatgggccacggatctgactactcactcagtgaagtgctgtgggtctgtgccaacctctttagtgatgtccaattcaagatgagtcataagaggatcatgctgttcaccaatgaagacaacccccatggcaatgacagtgccaaagccagccgggccaggaccaaagccggtgatctccgagatacaggcatcttccttgacttgatgcacctgaagaaacctgggggctttgacatatccttgttctacagagatatcatcagcatagcagaggatgaggacctcagggttcactttgaggaatccagcaagctagaagacctgttgcggaaggttcgcgccaaggagaccaggaagcgagcactcagcaggttaaagctgaagctcaacaaagatatagtgatctctgtgggcatttataatctggtccagaaggctctcaagcctcctccaataaagctctatcgggaaacaaatgaaccagtgaaaaccaagacccggacctttaatacaagtacaggcggtttgcttctgcctagcgataccaagaggtctcagatctatgggagtcgtcagattatactggagaaagaggaaacagaagagctaaaacggtttgatgatccaggtttgatgctcatgggtttcaagccgttggtactgctgaagaaacaccattacctgaggccctccctgttcgtgtacccagaggagtcgctggtgattgggagctcaaccctgttcagtgctctgctcatcaagtgtctggagaaggaggttgcagcattgtgcagatacacaccccgcaggaacatccctccttattttgtggctttggtgccacaggaagaagagttggatgaccagaaaattcaggtgactcctccaggcttccagctggtctttttaccctttgctgatgataaaaggaagatgccctttactgaaaaaatcatggcaactccagagcaggtgggcaagatgaaggctatcgttgagaagcttcgcttcacatacagaagtgacagctttgagaaccccgtgctgcagcagcacttcaggaacctggaggccttggccttggatttgatggagccggaacaagcagtggacctgacattgcccaaggttgaagcaatgaataaaagactgggctccttggtggatgagtttaaggagcttgtttacccaccagattacaatcctgaagggaaagttaccaagagaaaacacgataatgaaggttctggaagcaaaaggcccaaggtggagtattcagaagaggagctgaagacccacatcagcaagggtacgctgggcaagttcactgtgcccatgctgaaagaggcctgccgggcttacgggctgaagagtgggctgaagaagcaggagctgctggaagccctcaccaagcacttccaggactgaccagaggccgcgcgtccagctgcccttccgcagtgtggccaggctgcctggccttgtcctcagccagttaaaatgtgtttctcctgagctaggaagagtctacccgacataagtcgagggactttatgtttttgaggctttctgttgccatggtgatggtgtagccctcccactttgctgttccttactttactgcctgaataaagagccctaagtttgtacta

SEQ ID NO: 107341 - protein, 568 aa, Artificial Sequence
  derived and/or modified sequence
MSGWESYYKTEGDEEAEEEQEENLEASGDYKYSGRDSLIFLVDASKAMFESQSEDELTPFDMSIQELDNPGAKRILELDQFKGQQGQKRFQDMMGHGSDYSLSEVLWVCANLFSDVQFKMSHKRIMLFTNEDNPHGNDSAKASRARTKAGDLRDTGIFLDLMHLKKPGGFDISLFYRDIISIAEDEDLRVHFEESSKLEDLLRKVRAKETRKRALSRLKLKLNKDIVISVGIYNLVQKALKPPPIKLYRETNEPVKTKTRTFNTSTGGLLLPSDTKRSQIYGSRQIILEKEETEELKRFDDPGLMLMGFKPLVLLKKHHYLRPSLFVYPEESLVIGSSTLFSALLIKCLEKEVAALCRYTPRRNIPPYFVALVPQEEELDDQKIQVTPPGFQLVFLPFADDKRKMPFTEKIMATPEQVGKMKAIVEKLRFTYRSDSFENPVLQQHFRNLEALALDLMEPEQAVDLTLPKVEAMNKRLGSLVDEFKELVYPPDYNPEGKVTKRKHDNEGSGSKRPKVEYSEEELKTHISKGTLGKFTVPMLKEACRAYGLKSGLKKQELLEALTKHFQD

SEQ ID NO: 107342 - DNA, 1707 bp, Artificial Sequence
  derived and/or modified sequence
atgagcggctgggagagctactacaagaccgagggcgacgaggaggccgaggaggagcaggaggagaacctggaggccagcggcgactacaagtacagcggcagagacagcctgatcttcctggtggacgccagcaaggccatgttcgagagccagagcgaggacgagctgacccccttcgacatgagcatccaggagctggacaaccccggcgccaagagaatcctggagctggaccagttcaagggccagcagggccagaagagattccaggacatgatgggccacggcagcgactacagcctgagcgaggtgctgtgggtgtgcgccaacctgttcagcgacgtgcagttcaagatgagccacaagagaatcatgctgttcaccaacgaggacaacccccacggcaacgacagcgccaaggccagcagagccagaaccaaggccggcgacctgagagacaccggcatcttcctggacctgatgcacctgaagaagcccggcggcttcgacatcagcctgttctacagagacatcatcagcatcgccgaggacgaggacctgagagtgcacttcgaggagagcagcaagctggaggacctgctgagaaaggtgagagccaaggagaccagaaagagagccctgagcagactgaagctgaagctgaacaaggacatcgtgatcagcgtgggcatctacaacctggtgcagaaggccctgaagcccccccccatcaagctgtacagagagaccaacgagcccgtgaagaccaagaccagaaccttcaacaccagcaccggcggcctgctgctgcccagcgacaccaagagaagccagatctacggcagcagacagatcatcctggagaaggaggagaccgaggagctgaagagattcgacgaccccggcctgatgctgatgggcttcaagcccctggtgctgctgaagaagcaccactacctgagacccagcctgttcgtgtaccccgaggagagcctggtgatcggcagcagcaccctgttcagcgccctgctgatcaagtgcctggagaaggaggtggccgccctgtgcagatacacccccagaagaaacatccccccctacttcgtggccctggtgccccaggaggaggagctggacgaccagaagatccaggtgaccccccccggcttccagctggtgttcctgcccttcgccgacgacaagagaaagatgcccttcaccgagaagatcatggccacccccgagcaggtgggcaagatgaaggccatcgtggagaagctgagattcacctacagaagcgacagcttcgagaaccccgtgctgcagcagcacttcagaaacctggaggccctggccctggacctgatggagcccgagcaggccgtggacctgaccctgcccaaggtggaggccatgaacaagagactgggcagcctggtggacgagttcaaggagctggtgtacccccccgactacaaccccgagggcaaggtgaccaagagaaagcacgacaacgagggcagcggcagcaagagacccaaggtggagtacagcgaggaggagctgaagacccacatcagcaagggcaccctgggcaagttcaccgtgcccatgctgaaggaggcctgcagagcctacggcctgaagagcggcctgaagaagcaggagctgctggaggccctgaccaagcacttccaggactag

SEQ ID NO: 107343 - DNA, 1707 bp, Artificial Sequence
  derived and/or modified sequence
atgagcggatgggagagttactataagacagagggcgacgaagaagcggaggaggaacaagaggaaaacttagaagcatcaggcgattataagtactctgggagggactctcttatttttctggtcgacgccagtaaggctatgttcgaatctcaatctgaggacgaactaaccccatttgacatgagcatccaagagcttgataaccctggggccaagagaattctcgagctagaccagtttaaaggccagcagggacagaaacggttccaggatatgatgggtcacggaagcgattacagtctgtcagaggtgctctgggtctgcgccaacctcttctctgacgttcaatttaagatgagccacaagcgaatcatgttatttacaaacgaagacaacccccacggcaatgatagtgccaaggcaagccgtgcccgcacaaaagcaggagacttgcgagatacaggtatctttctggatcttatgcatctcaagaaacccgggggcttcgacatcagtttattctaccgggatatcatatcaatagccgaagatgaggatctgcgggtgcacttcgaagagtccagcaagcttgaggatttgctgcgtaaggtgcgagctaaggaaaccaggaaaagggcactgtcgagactgaagctgaagctcaacaaggatatcgtgattagtgttggtatttataaccttgtgcagaaagctctgaagccgccaccaattaagctgtaccgcgagactaatgagcctgttaagactaagactaggacctttaacaccagcacaggagggctcctcttgccatccgatacaaagagatcccagatctatggcagccggcagatcatcctagagaaggaagagaccgaggagctgaaaaggttcgacgacccagggttgatgctcatgggatttaagccgctggtgctgctcaagaaacaccactatctaaggccttcactcttcgtttaccccgaggaaagtctggtcatcggttcatcaacactgttttcagcactcctgataaagtgtctcgaaaaagaagtggccgccctctgcagatatactccccgtcggaatatccctccgtactttgtcgccctggttcctcaggaggaagagctagatgaccaaaagatacaggtcactcccccaggttttcagcttgtgtttctgccatttgcagacgataaaaggaaaatgccattcacagaaaagatcatggccaccccagagcaggtgggcaagatgaaagccattgtagaaaagctgaggttcacctaccgaagtgatagttttgaaaatccagtactccagcagcacttcaggaatttggaagcgcttgcacttgacctgatggagcccgaacaagctgtagacctcaccctgcccaaggtggaagctatgaacaaacggctcggatccctggtggatgagtttaaagaactagtctatccacccgattacaacccagaggggaaggtcactaagcggaaacacgacaatgagggctctgggtcaaagcgtccaaaggttgaatacagcgaagaggagcttaagacgcacatctccaagggtacgctgggtaaattcactgtgcccatgctgaaggaagcctgtcgcgcttacgggctgaagtctggtctcaagaaacaagaacttctcgaagccctcaccaagcatttccaggattag

SEQ ID NO: 107344 - DNA, 1707 bp, Artificial Sequence
  derived and/or modified sequence
atgagcggctgggagagctactacaagacagaaggagatgaggaggccgaggaggagcaggaggagaacctggaggccagcggggactacaagtacagcggccgggacagcctcatcttcctggtggatgccagcaaggccatgtttgagagccagagtgaagatgagctgaccccatttgacatgagcatccaggagctggacaaccctggggccaagaggatcctggagctggaccagttcaagggccagcagggccagaagcgcttccaggacatgatgggccacggcagtgactacagcctgtctgaggtgctgtgggtgtgtgccaacctcttcagtgatgtgcagttcaagatgagccacaagaggatcatgctgttcaccaatgaagacaacccccatggaaatgattctgccaaggccagccgggcccggaccaaggccggggacctgcgggacaccggcatcttcctggacctgatgcacctgaagaagccaggcggctttgacatcagcctcttctacagagacatcatcagcattgctgaagatgaggacctgcgggtgcactttgaggagagcagcaagctggaggacctgctgaggaaggtgcgggccaaggagaccaggaagagggccctgagccggctgaagctgaagctgaacaaggacatcgtcatctctgtgggcatctacaacctggtgcagaaggccctgaagcccccacccatcaagctgtaccgggagaccaatgaacctgtgaagaccaagaccaggaccttcaacaccagcactggaggcctgctgctgcccagcgacaccaagaggagccagatctacggcagccggcagatcatcctggagaaggaggagacagaggagctgaagagatttgatgaccccggcctgatgctgatgggcttcaagcccctggtgctgctgaagaagcaccactacctgcggcccagcctgtttgtgtacccagaggagagcctggtgattggcagcagcaccctcttcagcgccctgctgatcaagtgcctggagaaggaggtggccgccctgtgccgctacacccccaggaggaacatccccccctactttgtggccctggtgccccaggaggaggagctggatgaccagaagatccaggtgaccccacctggcttccagctggtgttcctgccctttgctgatgacaagaggaagatgcccttcacagagaagatcatggccaccccagagcaggtgggcaagatgaaggccatcgtggagaagctgcgcttcacctacagaagtgacagctttgagaaccctgtgctgcagcagcacttcaggaacctggaggccctggccctggacctgatggagcctgagcaggccgtggacctgaccctgcccaaggtggaggccatgaacaagaggctgggcagcctggtggatgagttcaaggagctggtgtaccccccagactacaaccctgagggcaaggtgaccaagaggaagcatgacaatgaaggcagcggcagcaagaggcccaaggtggagtacagcgaggaggagctgaagacccacatcagcaagggcaccctgggcaagttcaccgtgcccatgctgaaggaggcctgccgggcctacggcctgaagagcggcctgaagaagcaggagctgctggaggccctgaccaagcacttccaggactag

SEQ ID NO: 107345 - DNA, 1707 bp, Artificial Sequence
  derived and/or modified sequence
atgagcggctgggagagctactacaagaccgagggcgacgaggaggcagaggaggaacaggaagaaaatcttgaagcttctggtgactacaagtattccggcagagattccctgatcttcttggtcgacgctagcaaggctatgttcgagagtcagagtgaggacgagcttacgccttttgatatgtcaatccaggaattggataatcccggagctaaaaggatcctggaactggatcagttcaagggccagcagggccagaaacgctttcaggatatgatggggcatggatcagactacagcctgagtgaggtgctatgggtctgtgccaatttgttcagcgacgtgcaattcaagatgtctcataagagaatcatgctattcacgaatgaggacaaccctcacgggaatgatagcgcgaaggcatcccgggcccgtactaaggcaggcgacctccgcgacaccggcatattcctggacttaatgcacctaaaaaagccaggcggctttgacataagtcttttttaccgtgatattatcagtattgcggaggacgaggaccttcgagtgcacttcgaggaatcctccaaacttgaggaccttctccggaaagtgcgcgctaaagaaaccagaaagagagctctgtctcgactgaagctgaagctcaacaaggacatcgtgatctcagtggggatctacaatctggtgcagaaagcgctgaaaccacctccaattaaactgtatagggagaccaacgagccagtaaagactaaaacccgaacttttaatacatccaccggagggctcctgttgccctcagacaccaagcgctctcagatttacggctcccgccagatcattctcgagaaggaggaaaccgaggaactgaaacggttcgacgatccgggactgatgttgatgggtttcaaaccactggtgctgctgaaaaaacaccactatctgcgcccatcactgtttgtttaccctgaggagagcttggtgattggaagtagcacacttttttctgctctgctgattaaatgcctggaaaaagaggtggctgctttatgcaggtatacccctcggagaaacataccgccatattttgtggctctcgtccctcaagaggaggagctcgatgatcagaagatccaggtaacgccacccggctttcaactcgtatttttgccatttgccgacgacaaacgaaagatgccctttacagagaagatcatggcaaccccagaacaggtcggtaagatgaaagctatcgtggagaagcttagattcacctatcggtctgacagcttcgagaaccccgtccttcagcaacatttcagaaatttagaggctcttgctcttgacctcatggagcctgaacaggctgttgacctgacactgcctaaagtggaggccatgaacaaaaggttgggcagcctcgttgacgagtttaaggagctcgtctatccgccagattataacccggagggcaaggtgacaaagcgcaaacatgacaatgaagggtctgggagcaagcggccgaaggtagaatattcggaggaggaactgaaaacacatataagcaagggtactctgggcaagttcaccgtgcccatgctgaaagaagcctgccgggcttatggcctgaagagtggcttgaaaaaacaagagcttcttgaagcactgaccaaacactttcaagactag

SEQ ID NO: 107346 - DNA, 1707 bp, Artificial Sequence
  derived and/or modified sequence
atgagtggctgggagagttactacaaaaccgagggggatgaggaggctgaggaagagcaagaagagaacctggaagctagtggggactacaagtacagcggccgagacagcctgattttcttggtggacgcctcaaaggccatgttcgagtcccagtctgaagacgagttgacgccatttgacatgagcatccaagagctggataaccccggtgctaagagaattttagagctcgaccagttcaagggccagcagggacaaaaaagatttcaggatatgatgggacacggctccgattattcccttagcgaggtgctgtgggtgtgtgctaatctttttagcgatgtgcagtttaaaatgagccacaaacgcatcatgctcttcactaatgaggataatcctcatggcaatgatagtgcaaaggcctcacgagccaggacgaaagccggagatctccgcgacacaggcatctttctggatttgatgcacttgaaaaaaccaggcggatttgacattagcctcttttaccgggatattatcagcattgcggaggatgaggacttaagggtacactttgaagagtcgtctaaactagaagaccttttacgcaaagtgcgcgctaaagagaccagaaagagggccctgagccggctgaagctcaagctcaacaaggacattgtcatttccgtgggcatatacaatttagtgcagaaggcgctcaaacccccaccaatcaagttatatcgggagactaatgaacctgtaaaaaccaagactaggacatttaacaccagtacagggggtctcctgctgccaagtgacaccaagaggagccagatatatgggagtaggcagatcattctggagaaagaggaaacggaggaattgaagcgctttgatgatccaggcctcatgctgatgggcttcaagccgctggtattactcaagaagcaccactaccttcgcccaagtttattcgtctaccccgaggagagtttggtcatcggatcctcaactcttttctcggccttactgatcaaatgcctcgagaaggaggtggctgcattgtgtcgctacacccccagacgcaacataccaccatatttcgtggcgctcgtccctcaggaggaagagctggacgaccagaagatacaagtcacaccaccaggatttcagctggtcttcctgccttttgccgatgacaaacgtaaaatgcccttcactgaaaagattatggctaccccggagcaggtgggcaaaatgaaggcaatcgtggagaaactgcgctttacatacagaagcgactcttttgaaaatcctgtgctacagcaacacttcagaaacctagaggcactggctcttgatctgatggaacccgagcaggccgtagatctgactttgcccaaggtggaagctatgaataagcggctcggttctctggttgacgagtttaaagaactggtgtatccccctgattataacccagagggcaaagtcacgaagcgtaagcatgacaacgaagggtctggctctaaacggcctaaagttgagtactccgaagaggaattaaaaacccatatatccaaggggactctgggaaaatttactgtcccaatgttgaaagaggcctgccgcgcatacggattgaagtctggcctgaaaaagcaggaactgttagaagctctgaccaagcactttcaggattag

SEQ ID NO: 107347 - DNA, 1998 bp, Artificial Sequence
  derived and/or modified sequence
atgcgtggattgtcgtcttctgtccaagttggtcgcttccctgcgccaaagtgagcagtagccaacatgtcagggtgggagtcatattacaaaaccgagggcgatgaagaagcagaggaagaacaagaagagaaccttgaagcaagtggagactataaatattcaggaagagatagtttgatttttttggttgatgcctccaaggctatgtttgaatctcagagtgaagatgagttgacaccttttgacatgagcatccaggagctggataatccaggtgcaaaacgaattctagagcttgaccagtttaaggggcagcagggacaaaaacgtttccaagacatgatgggccacggatctgactactcactcagtgaagtgctgtgggtctgtgccaacctctttagtgatgtccaattcaagatgagtcataagaggatcatgctgttcaccaatgaagacaacccccatggcaatgacagtgccaaagccagccgggccaggaccaaagccggtgatctccgagatacaggcatcttccttgacttgatgcacctgaagaaacctgggggctttgacatatccttgttctacagagatatcatcagcatagcagaggatgaggacctcagggttcactttgaggaatccagcaagctagaagacctgttgcggaaggttcgcgccaaggagaccaggaagcgagcactcagcaggttaaagctgaagctcaacaaagatatagtgatctctgtgggcatttataatctggtccagaaggctctcaagcctcctccaataaagctctatcgggaaacaaatgaaccagtgaaaaccaagacccggacctttaatacaagtacaggcggtttgcttctgcctagcgataccaagaggtctcagatctatgggagtcgtcagattatactggagaaagaggaaacagaagagctaaaacggtttgatgatccaggtttgatgctcatgggtttcaagccgttggtactgctgaagaaacaccattacctgaggccctccctgttcgtgtacccagaggagtcgctggtgattgggagctcaaccctgttcagtgctctgctcatcaagtgtctggagaaggaggttgcagcattgtgcagatacacaccccgcaggaacatccctccttattttgtggctttggtgccacaggaagaagagttggatgaccagaaaattcaggtgactcctccaggcttccagctggtctttttaccctttgctgatgataaaaggaagatgccctttactgaaaaaatcatggcaactccagagcaggtgggcaagatgaaggctatcgttgagaagcttcgcttcacatacagaagtgacagctttgagaaccccgtgctgcagcagcacttcaggaacctggaggccttggccttggatttgatggagccggaacaagcagtggacctgacattgcccaaggttgaagcaatgaataaaagactgggctccttggtggatgagtttaaggagcttgtttacccaccagattacaatcctgaagggaaagttaccaagagaaaacacgataatgaaggttctggaagcaaaaggcccaaggtggagtattcagaagaggagctgaagacccacatcagcaagggtacgctgggcaagttcactgtgcccatgctgaaagaggcctgccgggcttacgggctgaagagtgggctgaagaagcaggagctgctggaagccctcaccaagcacttccaggactgaccagaggccgcgcgtccagctgcccttccgcagtgtggccaggctgcctggccttgtcctcagccagttaaaatgtgtttctcctgagctaggaagagtctacccgacataagtcgagggactttatgtttttgaggctttctgttgccatggtgatggtgtagccctcccactttgctgttccttactttactgcctgaataaagagccctaagtttgtactat

SEQ ID NO: 107348 - protein, 559 aa, Artificial Sequence
  derived and/or modified sequence
MKKQRKNKKRTLKQVCIQSVYISKIISSDRDLLAVVFYGTEKDKNSVNFKNIYVLQELDNPGAKRILELDQFKGQQGQKRFQDMMGHGSDYSLSEVLWVCANLFSDVQFKMSHKRIMLFTNEDNPHGNDSAKASRARTKAGDLRDTGIFLDLMHLKKPGGFDISLFYRDIISIAEDEDLRVHFEESSKLEDLLRKVRAKETRKRALSRLKLKLNKDIVISVGIYNLVQKALKPPPIKLYRETNEPVKTKTRTFNTSTGGLLLPSDTKRSQIYGSRQIILEKEETEELKRFDDPGLMLMGFKPLVLLKKHHYLRPSLFVYPEESLVIGSSTLFSALLIKCLEKEVAALCRYTPRRNIPPYFVALVPQEEELDDQKIQVTPPGFQLVFLPFADDKRKMPFTEKIMATPEQVGKMKAIVEKLRFTYRSDSFENPVLQQHFRNLEALALDLMEPEQAVDLTLPKVEAMNKRLGSLVDEFKELVYPPDYNPEGKVTKRKHDNEGSGSKRPKVEYSEEELKTHISKGTLGKFTVPMLKEACRAYGLKSGLKKQELLEALTKHFQD

SEQ ID NO: 107349 - DNA, 1680 bp, Artificial Sequence
  derived and/or modified sequence
atgaagaagcagagaaagaacaagaagagaaccctgaagcaggtgtgcatccagagcgtgtacatcagcaagatcatcagcagcgacagagacctgctggccgtggtgttctacggcaccgagaaggacaagaacagcgtgaacttcaagaacatctacgtgctgcaggagctggacaaccccggcgccaagagaatcctggagctggaccagttcaagggccagcagggccagaagagattccaggacatgatgggccacggcagcgactacagcctgagcgaggtgctgtgggtgtgcgccaacctgttcagcgacgtgcagttcaagatgagccacaagagaatcatgctgttcaccaacgaggacaacccccacggcaacgacagcgccaaggccagcagagccagaaccaaggccggcgacctgagagacaccggcatcttcctggacctgatgcacctgaagaagcccggcggcttcgacatcagcctgttctacagagacatcatcagcatcgccgaggacgaggacctgagagtgcacttcgaggagagcagcaagctggaggacctgctgagaaaggtgagagccaaggagaccagaaagagagccctgagcagactgaagctgaagctgaacaaggacatcgtgatcagcgtgggcatctacaacctggtgcagaaggccctgaagcccccccccatcaagctgtacagagagaccaacgagcccgtgaagaccaagaccagaaccttcaacaccagcaccggcggcctgctgctgcccagcgacaccaagagaagccagatctacggcagcagacagatcatcctggagaaggaggagaccgaggagctgaagagattcgacgaccccggcctgatgctgatgggcttcaagcccctggtgctgctgaagaagcaccactacctgagacccagcctgttcgtgtaccccgaggagagcctggtgatcggcagcagcaccctgttcagcgccctgctgatcaagtgcctggagaaggaggtggccgccctgtgcagatacacccccagaagaaacatccccccctacttcgtggccctggtgccccaggaggaggagctggacgaccagaagatccaggtgaccccccccggcttccagctggtgttcctgcccttcgccgacgacaagagaaagatgcccttcaccgagaagatcatggccacccccgagcaggtgggcaagatgaaggccatcgtggagaagctgagattcacctacagaagcgacagcttcgagaaccccgtgctgcagcagcacttcagaaacctggaggccctggccctggacctgatggagcccgagcaggccgtggacctgaccctgcccaaggtggaggccatgaacaagagactgggcagcctggtggacgagttcaaggagctggtgtacccccccgactacaaccccgagggcaaggtgaccaagagaaagcacgacaacgagggcagcggcagcaagagacccaaggtggagtacagcgaggaggagctgaagacccacatcagcaagggcaccctgggcaagttcaccgtgcccatgctgaaggaggcctgcagagcctacggcctgaagagcggcctgaagaagcaggagctgctggaggccctgaccaagcacttccaggactag

SEQ ID NO: 107350 - DNA, 1431 bp, Artificial Sequence
  derived and/or modified sequence
atgatgggccacggcagcgactacagcctgagcgaggtgctgtgggtgtgcgccaacctgttcagcgacgtgcagttcaagatgagccacaagagaatcatgctgttcaccaacgaggacaacccccacggcaacgacagcgccaaggccagcagagccagaaccaaggccggcgacctgagagacaccggcatcttcctggacctgatgcacctgaagaagcccggcggcttcgacatcagcctgttctacagagacatcatcagcatcgccgaggacgaggacctgagagtgcacttcgaggagagcagcaagctggaggacctgctgagaaaggtgagagccaaggagaccagaaagagagccctgagcagactgaagctgaagctgaacaaggacatcgtgatcagcgtgggcatctacaacctggtgcagaaggccctgaagcccccccccatcaagctgtacagagagaccaacgagcccgtgaagaccaagaccagaaccttcaacaccagcaccggcggcctgctgctgcccagcgacaccaagagaagccagatctacggcagcagacagatcatcctggagaaggaggagaccgaggagctgaagagattcgacgaccccggcctgatgctgatgggcttcaagcccctggtgctgctgaagaagcaccactacctgagacccagcctgttcgtgtaccccgaggagagcctggtgatcggcagcagcaccctgttcagcgccctgctgatcaagtgcctggagaaggaggtggccgccctgtgcagatacacccccagaagaaacatccccccctacttcgtggccctggtgccccaggaggaggagctggacgaccagaagatccaggtgaccccccccggcttccagctggtgttcctgcccttcgccgacgacaagagaaagatgcccttcaccgagaagatcatggccacccccgagcaggtgggcaagatgaaggccatcgtggagaagctgagattcacctacagaagcgacagcttcgagaaccccgtgctgcagcagcacttcagaaacctggaggccctggccctggacctgatggagcccgagcaggccgtggacctgaccctgcccaaggtggaggccatgaacaagagactgggcagcctggtggacgagttcaaggagctggtgtacccccccgactacaaccccgagggcaaggtgaccaagagaaagcacgacaacgagggcagcggcagcaagagacccaaggtggagtacagcgaggaggagctgaagacccacatcagcaagggcaccctgggcaagttcaccgtgcccatgctgaaggaggcctgcagagcctacggcctgaagagcggcctgaagaagcaggagctgctggaggccctgaccaagcacttccaggactag

SEQ ID NO: 107351 - DNA, 1680 bp, Artificial Sequence
  derived and/or modified sequence
atgaagaaacaacgtaagaacaaaaagaggacactgaagcaggtgtgtatccagagcgtatacatcagcaaaattatttcttctgatcgagatctgctggctgttgtcttctatgggacggaaaaagacaagaatagcgtcaacttcaagaacatttatgtcctgcaggagctcgataaccctggagccaagcgaatcttggaactggaccagtttaaaggacagcagggccagaagcggttccaggacatgatgggacacggatcagattacagcttgtccgaggtcttatgggtgtgtgctaacttgttctcggatgtgcaatttaagatgagccacaagcggatcatgctattcactaacgaggacaacccccatgggaatgatagtgcaaaggcgtctagggctagaacgaaagccggcgatctgagagacactggcatcttcttggacttgatgcatctaaagaaacccgggggcttcgacattagcctgttttaccgagatataatttctattgccgaggacgaagaccttagggttcacttcgaagaaagttctaagctcgaggacctgctgcgaaaggtgagggctaaggagacccgtaagagggccctgtccaggcttaagctgaagctcaacaaagacattgtgatatccgtaggaatatataacctggtgcagaaagccctcaaacctccacccatcaagctatacagggagaccaacgaaccagttaagaccaaaacaagaaccttcaatacgtctacaggggggctattgttgccgtcagatactaagaggtcacagatctatggttctcgtcagatcattctggaaaaggaggagactgaagagctcaaaaggttcgatgatcctgggttaatgcttatgggctttaaaccgcttgtcctgctgaagaaacatcattatctgaggccatccttatttgtctatccggaggagagtttagtcatcgggagttctacactattctctgccttgcttattaagtgcctcgaaaaagaggtcgctgcactgtgccgatacactccgaggagaaatattcctccatactttgtcgccctcgtaccccaggaggaggagttggacgaccagaagattcaggtcacaccacctggtttccagttggtgtttctaccttttgccgacgacaagaggaagatgcctttcacagaaaagattatggccacccctgagcaggttgggaagatgaaggcgatagtggagaagttacgcttcacatacagaagtgactcctttgagaatcccgtgctccagcagcacttcaggaacctggaggcgctggctcttgatctgatggaacctgagcaagccgtggacttgaccctccccaaagttgaggccatgaacaaaagactagggtccctggttgacgaatttaaggagcttgtgtatccaccggattataatcccgagggcaaggtcactaaacgcaagcacgacaacgagggctctggctccaaaaggcccaaggtggagtatagcgaggaagagcttaagacccacatcagtaaagggactttaggaaaatttaccgttcctatgcttaaagaggcctgcagagcatacggccttaaatccgggctcaagaaacaggaactgctggaagccttgacaaaacactttcaggattag

SEQ ID NO: 107352 - DNA, 1431 bp, Artificial Sequence
  derived and/or modified sequence
atgatgggtcacggatctgactactccctgtcggaggtcttgtgggtgtgtgcaaacctgtttagcgacgttcagttcaagatgtctcataaaaggattatgctgttcacaaatgaggataacccccacggcaacgacagtgccaaggcaagtagagcccggacaaaggcaggcgatctgcgagacaccggcattttccttgacctgatgcacctgaagaagcctggcgggttcgacatcagtctgttttacagagatattatctcaatcgctgaagacgaagacctcagagtgcattttgaggaatcctcaaaactggaagacctgttacgtaaagtccgagcaaaggagactaggaagcgcgcgctgtcaaggctcaagctaaagctcaacaaggatattgtgataagtgtgggcatatacaacctggtccagaaagcgttaaagcctcctccaatcaagttgtaccgcgagacaaatgagcccgtaaaaactaagacacgtacttttaacacctccaccggtgggctgctgctcccctctgatacaaaacggtctcagatctacggcagtcgacaaattattctggagaaagaggaaacagaggaactcaagcgcttcgacgacccaggattaatgctaatgggctttaaaccactggtgttattgaaaaaacatcactatctgcggccttctctgttcgtataccctgaagagtcgttagtgattgggtcatctacgctgttttccgctctcctgattaagtgtctggagaaggaggttgctgcactgtgtcgttacaccccccggaggaatatacccccatacttcgtggccctggtgccacaggaggaagagctggacgatcagaaaattcaggtgaccccccctggatttcaactggtgtttcttcccttcgccgacgataaacggaaaatgcccttcacagagaaaataatggccactccagagcaggtcggaaaaatgaaggcgattgtggaaaagctgagattcacatatagatccgactccttcgaaaaccccgttctgcagcagcattttcgcaatcttgaggcactggccctcgatctgatggagcccgagcaagctgtggacctgacactgcctaaggtggaggcaatgaacaaacgactgggcagtcttgtcgatgagtttaaggagctggtgtacccccctgattacaatcctgaaggcaaagttactaagcggaagcacgataatgagggcagtggtagcaagcgccctaaagtcgagtactccgaagaggaactaaagacccacatttctaagggcacattgggcaaatttacagtgcccatgctgaaagaggcctgtagggcatatgggctgaagtctgggctgaagaagcaggaactcctcgaggccctgaccaagcatttccaggattag

SEQ ID NO: 107353 - DNA, 1680 bp, Artificial Sequence
  derived and/or modified sequence
atgaagaagcagaggaagaacaagaagaggaccctgaagcaggtgtgcatccagagcgtgtacatcagcaagatcatcagcagtgaccgggacctgctggccgtggtgttctacggcacagagaaggacaagaacagcgtgaacttcaagaacatctacgtgctgcaggagctggacaaccctggggccaagaggatcctggagctggaccagttcaagggccagcagggccagaagcgcttccaggacatgatgggccacggcagtgactacagcctgtctgaggtgctgtgggtgtgtgccaacctcttcagtgatgtgcagttcaagatgagccacaagaggatcatgctgttcaccaatgaagacaacccccacggcaatgacagcgccaaggccagccgggcccggaccaaggccggggacctgcgggacaccggcatcttcctggacctgatgcacctgaagaagccaggcggctttgacatcagcctcttctacagagacatcatcagcattgctgaagatgaggacctgcgggtgcactttgaggagagcagcaagctggaggacctgctgaggaaggtgcgggccaaggagaccaggaagagggccctgagccggctgaagctgaagctgaacaaggacatcgtcatctctgtgggcatctacaacctggtgcagaaggccctgaagcccccacccatcaagctgtaccgggagaccaatgaacctgtgaagaccaagaccaggaccttcaacaccagcactggaggcctgctgctgcccagcgacaccaagaggagccagatctacggcagccggcagatcatcctggagaaggaggagacagaggagctgaagagatttgatgatcctggcctgatgctgatgggcttcaagcccctggtgctgctgaagaagcaccactacctgcggcccagcctgtttgtgtacccagaggagagcctggtgattggcagcagcaccctcttcagcgccctgctgatcaagtgcctggagaaggaggtggccgccctgtgccgctacaccccaagaagaaacatccccccctactttgtggccctggtgccccaggaggaggagctggatgaccagaagatccaggtgaccccacctggcttccagctggtgttcctgccctttgctgatgacaagaggaagatgcccttcacagagaagatcatggccaccccagagcaggtgggcaagatgaaggccatcgtggagaagctgcgcttcacctacagaagtgacagctttgaaaatcctgtgctgcagcagcacttcaggaacctggaggccctggccctggacctgatggagcctgagcaggccgtggacctgaccctgcccaaggtggaggccatgaacaagaggctgggcagcctggtggatgagttcaaggagctggtgtaccccccagactacaaccctgagggcaaggtgaccaagaggaagcatgacaatgaaggcagcggcagcaagaggcccaaggtggagtacagcgaggaggagctgaagacccacatcagcaagggcaccctgggcaagttcaccgtgcccatgctgaaggaggcctgccgggcctacggcctgaagagcggcctgaagaagcaggagctgctggaggccctgaccaagcacttccaggactag

SEQ ID NO: 107354 - DNA, 1431 bp, Artificial Sequence
  derived and/or modified sequence
atgatgggccacggcagtgactacagcctgtctgaggtgctgtgggtgtgtgccaacctcttcagtgatgtgcagttcaagatgagccacaagaggatcatgctgttcaccaatgaagacaacccccatggaaatgattctgccaaggccagccgggcccggaccaaggccggggacctgcgggacaccggcatcttcctggacctgatgcacctgaagaagccaggcggctttgacatcagcctcttctacagagacatcatcagcattgctgaagatgaggacctgcgggtgcactttgaggagagcagcaagctggaggacctgctgaggaaggtgcgggccaaggagaccaggaagagggccctgagccggctgaagctgaagctgaacaaggacatcgtcatctctgtgggcatctacaacctggtgcagaaggccctgaagcccccacccatcaagctgtaccgggagaccaatgaacctgtgaagaccaagaccaggaccttcaacaccagcactggaggcctgctgctgcccagcgacaccaagaggagccagatctacggcagccggcagatcatcctggagaaggaggagacagaggagctgaagagatttgatgaccccggcctgatgctgatgggcttcaagcccctggtgctgctgaagaagcaccactacctgcggcccagcctgtttgtgtacccagaggagagcctggtgattggcagcagcaccctcttcagcgccctgctgatcaagtgcctggagaaggaggtggccgccctgtgccgctacacccccaggaggaacatccccccctactttgtggccctggtgccccaggaggaggagctggatgaccagaagatccaggtgaccccacctggcttccagctggtgttcctgccctttgctgatgacaagaggaagatgcccttcacagagaagatcatggccaccccagagcaggtgggcaagatgaaggccatcgtggagaagctgcgcttcacctacagaagtgacagctttgagaaccctgtgctgcagcagcacttcaggaacctggaggccctggccctggacctgatggagcctgagcaggccgtggacctgaccctgcccaaggtggaggccatgaacaagaggctgggcagcctggtggatgagttcaaggagctggtgtaccccccagactacaaccctgagggcaaggtgaccaagaggaagcatgacaatgaaggcagcggcagcaagaggcccaaggtggagtacagcgaggaggagctgaagacccacatcagcaagggcaccctgggcaagttcaccgtgcccatgctgaaggaggcctgccgggcctacggcctgaagagcggcctgaagaagcaggagctgctggaggccctgaccaagcacttccaggactag

SEQ ID NO: 107355 - DNA, 1680 bp, Artificial Sequence
  derived and/or modified sequence
atgaagaagcagcggaagaacaagaagcggaccctgaagcaggtgtgtatccagtcggtctacatcagcaaaatcatatcctcggatagggatctgcttgcggttgtcttctatggaacagagaaggacaaaaatagcgtgaatttcaagaacatttatgtgctgcaggaactggacaatccgggagctaagagaatcctggaactggaccagtttaaggggcagcagggacagaaacggttccaagatatgatgggccatggctctgactactcgttatctgaggtgctgtgggtatgcgcgaatctgttctcggacgtccaatttaagatgtctcataaacggatcatgctgtttaccaacgaagacaacccccatggaaacgacagcgccaaagcttcaagagcccgtaccaaagctggcgacctccgggatactggcatattcttagatctgatgcacttgaaaaaaccaggcgggtttgacatatccctattctatcgcgatataatcagcatcgcagaggacgaggacctccgagtgcacttcgaggaaagcagtaagctggaggatcttctacgcaaggtgcgcgctaaagaaacccgcaagagagcccttagccggctgaagctcaaactcaataaggatattgtgataagcgtcggaatctacaatctggtccagaaggcactgaaacctcccccaatcaagctttatcgcgagacaaacgagccagtgaaaactaagacaaggacattcaacacgtcgaccggcggcttgctcctgccgagtgacactaagcgtagccagatttatggatccaggcagatcatcttagagaaggaagagactgaagagctaaagcggttcgatgaccctgggttgatgctgatgggattcaagccactggtgctccttaaaaaacatcactatttgaggccttccttgtttgtgtatcccgaagaaagtctcgtcataggatccagcactctattcagcgctttgctgattaagtgcctggagaaggaggtggcagcgttatgcaggtacaccccaaggagaaacattccaccttactttgttgcgctggtacctcaggaggaggagttggacgatcagaagattcaggtgacacccccggggtttcagctggttttcctgcctttcgccgatgataagcggaagatgccttttacagagaagatcatggcaacccccgaacaggtcggcaaaatgaaagccatcgtggagaaacttaggtttacctacagatctgattcttttgaaaatcctgtgctgcagcagcacttcagaaacctggaggcccttgccctcgacctgatggaacccgagcaggctgtggacctgacccttcctaaggttgaagccatgaataaacggttaggtagcttagtagacgagttcaaagagttagtttacccaccggactataatcccgaaggcaaggtgacaaagcggaaacatgacaatgagggcagcggatccaagcggccaaaggtcgaatacagcgaggaggagctgaagactcacataagtaaaggcaccctgggcaagttcacggtgccaatgctcaaagaggcttgccgcgcctacgggttgaaatcaggactgaaaaaacaggagctgctggaagctctgacaaagcacttccaggactag

SEQ ID NO: 107356 - DNA, 1431 bp, Artificial Sequence
  derived and/or modified sequence
atgatgggccacggcagcgactacagcctgagcgaggtgctgtgggtgtgtgccaatctgttctcagatgtccagtttaagatgtctcacaaacgcattatgttgtttacgaacgaggacaacccacacggaaatgattctgctaaagcatcccgcgcgcgtactaaggctggagatctgagggacaccggaatattccttgacctgatgcacctgaaaaagcctggtggattcgatatcagcctgttctacagggatatcatttcgatcgctgaagacgaggatctgcgggtccacttcgaagagtcctctaaactcgaggacctgctgcgaaaagtacgggcaaaggagactcgcaaacgggctctaagtcggttgaaactgaagcttaataaagacattgtgatttctgtgggcatatacaatctggtgcagaaggctctcaaaccaccaccaattaagctttaccgagagaccaacgagcccgtcaagacgaagactaggactttcaacacctctactggtggcctccttctcccaagtgatacaaagcggtcgcagatttatggcagccgccaaatcatcctggaaaaggaagagaccgaagaattgaaaaggttcgatgatcctggcctgatgcttatgggtttcaagcccttggtactccttaaaaaacaccactatctgcggcctagtttatttgtgtacccggaggagagcttagtcataggcagtagtactttattctcggcactgttgattaagtgcctggaaaaagaggttgccgccttatgccggtatactcccaggcgcaacattccaccatatttcgttgccttagtccctcaggaggaagaactggatgatcagaaaatccaggtaacaccccccggcttccagcttgtctttctcccatttgctgatgacaagcggaagatgcctttcaccgagaaaattatggcgacaccagagcaggtcggaaagatgaaggccatagtggagaaactacgttttacttaccggtccgactcctttgagaaccctgttctccagcagcatttcaggaatctggaggcactcgctctcgatttaatggaaccggaacaggcggtcgacctgactctgccaaaggtcgaggccatgaacaaacgtctcggtagcctcgtagacgaatttaaggagttggtctacccgcccgactataacccagaggggaaggtgacaaaacggaagcatgataacgaggggtctggatctaaacggccaaaggttgagtacagcgaggaagaacttaaaacccacatttcaaaagggacactgggaaagttcaccgtgcctatgctgaaggaagcgtgtcgagcctatgggttgaagtccggtttgaagaagcaggagttgcttgaagctctgacgaagcacttccaggactag

SEQ ID NO: 107357 - DNA, 1680 bp, Artificial Sequence
  derived and/or modified sequence
atgaaaaaacaaaggaagaacaaaaagagaactcttaagcaggtgtgtatccagtcagtttacatcagtaaaatcatcagctccgaccgtgacttgctggccgttgtattttatggaaccgagaaagacaagaactctgtgaattttaagaacatctatgtgctgcaggagctggataaccctggagccaaacgcattctcgaactggatcagttcaagggccagcagggccagaagaggttccaggatatgatgggccatggttcggactattcattgagtgaggtcctctgggtttgtgcgaatctcttctccgacgttcaattcaagatgagccataagcgaattatgctcttcaccaacgaggataacccccacggcaatgatagtgcaaaagcgtcccgcgctcgaaccaaggctggagatttaagggatactgggatcttcttggacttgatgcacttaaagaaaccagggggattcgatataagtctgttctaccgggatattatcagcatcgcggaggacgaagatttgcgcgtacactttgaagaatctagcaaactcgaggacctccttagaaaggtcagggccaaggaaaccaggaaaagggcgctaagtagattgaagctgaaactgaacaaagatatagtcatcagcgtcggaatctataacctggtgcaaaaagcccttaaaccccctccaatcaaactttatagagaaacgaacgagcctgttaagaccaaaaccaggactttcaacaccagtaccggtggcctgctgctgccgtccgacaccaagagatcacagatctacggctccagacagataatcctagaaaaagaggagacggaggagctcaagagattcgatgatcccggacttatgcttatgggctttaagcctctggtcctcctaaagaaacaccactacctgaggccatctcttttcgtgtatccagaggagagcttggtcattggttcatccacactgttctccgccctcctaattaagtgccttgagaaggaggtcgctgcgctatgccgctacacacctcgcagaaatattcctccctactttgtggcactggtaccccaggaggaagagttggatgatcagaaaatccaggtgacgccccctgggttccagctggtgttcctaccctttgcagatgacaagagaaagatgccttttacagagaagattatggccaccccagagcaggttggcaaaatgaaagcaattgtggagaagttaaggttcacatacagatctgactctttcgaaaaccccgttctgcagcagcacttcagaaacttagaggccctggctttagatctgatggagccagaacaggccgttgatctgactctgcccaaagttgaggcaatgaacaagcgactgggatcccttgtcgatgagtttaaagaactggtgtatcctccagattacaatcctgagggaaaggtgaccaagcggaagcacgataacgaaggctctgggtccaaacgcccaaaggtcgaatactcagaagaggaactgaagacgcacatttctaaaggaaccttagggaagttcaccgtacccatgctgaaggaggcttgcagagcctatggcctgaagagcggccttaagaagcaggaactgctcgaggctctgaccaagcactttcaagactag

SEQ ID NO: 107358 - DNA, 1431 bp, Artificial Sequence
  derived and/or modified sequence
atgatgggccatggttccgattattctctgtcggaagtgctgtgggtctgcgcaaacctcttcagcgatgtgcaattcaagatgtcacacaaaagaatcatgctttttacaaatgaagataacccccacggcaacgattccgctaaggcttcacgcgcacggaccaaggccggtgaccttcgagacaccggaatcttcctggacctgatgcacctgaaaaaacccggaggtttcgatatttccctgttctaccgcgacattatttcaatagccgaagacgaggatttgcgtgtccatttcgaagagagttccaagctagaggacctgctacgcaaggtgcgtgctaaggagacccggaaacgggctctgtcccgcctaaagctgaagctgaataaggatattgtgatctctgtcggtatatataacctggtgcaaaaggccctgaaacctcccccaatcaagttatatcgtgaaaccaacgaacccgtcaagactaagacacgcaccttcaatacctccacaggaggattgttgttgcccagtgacactaaaaggagccagatttacggaagcaggcagatcattctggagaaagaggaaacggaagaactgaaaaggttcgacgaccccggattaatgcttatggggttcaagcctctagtcctgctcaaaaagcatcactatctgaggccctcacttttcgtctaccctgaggaatccctcgttatcggctcgtcgacccttttctccgccctgctgataaagtgtctggagaaagaggttgccgctttgtgccggtacacgccacgacgtaacatcccaccctattttgtagccctagttcctcaggaagaagagctcgacgatcagaaaatccaagtaacgccacctggcttccaactagtgtttctgccatttgctgatgataaacggaagatgcctttcactgaaaaaataatggctactcctgaacaggtgggaaaaatgaaagcaatcgtggagaaactgcgatttacgtacagatctgattcattcgagaaccccgtgctgcaacagcatttccgcaatctggaggctctggcgctagacttaatggagcccgagcaagccgtggacttaactctgcccaaagtagaggccatgaataagcggctcggctcccttgtggacgagtttaaagaacttgtgtacccacccgattacaacccggagggcaaggttaccaagagaaagcatgataacgaaggcagcggtagcaaaagaccgaaggtggagtactccgaagaggaactaaaaacccacatttctaaaggcaccctgggcaaattcaccgtgcccatgctgaaagaggcatgccgcgcttatggtttgaaatcaggactgaaaaaacaggaactactcgaagccctcactaagcatttccaggactag

SEQ ID NO: 107359 - DNA, 1958 bp, Artificial Sequence
  derived and/or modified sequence
cgcctagtgagcagtagccaacatgtcagggtgggagtcatattacaaaaccgagggcgatgaagaagcagaggaagaacaagaagagaaccttgaagcaagtgtgtatccaaagtgtgtacatcagtaagatcataagcagtgatcgagatctcttggctgtggtgttctatggtaccgagaaagacaaaaattcagtgaattttaaaaatatttacgtcttacaggagctggataatccaggtgcaaaacgaattctagagcttgaccagtttaaggggcagcagggacaaaaacgtttccaagacatgatgggccacggatctgactactcactcagtgaagtgctgtgggtctgtgccaacctctttagtgatgtccaattcaagatgagtcataagaggatcatgctgttcaccaatgaagacaacccccatggcaatgacagtgccaaagccagccgggccaggaccaaagccggtgatctccgagatacaggcatcttccttgacttgatgcacctgaagaaacctgggggctttgacatatccttgttctacagagatatcatcagcatagcagaggatgaggacctcagggttcactttgaggaatccagcaagctagaagacctgttgcggaaggttcgcgccaaggagaccaggaagcgagcactcagcaggttaaagctgaagctcaacaaagatatagtgatctctgtgggcatttataatctggtccagaaggctctcaagcctcctccaataaagctctatcgggaaacaaatgaaccagtgaaaaccaagacccggacctttaatacaagtacaggcggtttgcttctgcctagcgataccaagaggtctcagatctatgggagtcgtcagattatactggagaaagaggaaacagaagagctaaaacggtttgatgatccaggtttgatgctcatgggtttcaagccgttggtactgctgaagaaacaccattacctgaggccctccctgttcgtgtacccagaggagtcgctggtgattgggagctcaaccctgttcagtgctctgctcatcaagtgtctggagaaggaggttgcagcattgtgcagatacacaccccgcaggaacatccctccttattttgtggctttggtgccacaggaagaagagttggatgaccagaaaattcaggtgactcctccaggcttccagctggtctttttaccctttgctgatgataaaaggaagatgccctttactgaaaaaatcatggcaactccagagcaggtgggcaagatgaaggctatcgttgagaagcttcgcttcacatacagaagtgacagctttgagaaccccgtgctgcagcagcacttcaggaacctggaggccttggccttggatttgatggagccggaacaagcagtggacctgacattgcccaaggttgaagcaatgaataaaagactgggctccttggtggatgagtttaaggagcttgtttacccaccagattacaatcctgaagggaaagttaccaagagaaaacacgataatgaaggttctggaagcaaaaggcccaaggtggagtattcagaagaggagctgaagacccacatcagcaagggtacgctgggcaagttcactgtgcccatgctgaaagaggcctgccgggcttacgggctgaagagtgggctgaagaagcaggagctgctggaagccctcaccaagcacttccaggactgaccagaggccgcgcgtccagctgcccttccgcagtgtggccaggctgcctggccttgtcctcagccagttaaaatgtgtttctcctgagctaggaagagtctacccgacataagtcgagggactttatgtttttgaggctttctgttgccatggtgatggtgtagccctcccactttgctgttccttactttactgcctgaataaagagccctaagtttg

SEQ ID NO: 107360 - DNA, 1995 bp, Artificial Sequence
  derived and/or modified sequence
gtcgtcttctgtccaagttggtcgcttccctgcgccaaagtgagcagtagccaacatgtcagggtgggagtcatattacaaaaccgagggcgatgaagaagcagaggaagaacaagaagagaaccttgaagcaagtgtgtatccaaagtgtgtacatcagtaagatcataagcagtgatcgagatctcttggctgtggtgttctatggtaccgagaaagacaaaaattcagtgaattttaaaaatatttacgtcttacaggagctggataatccaggtgcaaaacgaattctagagcttgaccagtttaaggggcagcagggacaaaaacgtttccaagacatgatgggccacggatctgactactcactcagtgaagtgctgtgggtctgtgccaacctctttagtgatgtccaattcaagatgagtcataagaggatcatgctgttcaccaatgaagacaacccccatggcaatgacagtgccaaagccagccgggccaggaccaaagccggtgatctccgagatacaggcatcttccttgacttgatgcacctgaagaaacctgggggctttgacatatccttgttctacagagatatcatcagcatagcagaggatgaggacctcagggttcactttgaggaatccagcaagctagaagacctgttgcggaaggttcgcgccaaggagaccaggaagcgagcactcagcaggttaaagctgaagctcaacaaagatatagtgatctctgtgggcatttataatctggtccagaaggctctcaagcctcctccaataaagctctatcgggaaacaaatgaaccagtgaaaaccaagacccggacctttaatacaagtacaggcggtttgcttctgcctagcgataccaagaggtctcagatctatgggagtcgtcagattatactggagaaagaggaaacagaagagctaaaacggtttgatgatccaggtttgatgctcatgggtttcaagccgttggtactgctgaagaaacaccattacctgaggccctccctgttcgtgtacccagaggagtcgctggtgattgggagctcaaccctgttcagtgctctgctcatcaagtgtctggagaaggaggttgcagcattgtgcagatacacaccccgcaggaacatccctccttattttgtggctttggtgccacaggaagaagagttggatgaccagaaaattcaggtgactcctccaggcttccagctggtctttttaccctttgctgatgataaaaggaagatgccctttactgaaaaaatcatggcaactccagagcaggtgggcaagatgaaggctatcgttgagaagcttcgcttcacatacagaagtgacagctttgagaaccccgtgctgcagcagcacttcaggaacctggaggccttggccttggatttgatggagccggaacaagcagtggacctgacattgcccaaggttgaagcaatgaataaaagactgggctccttggtggatgagtttaaggagcttgtttacccaccagattacaatcctgaagggaaagttaccaagagaaaacacgataatgaaggttctggaagcaaaaggcccaaggtggagtattcagaagaggagctgaagacccacatcagcaagggtacgctgggcaagttcactgtgcccatgctgaaagaggcctgccgggcttacgggctgaagagtgggctgaagaagcaggagctgctggaagccctcaccaagcacttccaggactgaccagaggccgcgcgtccagctgcccttccgcagtgtggccaggctgcctggccttgtcctcagccagttaaaatgtgtttctcctgagctaggaagagtctacccgacataagtcgagggactttatgtttttgaggctttctgttgccatggtgatggtgtagccctcccactttgctgttccttactttactgcctgaataaagagccctaagtttgtact

SEQ ID NO: 107361 - DNA, 87 bp, Artificial Sequence
  derived and/or modified sequence
ctgtgcttcctgctgtgcggcttcaacgagagaaacctgaacatggccgtgaagttccagaagttccaggccttcgactggggctag

SEQ ID NO: 107362 - DNA, 87 bp, Artificial Sequence
  derived and/or modified sequence
ctgtgcttcctcttgtgcggttttaatgaaaggaaccttaatatggccgtgaagttccagaagttccaggccttcgactgggggtag

SEQ ID NO: 107363 - DNA, 87 bp, Artificial Sequence
  derived and/or modified sequence
ctctgcttcctgctgtgtggcttcaatgaaagaaacctgaacatggctgtgaagttccagaagttccaggcctttgactggggctag

SEQ ID NO: 107364 - DNA, 87 bp, Artificial Sequence
  derived and/or modified sequence
ctgtgcttcctgctgtgcggcttcaacgagcggaacctgaacatggccgtgaaatttcaaaaatttcaggctttcgactggggctag

SEQ ID NO: 107365 - DNA, 87 bp, Artificial Sequence
  derived and/or modified sequence
ttgtgctttttgctctgtgggtttaacgagcgcaacctgaacatggccgtcaaattccagaagttccaggccttcgactggggttag

SEQ ID NO: 107366 - DNA, 87 bp, Artificial Sequence
  derived and/or modified sequence
ctgtgttttttactctgtggattcaacgagcgaaacttaaacatggctgtgaaattccaaaaattccaggcctttgattgggggtag

SEQ ID NO: 107367 - DNA, 84 bp, Artificial Sequence
  derived and/or modified sequence
ctctgttttcttctgtgtggatttaatgagagaaatttaaatatggctgttaaattccaaaagtttcaagcctttgactgggga

SEQ ID NO: 107368 - RNA, 87 nt, Artificial Sequence
  derived and/or modified sequence
cuguguuuuuuacucuguggauucaacgagcgaaacuuaaacauggcugugaaauuccaaaaauuccaggccuuugauuggggguag

SEQ ID NO: 107369 - protein, 533 aa, Artificial Sequence
  derived and/or modified sequence
MAKSKTKHRLCSQESSVSALLASCTLSGSNSSNSDGSFHYKDKLYRSASQALQAYIDDFDLGQIYPGASTGKINIDEDFTNMSQFCNYIYKPNNAFENLDHKKHSNFISCRRHTVNDIDSMSLTTDDLLRLPADGSFSYTYVGPSHRTSKKNKKCRGRLGSLDIEKNPHFQGPYTSMGKDNFVTPVIRSNINGKQCGRLKNPKLMNRTNNCISESSLSFPKKSSFKDSSEHSLEKNYPRWLTSQKSDLNVSGITSIPDFKYPVWLHNQDLLPDANSQRVYQIFKDDQCSPRHSHQAQGTSRLINKLDCFEYAFEPSNFSNSLSDDKELVNEYKCDFEHSQCQCENPLLPGQSTKPFSGDKIELLILKAKRNLEQCTEELPKSMKKDDSPCSLDKLEADRSWENIPVTFKSPVPVNSDDSPQQTSRAKSAKGVLEDFLNNDNQSCTLSGGKHHGPVEALKQMLFNLQAVQERFNQNKTTDPKEEIKQVSEDDFSKLQLKESMIPITRSLQKALHHLSRLRDLVDDTNGERSPKM

SEQ ID NO: 107370 - DNA, 1602 bp, Artificial Sequence
  derived and/or modified sequence
atggcaaaaagcaaaacaaagcacaggctttgctcccaggaatccagcgtgtccgcccttctcgctagttgcacactctccgggagtaattcctctaacagtgatgggtcctttcactataaagataagttatacagatctgcgtcccaggcactccaggcctacatcgacgattttgacctgggacaaatatatcctggggcttcaaccggtaaaattaacatcgatgaggattttaccaacatgtcacaattttgtaattacatttataagcccaataatgccttcgagaacctggaccataagaagcactcgaatttcattagttgccgccgacacaccgtgaacgacattgactctatgagcctgaccacagatgacctgctcagactccctgccgacggttcattctcctacacatacgtaggcccatcgcatcgaacatctaagaagaacaagaaatgtcggggtagactgggtagcctcgacatcgaaaaaaaccctcacttccaaggtccttatacctccatgggaaaggacaacttcgtgacgcccgtaatccgttctaacattaatggaaagcagtgcggcaggctcaagaacccaaagctgatgaatcgaacgaacaattgtatttccgaatcttctctgtccttcccaaagaagagttccttcaaggattcttcagaacattcactcgagaaaaattaccctcggtggttgacaagccagaagtctgacttgaatgtctctggtattacatccattcctgactttaagtaccccgtctggctgcataaccaggatttactgcccgacgcaaactcccagcgggtgtatcaaatttttaaggatgatcagtgctcaccccggcactcacaccaggctcaggggacaagtcggttaatcaacaagctcgactgctttgagtatgcattcgaaccatctaactttagcaactccctgtctgacgacaaggagctggtgaacgagtacaaatgcgattttgaacactctcagtgtcagtgtgagaaccccctgctccctggccaatcaaccaaacccttctctggcgacaagatcgaactcctgattctgaaagccaagcgcaacttggaacaatgcacagaggagcttcctaagtcgatgaaaaaagatgattctccatgcagtctagacaagcttgaagctgaccggagctgggaaaacattcccgtcacatttaagagcccagtcccagtgaatagcgacgattcacctcaacaaacgagtcgggcaaagtcggcaaagggcgtgttagaggattttttgaacaacgacaaccagagctgcacactgtcaggaggcaagcatcatggcccagtggaggctctaaagcagatgttgtttaatcttcaggcagtgcaggaacggttcaatcagaataaaactaccgacccaaaggaagaaattaaacaagtttcggaagacgatttctcgaaactgcaactgaaggagtctatgatccccatcacaagatctctccagaaggccctacatcatctgtctagactgcgagacctggtggatgacactaacggcgagcggtctcctaagatgtag

SEQ ID NO: 107371 - DNA, 1602 bp, Artificial Sequence
  derived and/or modified sequence
atggccaagagcaagaccaagcaccggctgtgcagccaggagagctctgtgtctgccctgctggccagctgcaccctgagcggcagcaacagcagcaacagtgatggcagcttccactacaaggacaagctgtacagaagtgccagccaggccctgcaggcctacattgatgactttgacctgggccagatctacccaggggccagcacaggcaagatcaacattgatgaggacttcaccaacatgagccagttctgcaactacatctacaagcccaacaatgcctttgagaacctggaccacaagaagcacagcaacttcatcagctgcagaagacacacagtgaatgacatcgacagcatgagcctgaccacagatgacctgctgcggctgcctgcagatggcagcttctcctacacctacgtgggccccagccacaggaccagcaagaagaacaagaagtgccggggccgcctgggcagcctggacatcgagaagaacccccacttccagggcccctacacctccatgggcaaggacaactttgtgacccctgtgatccgcagcaacatcaacgggaagcagtgtggccgcctgaagaaccccaagctgatgaacagaaccaacaactgcatcagcgagagcagcctgtccttccccaagaagagcagcttcaaggacagcagcgagcacagcctggagaagaactacccccgctggctgaccagccagaagagtgacctgaatgtgtctggcatcaccagcatcccagacttcaagtaccctgtgtggctgcacaaccaggacctgctgcctgatgccaacagccagagggtgtaccagatcttcaaggatgaccagtgcagccccaggcacagccaccaggcccagggcaccagccgcctcatcaacaagctggactgctttgaatatgcctttgagcccagcaacttcagcaacagcctgagtgatgacaaggagctggtgaatgagtacaagtgtgactttgagcacagccagtgccagtgtgagaaccccctgctgcccggccagagcaccaagcccttcagcggggacaagattgagctgctgatcctgaaggccaagaggaacctggagcagtgcacagaggagctgcccaagtccatgaagaaggatgacagcccctgcagcctggacaagctggaggccgaccgctcctgggagaacatccctgtgaccttcaagagccctgtgcctgtgaacagtgatgacagcccccagcagaccagccgggccaagagcgccaagggcgtgctggaggacttcctgaacaatgacaaccagagctgcaccctgagcggcggcaagcaccacggccctgtggaggccctgaagcagatgctgttcaacctgcaggccgtgcaggagcgcttcaaccagaacaagaccacagaccccaaggaggagatcaagcaggtgtctgaagatgacttcagcaagctgcagctgaaggagagcatgatccccatcaccaggagcctgcagaaggccctgcaccacctgagccggctgcgggacctggtggatgacaccaacggggagaggagccccaagatgtag

SEQ ID NO: 107372 - DNA, 1602 bp, Artificial Sequence
  derived and/or modified sequence
atggccaagagcaagaccaagcaccggctgtgcagccaggagagctccgtgtccgcactcctcgcctcatgcacactctcaggtagtaattcctcaaattcggacggtagcttccactacaaagacaaactgtataggtcggcaagtcaggcactgcaggcgtatatcgatgattttgacttgggtcagatttacccaggggcatctacaggcaaaatcaatattgacgaggacttcactaacatgtcccaattttgcaactacatctataaacccaataatgctttcgaaaaccttgaccataaaaaacactcaaattttataagctgcagaagacacaccgttaatgatattgactcaatgtccctcacgactgacgatctcttgcgcctccccgctgacgggtctttttcgtatacctatgtaggcccttctcaccggactagtaagaagaacaagaagtgccgcggacggctagggagtctagacatcgagaagaacccccacttccaggggccatatacctccatggggaaggataatttcgtaacacccgtaatcaggagcaatatcaacgggaagcagtgcggacgcctgaaaaaccccaagctcatgaatcgaacaaataactgtatcagtgagagcagcctcagctttcctaaaaagtcctcattcaaggacagctctgagcactcattagaaaaaaactatcctcgatggctgacatcccagaagagcgatctaaacgtttctggcataacatcaatcccagacttcaagtaccctgtgtggctccacaaccaggacctgttgccagatgctaactctcagagagtgtatcagatttttaaagacgatcagtgcagtccacgtcatagtcatcaggctcagggcacatcgcgtctgattaacaagctggattgttttgaatatgcctttgaaccctctaacttttctaatagcctcagcgacgacaaggaactagtcaatgaatataaatgcgactttgaacactctcagtgccagtgcgagaatcctctgttaccagggcagagcaccaagcccttttccggcgataaaattgaactgctcattctgaaagcaaagcgtaacctggagcagtgcaccgaggaactccccaaaagcatgaaaaaagatgactcaccctgctctctggacaaattagaggctgacaggtcttgggaaaacattccagtgacctttaagtcacctgtgcctgtgaacagcgatgatagcccacaacagacttcccgcgctaaaagcgcaaagggagttctggaagactttctgaataatgacaaccagagctgcaccctgagtggcgggaagcaccatgggccagtggaagctctcaagcaaatgctttttaacttgcaagccgtgcaagagagattcaatcaaaataagactaccgacccgaaggaagagatcaaacaggtaagcgaggatgatttctctaaattgcaattgaaggagagcatgattcccatcactaggtcccttcagaaagctctacaccatctgtctagactgagagatctggtcgacgacacgaatggggagaggagtccgaagatgtag

SEQ ID NO: 107373 - DNA, 1602 bp, Artificial Sequence
  derived and/or modified sequence
atggccaaatccaaaaccaagcaccgtttgtgcagtcaggaaagctccgtttccgccttgttggcctcatgtacattatcaggctcaaactcttcaaacagtgacggttcctttcattacaaagataagctgtaccggtctgcctcccaggccctccaggcttatattgacgatttcgacctcggacagatctatccaggggctagcacggggaagatcaatatagatgaggactttaccaatatgagtcagttctgcaattacatttataagccgaacaacgccttcgaaaatctggatcacaaaaagcactctaactttatcagttgcagaagacacactgtgaacgatattgattcaatgagtttgaccacagacgacctgctccgcttgcctgcagacgggagcttctcttacacttacgtggggccaagtcacaggaccagcaaaaaaaataaaaaatgccgaggcagactgggttcactggatattgagaagaacccccacttccaaggaccgtacacttccatgggaaaggacaattttgtgaccccagtaatccggtctaatataaatggtaagcaatgtggacggctcaaaaatccaaagctgatgaatagaactaataattgcatctcagaatccagcctgagcttccccaaaaaatcctctttcaaggatagctccgaacatagcttggagaaaaattacccgaggtggttgacaagccagaaatcggacctgaatgtaagcgggatcacttccatacctgatttcaagtacccagtatggctgcacaatcaggatcttcttcccgacgctaactcacagcgggtctatcaaattttcaaagatgatcagtgctcccccaggcactctcaccaggcccaaggcactagtcggctgattaacaagctggactgctttgaatacgccttcgagcccagtaatttttctaacagcctgtcagacgacaaagaactggtgaacgaatacaaatgcgacttcgaacatagccagtgccaatgcgaaaatcccctcctgccgggacagtccactaagccctttagcggagacaaaatcgagctattgatcttgaaagctaaacgcaacctggagcagtgcacagaagagctccccaaaagcatgaagaaagacgattccccatgcagcctggataagttagaagccgatcgctcatgggagaatataccggtgactttcaagagccccgtacctgttaactcagacgattccccacagcagacctccagggccaagagcgccaaaggggtgctggaggacttcctaaacaatgacaatcagagctgtactcttagtggcggtaagcatcacggcccagtggaggccttaaaacaaatgctgttcaatcttcaggccgtccaggaaaggtttaatcagaataaaaccaccgacccaaaagaggagattaaacaggtgagcgaggacgacttttctaagctgcagttgaaagaatctatgatacctattacgcggagcctgcaaaaggctcttcaccaccttagtagactgagggacttggtcgacgacactaatggtgaaagatccccaaaaatgtag

SEQ ID NO: 107374 - DNA, 5506 bp, Artificial Sequence
  derived and/or modified sequence
taacattctgttcttccgcgtgatggattttcttttggagattcgaactgaagcctgtacggaggaaatgttgtttttaagggaaatgaatagaaacaatccactttgaagaagccatggcgaaatcaaagacaaaacatagactttgttctcaggaatcttcagtatctgccctgctggcaagctgcaccctgagtggtagtaattcctctaattctgatggctcgtttcactataaagataagctgtacagatctgcttctcaagctctacaggcttatattgatgattttgatctaggccaaatatatcctggtgcaagcactggaaaaattaacattgatgaggattttactaatatgtcacagttctgcaactatatttacaaaccaaacaatgcttttgaaaaccttgatcacaaaaagcactcaaacttcatatcctgtagaagacacaccgttaatgacatagactccatgagcctaacaactgatgatctattaagactcccagcagatggatcattttcttatacttatgttggaccgagtcaccgaacgagcaagaaaaacaagaaatgccgtggaagactgggttcattggacattgagaagaatccacattttcaaggaccctacacttccatgggcaaggataactttgttactcctgttatacgctcaaatataaatggaaagcaatgtggtaggctgaaaaacccaaaacttatgaataggactaataattgcatttctgaatcatctttgtcttttcccaagaaatcgtctttcaaggacagttcagaacacagtcttgaaaagaattacccaagatggctcactagccagaaatctgaccttaatgtttcagggataactagtatacctgatttcaaatacccagtctggctgcacaatcaagacttgctacctgatgcaaatagtcaaagggtttatcagatatttaaagatgatcagtgttcccctagacatagtcatcaggcacaaggaacttctcggcttatcaataaattagattgttttgaatatgcttttgaaccctcaaacttttcaaattccttgagtgatgataaagaattagttaatgaatacaaatgtgattttgaacatagccagtgtcaatgtgagaatccacttctcccaggacaatccacaaagccattcagtggtgacaaaattgaattgcttatcttgaaggccaagagaaatctagagcagtgtactgaagaattaccaaagtccatgaaaaaggatgacagtccttgctcattagataaacttgaagcagacagatcatgggaaaatattcctgttactttcaaatctcctgttcccgttaactctgatgatagtcctcaacaaacttcaagggcaaagagtgctaaaggggttcttgaagactttctaaataatgataatcagagctgtactctctctggaggcaaacatcatggtcctgttgaagccctgaaacaaatgttatttaaccttcaagcagtacaagaacgttttaatcaaaataagaccacagatccaaaagaagagattaaacaagtttcagaagatgatttctctaaattacagttgaaggaaagtatgattcctattactaggtcacttcagaaggctttgcaccatttatctcgcctgagagacctggttgatgatacgaatggagaacggtcaccgaaaatgtgaagaggaaaatgaaactgtcaccacaatgaatagtcaccacagaacaaataggcattttttctattacttaaactgacaaagtaaatataagccatacattattttgtggttggttcaaggattatatatttctaaaacactaaacttgaaaatacccataggttttgggacctatctttattttgtgccaacatactagaatgtgaactgcaaggacccacaatatatcctgaagtcttactttcgccttctggccagcaaatgtctaatatttaaagatggatgacttctgttcttgaagcttacctggatttaaccttcttcagcatcctcaacattttattacctggttcaggatcattaagaaacttactggtttttatccaaaatcttttacgttaaatagacttttttaaagatatagttagcatcacttttaaacagcttaaaggaatatcaaaattgttattgtgtatctcatctataaggaagtctgttactttgaaattttcataaatttaatatttaagatacattgtatttgaaaattgcattaatagtggggtgatactgtgttaaaaggaatgttgtgttgtgacattcaagagaacctcctcatttaattagtactttgattctgtgtaagataatcttggtagtgcttgacagtttccaaacctttttttggagagatatttaagaatttaatattttgatattagattgtttcccagattttaattttggggttggctcaaactagtgaaaactatgactcaatggccaattgctttatcaaatttgataactaaaacttaaaatgaatatggaaaatcagaaagcaactctattttagagctattttgtaagagttgtgctttctttaacaccatctgtagtcttaagtttgtctctagctagaactgaacaaagctctataatttttaccaagcacttattattaatacttcttataagtagtaagcatctttactaacacaactgagaattaagtcataaaacataactaatacagcacattactgcctgacaaaattaaagagtactgtgtgtatgtataactactacaggttaacacttcacccaaatgatagcgtttttcctcagtagattattgtcaaataggaatttctaagcacattgagtcaaagcattttttccaagttaataaagtgttatttactatctttgttagaggtgacatgtcaaacactacagtgagctctgtggggttttttttttttttttttgcccgtgagttttttaccatgctgctctgaccagtttgagtggcaattaccaatagatttgttttctttattctatggagatgtttttaccactgacactgttttctgattatagtctgcttcatagaaaatagcctgcataatcaaacaaggagttactttgaaattaaagtatgcctggctattaaaaatgcagattttaggtgggtaaacatcaggtaggtctgggtgggtcatgttctaggcctagaaaaatacactattagacaagttctaaagaaggcaaggagataaaggcatcaggtggtaacttctaattgaatattatatgttgatcatacataatatatactatgcctggaaattatgactgaaaagcacctattcggttagtgctcctattcatgagaacatatctccaatactaaatgagataagcctgttctaaaatcttatagccagtattttaagaaacttgattatacttaccaaaggaacattgtttgttttctcttgttttaaatatggagaggtttaatcctttacataacaaaggaattaattttagcaaaatgattcattccaaccttcttataagaaatatctaggagagtcaagtaagaaaaataacgaatctaagtgataaacattcaagaaattctctaaataagagatttatttataattttaatatctcagggttctttttaggtttccaggggaaaagagcaggataacagtgtggagactgctaagttgagaatttaaaacaaatgagaacataagatttttaaaattgcattgtgaatgtaaaatttttatcaatcctttgctctcttttagacatattgagaaaatgttaaatagaaaaaattaagaaattttaataagatgtttcagatctttgagtatgaaaaacataacaaaaaaagcctaatttcaaaaaactatttgagatcaagggacaatggtgtgaccaatatgaagggtcaagactgaaatgtattgtctttactatcaagaactctactttcagttgtttctcagacagttaatttcagcttcatagagatttctgagcaaattaagaaacactgttttcctgggtttgttttgggtatatgtcattatagttatgttatttcttgttgaaatttataattgtaggttttttgtattgttttagtatttaatggtgtataatgtgttattacattatatgtagttataccaaaatattgcctgaagataaatcatgacaaggtcccctgtttattcctgtgttacagacgcatggaattgctcctgtagatttgaatttttgtttcatttttttctgtcccacccttcactctctctgtttcagaacatttttggtagaagtgctatccagaagtgaacttgtcaaaaggcaagtagcatgaaagaagacagaagaagcaaaaggctaatacagtggataatttctgagcacttgaagtttcttcaaatgtgcaagactgtgtgtcttcctattagatgtataaattggatatttcatgcctaattaaatgttgcgttggattgcagtgcctatcatacagtgattggagtaaattgaggcctaatcctgaacacatatagagcatattgttagatatttttcctgtgacatttgaagttattattctcccatttcctttttctttttttgtttataatcatatgtccctaagattgttttccttttttggaccaaaaaaaagaaaaaaaaaatcttagcttttcatcctcccagtgtattctgcattgtccttaccctagatcagccccttctgtgttaacagtttttctcacaatgtagcaacttttatccacccttcaggaccttcactgggactagttcattcattttcaaatagctatttcaacctttaacatctactgtcttagtcttttacacagaagccagagtgactggtcttggcaagactctgttgtgtatcaccactctaaccttactgatttgtttcagcaaatttgctttagttaaattgctttactcagattcccccaaactttatatgtgtattgtcatctttgtgcatattatttctcatgcatgaaatactcaatttttattcttttatctaacgcttactcttacatttctttaaagctctggccaagtattttatttcgtccctaaacattctaactatccaccaaactggtaagttggcttttctttttcctccccctgtcattcatttagctgttatatttcattttaatgttttgggtggtgcctcttatactatgttgtattcctagacaaggaaatgtatatcaaaatatgttagatgattgattgttttatctccttgatgatagcacctcttatactgctttacagaatcaggaaaaagtaaactgcattttacatagtggttttaaatattgattgattgatattctaaacctggtttcctatataaagttgtaagttcaagataaagagaccacattctttactca

SEQ ID NO: 107375 - DNA, 1602 bp, Artificial Sequence
  derived and/or modified sequence
atggccaagagcaagaccaagcacagactgtgcagccaggagagcagcgtgagcgccctgctggccagctgcaccctgagcggcagcaacagcagcaacagcgacggcagcttccactacaaggacaagctgtacagaagcgccagccaggccctgcaggcctacatcgacgacttcgacctgggccagatctaccccggcgccagcaccggcaagatcaacatcgacgaggacttcaccaacatgagccagttctgcaactacatctacaagcccaacaacgccttcgagaacctggaccacaagaagcacagcaacttcatcagctgcagaagacacaccgtgaacgacatcgacagcatgagcctgaccaccgacgacctgctgagactgcccgccgacggcagcttcagctacacctacgtgggccccagccacagaaccagcaagaagaacaagaagtgcagaggcagactgggcagcctggacatcgagaagaacccccacttccagggcccctacaccagcatgggcaaggacaacttcgtgacccccgtgatcagaagcaacatcaacggcaagcagtgcggcagactgaagaaccccaagctgatgaacagaaccaacaactgcatcagcgagagcagcctgagcttccccaagaagagcagcttcaaggacagcagcgagcacagcctggagaagaactaccccagatggctgaccagccagaagagcgacctgaacgtgagcggcatcaccagcatccccgacttcaagtaccccgtgtggctgcacaaccaggacctgctgcccgacgccaacagccagagagtgtaccagatcttcaaggacgaccagtgcagccccagacacagccaccaggcccagggcaccagcagactgatcaacaagctggactgcttcgagtacgccttcgagcccagcaacttcagcaacagcctgagcgacgacaaggagctggtgaacgagtacaagtgcgacttcgagcacagccagtgccagtgcgagaaccccctgctgcccggccagagcaccaagcccttcagcggcgacaagatcgagctgctgatcctgaaggccaagagaaacctggagcagtgcaccgaggagctgcccaagagcatgaagaaggacgacagcccctgcagcctggacaagctggaggccgacagaagctgggagaacatccccgtgaccttcaagagccccgtgcccgtgaacagcgacgacagcccccagcagaccagcagagccaagagcgccaagggcgtgctggaggacttcctgaacaacgacaaccagagctgcaccctgagcggcggcaagcaccacggccccgtggaggccctgaagcagatgctgttcaacctgcaggccgtgcaggagagattcaaccagaacaagaccaccgaccccaaggaggagatcaagcaggtgagcgaggacgacttcagcaagctgcagctgaaggagagcatgatccccatcaccagaagcctgcagaaggccctgcaccacctgagcagactgagagacctggtggacgacaccaacggcgagagaagccccaagatgtag

SEQ ID NO: 107376 - protein, 119 aa, Artificial Sequence
  derived and/or modified sequence
MEASALTSSAVTSVAKVVRVASGSAVVLPLARIATVVIGGVVAVPMVLSAMGFTAAGIASSSIAAKMMSAAAIANGGGVASGSLVATLQSLGATGLSGLTKFILGSIGSAIAAVIARFY

SEQ ID NO: 107377 - protein, 122 aa, Artificial Sequence
  derived and/or modified sequence
MEASALTSSAVTSVAKVVRVASGSAVVLPLARIATVVIGGGESVVAVPMVLSAMGFTAAGIASSSIAAKMMSAAAIANGGGVASGSLVATLQSLGATGLSGLTKFILGSIGSAIAAVIARFY

SEQ ID NO: 107378 - protein, 62 aa, Artificial Sequence
  derived and/or modified sequence
MEASALTSSAVTSVAKVVRVASGSAVVLPLARIATVVIGGVVAVPMVLSAMGFTAAGIASSS

SEQ ID NO: 107379 - protein, 57 aa, Artificial Sequence
  derived and/or modified sequence
MEASALTSSAVTSVAKVVRVASGSAVVLPLARIATVVIGGVVAVPMVLSAMGFTAAG

SEQ ID NO: 107380 - protein, 93 aa, Artificial Sequence
  derived and/or modified sequence
MEASALTSSAVTSVAKVVRVASGSAVVLPLARIATVVIGGVVAVPMVLSAMGFTAAGIASSSIAAKMMSAAAIANGGGVASGSLVATLQSLGA

SEQ ID NO: 107381 - DNA, 360 bp, Artificial Sequence
  derived and/or modified sequence
atggaggcttctgcccttacctcaagcgcggtaacgtccgtagccaaagtggtgcgtgtagcctccgggagcgcagtggtcctcccactggcgcgtattgcaactgttgtcatcggtggagtggtcgcggtgcccatggtcctgtccgcgatgggtttcactgctgctggcattgcttctagttctatcgccgccaagatgatgagtgccgctgctattgctaacggagggggtgtggccagcggatccctggttgccacactgcagtcgttgggggcaaccggactctccggacttaccaagtttattctcggaagtattggtagtgctatcgctgcagtgatcgcaagattttactag

SEQ ID NO: 107382 - DNA, 189 bp, Artificial Sequence
  derived and/or modified sequence
atggaagcatctgccttgacgagctccgcagtcacctccgtcgcgaaggttgtaagggtggcttcagggtctgccgttgttcttccactggccaggatcgcgacggtggtaatcggcggggtggtggccgtccctatggtcctgagtgccatgggttttacggcagccggcattgcatcctcctcatag

SEQ ID NO: 107383 - DNA, 174 bp, Artificial Sequence
  derived and/or modified sequence
atggaagcctcagccctgacctcttccgcggtgacgagcgtggccaaagtggttcgcgttgcctctggttccgcagtagtgttaccgctggcgcgcatcgccacagtcgtcatcggtggcgtggtggccgtgcccatggtcctgtccgccatgggttttacggccgctggctag

SEQ ID NO: 107384 - DNA, 360 bp, Artificial Sequence
  derived and/or modified sequence
atggaggcttccgctctgaccagcagcgctgtcacatctgtggccaaggtggttcgggtggcttctggtagtgccgtggttcttcctctcgcacggatcgccacggttgtaatcggcggcgtcgtggctgtccctatggtcttgagcgctatgggttttactgcagccggcatcgccagcagttccatagccgcgaaaatgatgtccgctgcggctatagccaatgggggaggcgtggcctcgggcagtttagtcgctacactgcaaagcctgggcgccacggggctgtctggcctgaccaagttcatcctcgggtccatcggatctgctatagctgcagtaatagcacggttttactag

SEQ ID NO: 107385 - DNA, 123 bp, Artificial Sequence
  derived and/or modified sequence
atggaggcctctgcacttacttcatccgcagtgacttcggtcgccaaggtagtccgagtggcctccggcagcgcagtggtccttcctctagctaggatcgctacggtcgttattgggggatag

SEQ ID NO: 107386 - DNA, 282 bp, Artificial Sequence
  derived and/or modified sequence
atggaggcatctgccttaactagctccgcggttacctcagttgccaaagtcgtgcgggtcgcctcaggatcggcagtcgtgctccccctggctcgtatcgccactgttgtcattggaggtgtggtggccgtgcctatggtcctgtccgcgatgggtttcactgccgcaggcatcgcctcctcatcgatcgctgctaaaatgatgtccgcagcagccattgctaatggaggcggcgttgcctccggctctctcgttgctactttacaatcgctgggggcctag

SEQ ID NO: 107387 - DNA, 635 bp, Artificial Sequence
  derived and/or modified sequence
ttaagacggtgaggtcagcttcacattctcaggaactctccttctttgggtctggctgaagttgaggatctcttactctctaggccacggaattaacccgagcaggcatggaggcctctgctctcacctcatcagcagtgaccagtgtggccaaagtggtcagggtggcctctggctctgccgtagttttgcccctggccaggattgctacagttgtgattggaggagttgtggctgtgcccatggtgctcagtgccatgggcttcactgcggcgggaatcgcctcgtcctccatagcagccaagatgatgtccgcggcggccattgccaatgggggtggagttgcctcgggcagccttgtggctactctgcagtcactgggagcaactggactctccggattgaccaagttcatcctgggctccattgggtctgccattgcggctgtcattgcgaggttctactagctccctgcccctcgccctgcagagaagagaaccatgccaggggagaaggcacccagccatcctgacccagcgaggagccaactatcccaaatatacctggggtgaaatataccaaattctgcatctccagaggaaaataagaaataaagatgaattgttgcaactctt

SEQ ID NO: 107388 - DNA, 683 bp, Artificial Sequence
  derived and/or modified sequence
gggggtaagagacagtgagtgcccaaacacagcgtcctgtacagacagcttgggcgttgttctcagggaagactgcgcctcgaagatccttggaggaaaccaaagtgggctcccagccaggttcgctgcttctgtctctgtctctgtctcgttattctcaccgctccagccattaaggaagagcacaccggacccgaaggatgcagcatgtgacagaatctccttcctcgataaggctgaatgacattccaccggaggtatagaccacatttggttgatccattcacccatcagtggacacttgggctgcttccacctctcggctattgtgcatagtgctgctatgtacgtgggggcagtgcttcagtcggggtggagctgcttaaaaggcctgggatcacaccctttgggaacacatccaagcttaagacggtgaggtcagcttcacattctcaggaactctccttctttgggccacggaattaacccgagcaggcatggaggcctctgctctcacctcatcagcagtgaccagtgtggccaaagtggtcagggtggcctctggctctgccgtagttttgcccctggccaggattgctacagttgtgattggaggagttgtggctgtgcccatggtgctcagtgccatgggcttcactgcggcgggaatcgcctcgtcctcc

SEQ ID NO: 107389 - DNA, 218 bp, Artificial Sequence
  derived and/or modified sequence
acatccaagcttaagacggtgaggccacggaattaacccgagcaggcatggaggcctctgctctcacctcatcagcagtgaccagtgtggccaaagtggtcagggtggcctctggctctgccgtagttttgcccctggccaggattgctacagttgtgattggaggagttgtggctgtgcccatggtgctcagtgccatgggcttcactgcggcggga

SEQ ID NO: 107390 - DNA, 716 bp, Artificial Sequence
  derived and/or modified sequence
ggcaggagctacccttcccgtggccccggaccttgggtgggctgtgggctcagggagcggaggggaggccttaagcatccactctctgcccggtgtttttgttctcatcagggagcctcagatgggaagggactcgagccccacctgtccctggactctggaatgccacggaattaacccgagcaggcatggaggcctctgctctcacctcatcagcagtgaccagtgtggccaaagtggtcagggtggcctctggctctgccgtagttttgcccctggccaggattgctacagttgtgattggaggagttgtggctgtgcccatggtgctcagtgccatgggcttcactgcggcgggaatcgcctcgtcctccatagcagccaagatgatgtccgcggcggccattgccaatgggggtggagttgcctcgggcagccttgtggctactctgcagtcactgggagcaactggactctccggattgaccaagttcatcctgggctccattgggtctgccattgcggctgtcattgcgaggttctactagctccctgcccctcgccctgcagagaagagaaccatgccaggggagaaggcacccagccatcctgacccagcgaggagccaactatcccaaatatacctggggtgaaatataccaaattctgcatctccagaggaaaataagaaataaagatgaattgttgcaactctt

SEQ ID NO: 107391 - DNA, 275 bp, Artificial Sequence
  derived and/or modified sequence
cggtgaggtcagcttcacattctcaggaactctccttctttggggagcctcagatgggaagggactcgagccccacctgtccctggactctggaatgtctggctgaagttgaggatctcttactctctaggccacggaattaacccgagcaggcatggaggcctctgctctcacctcatcagcagtgaccagtgtggccaaagtggtcagggtggcctctggctctgccgtagttttgcccctggccaggattgctacagttgtgattggaggag

SEQ ID NO: 107392 - DNA, 355 bp, Artificial Sequence
  derived and/or modified sequence
gcttaagacggtgaggtcagcttcacattctcaggaactctccttctttgggccacggaattaacccgagcaggcatggaggcctctgctctcacctcatcagcagtgaccagtgtggccaaagtggtcagggtggcctctggctctgccgtagttttgcccctggccaggattgctacagttgtgattggaggagttgtggctgtgcccatggtgctcagtgccatgggcttcactgcggcgggaatcgcctcgtcctccatagcagccaagatgatgtccgcggcggccattgccaatgggggtggagttgcctcgggcagccttgtggctactctgcagtcactgggagcaa

SEQ ID NO: 107393 - DNA, 360 bp, Artificial Sequence
  derived and/or modified sequence
atggaggccagcgccctgaccagcagcgctgtgacctctgtggccaaggtggtgcgggtggccagcggcagcgctgtggtgctgcccctggccagaattgccaccgtggtgattggaggagtggtggccgtgcccatggtgctgagcgccatgggcttcaccgctgctggcatcgccagcagcagcattgctgccaagatgatgtctgctgctgccatcgccaatggaggcggcgtggccagcggcagcctggtggccaccctgcagagcctgggcgccaccggcctgagcggcctgaccaagttcatcctgggcagcatcggcagcgccatcgctgctgtgattgcccgcttctactag

SEQ ID NO: 107394 - DNA, 189 bp, Artificial Sequence
  derived and/or modified sequence
atggaggccagcgccctgaccagcagcgctgtgacctctgtggccaaggtggtgcgggtggccagcggcagcgctgtggtgctgcccctggccagaattgccaccgtggtgattggaggagtggtggccgtgcccatggtgctgagcgccatgggcttcaccgctgctggcatcgccagcagcagctag

SEQ ID NO: 107395 - DNA, 174 bp, Artificial Sequence
  derived and/or modified sequence
atggaggccagcgccctgaccagcagcgctgtgacctctgtggccaaggtggtgcgggtggccagcggcagcgctgtggtgctgcccctggccagaattgccaccgtggtgattggaggagtggtggccgtgcccatggtgctgagcgccatgggcttcaccgctgctggatag

SEQ ID NO: 107396 - DNA, 123 bp, Artificial Sequence
  derived and/or modified sequence
atggaggccagcgccctgaccagcagcgctgtgacctctgtggccaaggtggtgcgggtggccagcggcagcgctgtggtgctgcccctggccagaattgccaccgtggtgattggaggatag

SEQ ID NO: 107397 - DNA, 282 bp, Artificial Sequence
  derived and/or modified sequence
atggaggccagcgccctgaccagcagcgctgtgacctctgtggccaaggtggtgcgggtggccagcggcagcgctgtggtgctgcccctggccagaattgccaccgtggtgattggaggagtggtggccgtgcccatggtgctgagcgccatgggcttcaccgctgctggcatcgccagcagcagcattgctgccaagatgatgtctgctgctgccatcgccaatggaggcggcgtggccagcggcagcctggtggccaccctgcagagcctgggcgcctag

SEQ ID NO: 107398 - DNA, 360 bp, Artificial Sequence
  derived and/or modified sequence
atggaggccagcgccctgaccagcagcgccgtgaccagcgtggccaaggtggtccgagtggcctccggtagcgctgtggtgctgccacttgctaggatcgctactgtggtgatcggcggagtggttgccgtgcccatggttttaagtgccatggggtttaccgccgcagggatcgcctcgagttccattgcagccaaaatgatgagtgcagctgctatcgccaacgggggcggcgtggcctccggcagcctggttgctacccttcaatcgctgggggctaccggactgagtgggttaactaaattcattctcggtagtattgggtctgccatcgccgcagtgatagctcggttctattag

SEQ ID NO: 107399 - DNA, 189 bp, Artificial Sequence
  derived and/or modified sequence
atggaggccagcgccctgaccagcagcgccgtgaccagcgtggccaaggttgtaagagtggccagcggcagcgcggttgttctgccacttgctaggattgccacagttgtgattggaggtgtggtagcagtgcccatggttctatccgccatgggttttaccgctgctgggattgcctcctctagctag

SEQ ID NO: 107400 - DNA, 174 bp, Artificial Sequence
  derived and/or modified sequence
atggaggccagcgccctgaccagcagcgccgtgaccagcgtggccaaagtcgtgagggtcgcatcaggctccgccgtggtcctgccactcgcacggatcgcaaccgtggtgattggcggggtagtagctgtgccgatggtgctgtctgccatggggttcacggctgccgggtag

SEQ ID NO: 107401 - DNA, 360 bp, Artificial Sequence
  derived and/or modified sequence
atggaggccagcgccctgaccagcagcgccgtgaccagcgtggccaaggtcgtgcgggtggcctctgggtcagccgtggtactccctctggcccgcatcgctaccgtcgtcatcgggggcgtcgtggccgtaccaatggtcctgagtgcaatgggcttcacagccgctggaattgcctcaagcagcatcgctgcgaaaatgatgagtgccgctgcaatcgccaatggaggcggtgtcgcttccggcagtctcgtggcaactctgcaaagcctgggagctacaggactatctggtctcaccaaatttattttaggctccatcggtagtgccattgctgctgtgatcgcaagattctactag

SEQ ID NO: 107402 - DNA, 123 bp, Artificial Sequence
  derived and/or modified sequence
atggaggccagcgccctgaccagcagcgccgtgaccagcgtggccaaagtcgttcgcgtcgcttcgggcagcgctgtggtcctgcccttagcccggattgcaactgtcgttatagggggttag

SEQ ID NO: 107403 - DNA, 282 bp, Artificial Sequence
  derived and/or modified sequence
atggaggccagcgccctgaccagcagcgccgtgaccagcgtggccaaggtggttagagtggcaagcggctcagctgtggttttacctctagccagaattgccaccgtagtgatcgggggtgtggtcgcggtaccaatggtgcttagcgccatgggttttaccgccgcgggaatagcctcttcatcaatcgccgctaagatgatgtccgctgcagcgatcgccaacggcggcggagttgctagtgggtctctggttgccaccctccagagtctgggggcctag

SEQ ID NO: 107404 - DNA, 360 bp, Artificial Sequence
  derived and/or modified sequence
atggaggcctccgctttgacttctagcgctgtgacaagcgtcgctaaggtcgtgcgcgtcgcttctggcagtgctgtggtgctgcctctggctcggattgcaactgtagtcattggaggtgtcgtggccgtccctatggtcctgagtgctatgggattcaccgccgcaggaatcgcaagttcgtctatcgccgcaaaaatgatgtctgccgctgctatagccaacggcggaggggtggccagcggtagtctagtggcgaccctccagagcctgggtgcgaccggactcagtgggctcaccaaattcatcctgggctctattgggagcgctattgccgcagtgatcgctagattctattag

SEQ ID NO: 107405 - DNA, 189 bp, Artificial Sequence
  derived and/or modified sequence
atggaagcttcagcattgacctcctccgctgttaccagtgttgctaaggttgtccgcgtggcatccgggtccgctgtcgtgctgcctctggctagaatagcaactgtagtgatcggtggggtggtagccgttcccatggtcctgtctgccatgggtttcacagctgcgggtatcgcttctagctcctag

SEQ ID NO: 107406 - DNA, 174 bp, Artificial Sequence
  derived and/or modified sequence
atggaagccagcgcgctcacttctagcgccgttacctcagtggctaaggtggtgcgagttgcttctgggtccgccgtcgtcctgccactagctagaatcgctaccgtggtaatcggtggcgtggtggctgtcccaatggtgctctccgccatggggttcactgccgcagggtag

SEQ ID NO: 107407 - DNA, 360 bp, Artificial Sequence
  derived and/or modified sequence
atggaagcaagcgccttaacctcttcagcagtgacctctgtggccaaggtggtgagagttgccagtggctccgctgtggtgcttccccttgccaggatcgctaccgtagtcattggtggggtggtcgccgttccaatggtgcttagcgctatggggttcacagcagcaggaattgctagttccagcatagcagcgaaaatgatgagtgcagcagcaatagcgaatggtggcggtgtcgcctccggatcgctggtcgccacactgcaatctttaggtgccaccggcctttcagggctgactaaatttatcctggggagcatcggctcagccattgcagctgtaatcgccaggttttactag

SEQ ID NO: 107408 - DNA, 123 bp, Artificial Sequence
  derived and/or modified sequence
atggaggcgtctgcactgacaagctctgctgttacctccgtggcaaaagtggtgagggtggcaagcggatcagcggtggtgctgccgttggctcgaatcgcaacagtcgtcattggaggctag

SEQ ID NO: 107409 - DNA, 282 bp, Artificial Sequence
  derived and/or modified sequence
atggaagcctctgccttgacaagctcggctgtgacttctgtggccaaggtggtgcgagtagcttccggcagcgctgtggtactgcctctggccaggatagctaccgtggtgatagggggagtcgtggctgtgcctatggtgcttagtgctatggggttcaccgccgcaggaatcgccagcagtagcattgccgctaagatgatgagcgcagctgccatagcgaatggcggaggagtggcctcaggttctttagtggccacactgcagtcacttggagcctag

SEQ ID NO: 107410 - DNA, 360 bp, Artificial Sequence
  derived and/or modified sequence
atggaggccagcgccctgaccagcagcgccgtgaccagcgtggccaaggtggtgagagtggccagcggcagcgccgtggtgctgcccctggccagaatcgccaccgtggtgatcggcggcgtggtggccgtgcccatggtgctgagcgccatgggcttcaccgccgccggcatcgccagcagcagcatcgccgccaagatgatgagcgccgccgccatcgccaacggcggcggcgtggccagcggcagcctggtggccaccctgcagagcctgggcgccaccggcctgagcggcctgaccaagttcatcctgggcagcatcggcagcgccatcgccgccgtgatcgccagattctactag

SEQ ID NO: 107411 - DNA, 189 bp, Artificial Sequence
  derived and/or modified sequence
atggaggccagcgccctgaccagcagcgccgtgaccagcgtggccaaggtggtgagagtggccagcggcagcgccgtggtgctgcccctggccagaatcgccaccgtggtgatcggcggcgtggtggccgtgcccatggtgctgagcgccatgggcttcaccgccgccggcatcgccagcagcagctag

SEQ ID NO: 107412 - DNA, 174 bp, Artificial Sequence
  derived and/or modified sequence
atggaggccagcgccctgaccagcagcgccgtgaccagcgtggccaaggtggtgagagtggccagcggcagcgccgtggtgctgcccctggccagaatcgccaccgtggtgatcggcggcgtggtggccgtgcccatggtgctgagcgccatgggcttcaccgccgccggctag

SEQ ID NO: 107413 - DNA, 123 bp, Artificial Sequence
  derived and/or modified sequence
atggaggccagcgccctgaccagcagcgccgtgaccagcgtggccaaggtggtgagagtggccagcggcagcgccgtggtgctgcccctggccagaatcgccaccgtggtgatcggcggctag

SEQ ID NO: 107414 - DNA, 282 bp, Artificial Sequence
  derived and/or modified sequence
atggaggccagcgccctgaccagcagcgccgtgaccagcgtggccaaggtggtgagagtggccagcggcagcgccgtggtgctgcccctggccagaatcgccaccgtggtgatcggcggcgtggtggccgtgcccatggtgctgagcgccatgggcttcaccgccgccggcatcgccagcagcagcatcgccgccaagatgatgagcgccgccgccatcgccaacggcggcggcgtggccagcggcagcctggtggccaccctgcagagcctgggcgcctag

SEQ ID NO: 107415 - protein, 941 aa, Artificial Sequence
  derived and/or modified sequence
MDAAEPGLPPGPEGRKRYSDIFRSLDNLEISLGNVTLEMLAGDPLLSEDPEPDKTPTATVTNEASCWSGPSPEGPVPLTGEELDLRLIRTKGGVDAALEYAKTWSRYAKELLAWTEKRASYELEFAKSTMKIAEAGKVSIQQQSHMPLQYIYTLFLEHDLSLGTLAMETVAQQKRDYYQPLAAKRTEIEKWRKEFKEQWMKEQKRMNEAVQALRRAQLQYVQRSEDLRARSQGSPEDSAPQASPGPSKQQERRRRSREEAQAKAQEAEALYQACVREANARQQDLEIAKQRIVSHVRKLVFQGDEVLRRVTLSLFGLRGAQAERGPRAFAALAECCAPFEPGQRYQEFVRALRPEAPPPPPPAFSFQEFLPSLNSSPLDIRKKLSGPLPPRLDENSAEPGPWEDPGTGWRWQGPTPGSDVDSVGGGSESRSLDSPTSSPDLGDGLENGLGSPFGKWTLSSAAQTHQLRRLRGPAKCRECEAFMVSGTECEECFLTCHKRCLETLLILCGHRRLPARTPLFGVDFLQLPRDFPEEVPFVVTKCTAEIEHRALDVQGIYRVSGSRVRVERLCQAFENGRALVELSGNSPHDVSSVLKRFLQELTEPVIPFHLYDAFISLAKTLHADPGDDPGTPSPSPEVIRSLKTLLVQLPDSNYNTLRHLVAHLFRVAARFMENKMSANNLGIVFGPTLLRPPDGPRAASAIPVTCLLDSGHQAQLVEFLIVHYEQIFGMDELPQATEPPPQDSSPAPGPLTTSSQPPPPHLDPDSQPPVLASDPGPDPQHHSTLEQHPTATPTEIPTPQSDQREDVAEDTKDGGGEVSSQGPEDSLLGTQSRGHFSRQPVKYPRGGVRPVTHQLSSLALVASKLCEETPITSVPRGSLRGRGPSPAAASPEGSPLRRTPLPKHFEITQETARLLSKLDSEAVPRATCCPDVQPEEAEDHL

SEQ ID NO: 107416 - DNA, 2826 bp, Artificial Sequence
  derived and/or modified sequence
atggacgccgcggagccgggtttaccccctggccctgaagggaggaagcggtatagtgacatctttcgctcccttgacaacctggagatatctctgggtaacgtgacattggagatgttagcaggcgaccccctgttatccgaggaccctgagccagataaaacccctacagccaccgtcaccaatgaggcttcatgttggtcgggcccgtctcctgaggggccagtaccgttaacaggggaggaactggacctccgcctcatccggacaaaagggggggttgacgcggccctggagtatgccaaaacctggagccgctacgccaaggagctactggcttggactgagaagcgcgcctcctacgagctagaatttgctaagtcaacaatgaaaattgccgaggctggcaaggtaagcatccagcaacaaagtcatatgccattgcaatatatctatactctgttcctggagcatgatctctcactaggcaccctcgctatggagacggttgcgcagcagaaaagagattattaccagccactcgccgcaaaaagaacggagattgaaaaatggcggaaggaatttaaggagcagtggatgaaggagcagaaacgtatgaacgaggccgtccaggcccttcggcgggcccagttgcaatacgtacagcggagtgaggacctgcgggcacgctctcagggcagtcccgaagacagtgcaccacaggcgtcaccgggaccaagcaagcagcaggaaagacgcagacgatcccgagaggaggcacaggctaaggcacaggaggctgaggcgctgtaccaggcttgtgtccgcgaggctaacgcccgccagcaggatttagagatagctaaacagcgcatcgtcagtcatgtgaggaagctggtttttcaaggcgacgaggttctgcgcagggtgactctcagcctattcggcctgcggggagcacaggctgagagaggcccgagagcatttgcggcactagctgagtgctgcgctccttttgagccgggccagcgctaccaggaattcgtccgcgccttgcgcccggaagcaccacctccgccccctcctgcttttagcttccaggagtttctcccatccttaaactcgtctcctcttgacatccggaagaaactgtcgggacctctgccaccaaggttggacgaaaattccgccgagccaggaccttgggaagatccgggcaccggatggaggtggcaaggtccgactccagggtccgatgtggatagcgtcggcggagggagcgagtctagatccctcgactcgccgacctcaagtcccgatctgggggacgggctcgaaaacggacttgggagtccgtttgggaagtggactttaagttccgccgcgcagacacaccagctgcgtcgtctgcgtgggcctgccaagtgtagggagtgtgaggcttttatggtctcggggacagagtgcgaagaatgctttttaacttgtcataaacgttgtcttgaaacacttttgatcctgtgcgggcatcgtcgactgcctgctaggacgccactattcggagtggacttcctgcagttgccaagagactttccagaagaagtaccctttgtagtgacaaagtgcaccgccgagatcgagcatcgtgccctggacgtgcagggtatttaccgggtgagcggttcaagagtgcgggtggagcgcctgtgtcaggcatttgaaaacggccgggctctggtcgaactgtcaggaaatagccctcatgatgtgtctagcgtactcaaaaggttcttgcaggagctcaccgagccagtgatcccatttcacctgtacgacgccttcatctccttggctaaaactctacacgccgaccctggcgacgaccccgggacgccctcaccctcaccggaagtgattaggtctctgaagactctgctggttcagctgcccgatagcaattacaacacattgagacacctggtggcccacttgttccgggtggctgcgcgtttcatggaaaacaagatgtcggccaacaatctcggtattgtgtttggccctactctgttgcgtccacctgatggtcctagggctgccagcgctatcccagtcacttgcctgctggacagcggccaccaagcccagctggtggagtttctcatcgtgcattatgagcagatctttggcatggacgaactacctcaggccacagaacctcccccgcaggacagcagtcctgctcccggtccattgactacatcctcacaaccacctcctcctcacctagacccagactcccagccacccgttctggccagtgaccctggccccgatccacagcatcactccacgctggaacagcacccaacggccacccctaccgaaattccaacgccacagagcgaccaacgcgaggacgtggctgaggacacgaaagacggaggcggggaggtaagctcccagggaccggaggacagtctcctggggactcagagccgtggccatttttctcgtcaacctgtgaaataccctcgaggaggtgtgcgacctgtaacgcaccagctttccagtctggccttagtcgcctccaaactgtgcgaagaaactcctatcacgagcgtaccacgggggtccctcagaggccggggcccatccccagccgcagccagccccgaggggtccccattgcggagaacgccactgcccaagcacttcgagattacccaagagactgcccggctcctctccaaactggacagtgaggcagtccctcgagcaacctgctgccctgatgttcagccggaagaagcagaagatcacctgtag

SEQ ID NO: 107417 - DNA, 3034 bp, Artificial Sequence
  derived and/or modified sequence
aaatcggggctcggccccgccggcgcgcgaccccatccccatcccggtccctgcagagcgatccccgggcccagatatggacgcagcagagccgggactccccccaggtcctgagggcaggaagaggtacagtgacatcttccggagcctggacaacctcgaaatctcactggggaacgtgacccttgagatgctggctggagaccctctactctcagaagacccagaacctgacaagacccctacagccactgttaccaacgaagccagctgttggagcggcccctccccagagggtcctgtacccctcacaggggaggaactggacttgcggctcattcggacaaaggggggtgtggacgcagccctggaatatgccaagacctggagccgctatgccaaggaactgcttgcctggactgaaaagagagccagctatgagctggagtttgctaagagcaccatgaagatcgctgaagctggcaaggtgtccattcaacagcagagccacatgcctctgcagtacatctacaccctgtttctggagcacgatctcagcctgggaaccctggccatggagacagtggcccagcagaaaagagactactaccagcccctcgccgccaaacggactgagattgagaagtggcggaaggagttcaaggagcagtggatgaaggagcagaagcggatgaatgaggcggtgcaggcactgcggcgcgcccagctgcagtatgtgcaacgcagcgaggacctgcgggcacgctcccaggggtcccctgaggactcggccccccaggcctcgccgggacctagcaagcagcaggagcggcggcggcgctcgcgagaggaggcccaggccaaggcgcaggaggccgaggcgctgtaccaggcctgtgtccgcgaggccaacgcgcggcagcaggacctggagatcgccaagcagcgaatcgtgtcgcacgtgcgcaagctggtgtttcagggggatgaagtgctgaggcgggtgacgctgagtctcttcgggctgcggggggcgcaggcagagcgtggcccccgcgccttcgccgccctggccgagtgctgtgcgccctttgagccgggccagcgctaccaggagtttgtacgggcgctgcggcccgaggccccgccgcccccgccgcccgccttctccttccaggagttccttccctccttgaacagctcccctctggacatcagaaagaagctctctgggcctcttcctccaaggctggatgagaattcagctgagccaggcccttgggaggatccgggcacaggctggcgctggcaaggccccactccgggcagcgatgtggacagcgtgggtggcggcagcgagtctcggtccctggactcacccacttccagcccagacctgggagacgggctggagaatgggctgggcagccccttcgggaagtggacactgtccagcgcggctcagacccaccagctgcggcgactgcggggcccagccaagtgccgcgagtgcgaagccttcatggtcagcgggacggagtgtgaggagtgctttctgacctgccacaagcgctgcctggagactctcctgatcctctgtggacacaggcggctcccagcccggacacccctttttggggttgacttcctgcagctacccagggacttcccggaggaggtaccctttgtggtcacgaagtgcacggctgagatagaacaccgtgccctggatgtgcagggcatttaccgggtcagcgggtcccgggtccgtgtggagcggctgtgccaggctttcgagaatggccgagcgttggtggagctgtcggggaactcgcctcatgacgtctcgagtgtcctcaagcgatttcttcaggagctcaccgagcccgtgatccccttccacctctacgacgccttcatctctctggctaagaccttgcatgcagaccctggggacgaccctgggacccccagccccagccctgaggttatccgctcgctgaagaccctcttggtacagctgcctgactctaactacaacaccctgcggcacctggtggcccatctgttcagggtggctgcacgatttatggaaaacaagatgtctgccaacaacctgggcattgtgtttgggccgacactgctgcggccgccggacggcccgcgggcagccagcgccatccctgtcacctgcctgctggactctgggcatcaggcccagcttgtggagttcctcatcgtgcactacgagcagatctttgggatggatgagctcccccaggccactgagcccccgccccaagactccagcccagcccctgggcccctcacaaccagctcccaaccgccacccccgcaccttgacccagactcccagcccccagtcctagcctcagaccccggcccagacccccagcaccacagtaccctggagcagcatcccacggccacacctaccgagattccaactccacagagtgaccagagagaggacgtggctgaagacaccaaagatgggggaggggaagtgtccagccaaggcccagaggactcactcctggggacacagtctcgtggccacttcagccgccagccagtgaagtatccccggggcggtgtgaggcctgtaacccaccagctgtccagtctggccctggtggcttccaagctgtgcgaggagacccccatcacatcagtgcccagagggagtttgcgggggcgggggcccagccctgcagctgcctcccctgagggcagccccctgcgccgcaccccgctgcccaagcattttgagattacccaggagacagcccggctactctcgaaattggacagcgaggctgtgcccagggccacctgctgcccggacgtccagcctgaggaagccgaggaccatctctgaccaccctggcaccttaaataaggaagaggcccagattgtgaagacggacccatatatccctacctcccaccacctagtggccaaacaccccgccaggagttcaatgctgggagaggtccagagggttcctat

SEQ ID NO: 107418 - DNA, 2826 bp, Artificial Sequence
  derived and/or modified sequence
atggatgctgctgagcccggcctgcccccaggccctgagggcaggaagcgctacagcgacatcttccgcagcctggacaacctggagatcagcctgggcaatgtgaccctggagatgctggccggggaccccctgctgtctgaggaccctgagccagacaagacccccacagccaccgtgaccaatgaggccagctgctggagcggccccagccctgagggccctgtgcccctgactggagaggagctggacctgcggctcatccgcaccaagggcggcgtggatgctgccctggagtatgccaagacctggagccgctatgccaaggagctgctggcctggacagagaagagggccagctatgagctggagtttgccaagagcaccatgaagattgctgaggccggcaaggtgtccatccagcagcagagccacatgcccctgcagtacatctacaccctcttcctggagcatgacctgagcctgggcaccctggccatggagaccgtggcccagcagaagagggactactaccagcccctggccgccaagaggacagaaattgagaagtggaggaaggagttcaaggagcagtggatgaaggagcagaagaggatgaatgaagctgtgcaggccctgcggcgggcccagctgcagtatgtgcagaggtctgaggacctgcgggcccggagccagggcagccctgaggacagcgccccccaggccagccctggccccagcaagcagcaggagaggagaagaagaagccgggaggaggcccaggccaaggcccaggaggccgaggccctgtaccaggcctgtgtgcgggaggccaatgcccggcagcaggacctggagatcgccaagcagagaattgtgagccacgtgaggaagctggtgttccagggagatgaggtgctgcggcgggtgaccctgagcctgtttggcctgcggggggcccaggccgagcggggcccccgggcctttgctgccctggccgagtgctgtgccccctttgagcccggccagcgctaccaggagtttgtgcgggccctgcggcctgaggcccctcctcctcctcctccagccttctccttccaggagttcctgcccagcctgaacagcagccccctggacatcaggaagaagctgagcggccccctgcccccccggctggatgagaacagcgctgagcccggcccctgggaggaccccggcaccggctggcgctggcagggccccaccccaggcagtgatgtggacagcgtgggcggcggcagcgagagccgcagcctggacagccccaccagcagcccagacctgggagatggcctggagaatggcctgggcagcccctttgggaagtggaccctgagcagcgctgcccagacccaccagctgcggcggctgcggggccctgccaagtgccgggagtgtgaggccttcatggtgtctggaacagaatgtgaggagtgcttcctgacctgccacaagcgctgcctggagaccctgctgatcctgtgtggccaccggcggctgcctgcccggacccccctgtttggagtggacttcctgcagctgccccgggacttccctgaggaggtgccctttgtggtgaccaagtgcacagctgagattgagcaccgggccctggatgtgcagggcatctacagagtgtctggcagccgggtgcgggtggagcggctgtgccaggcctttgaaaatggccgggccctggtggagctgagcggcaacagcccccatgatgtgtcctctgtgctgaagcgcttcctgcaggagctgacagagcccgtcatccccttccacctgtatgatgccttcatcagcctggccaagaccctgcatgctgaccctggagatgatcctggcacccccagccccagccctgaggtgatccgcagcctgaagaccctgctggtgcagctgcctgacagcaactacaacaccctgcggcacctggtggcccacctgttccgggtggccgcccgcttcatggagaacaagatgtctgccaacaacctgggcatcgtgtttggccccaccctgctgcggcccccagatggcccccgggccgccagcgccatccctgtgacctgcctgctggacagcggccaccaggcccagctggtggagttcctgattgtgcactatgagcagatcttcggcatggatgagctgccccaggccacagagcccccaccccaggacagcagccctgcccctggccccctgaccaccagcagccagcccccaccaccccacctggaccctgacagccagccccctgtgctggccagtgaccccggccctgacccccagcaccacagcaccctggagcagcaccccacagccacccccacagagatccccaccccccagagcgaccagagagaagatgtggccgaggacaccaaggatggcggcggggaggtgagcagccagggccctgaggacagcctgctgggcacccagagccggggccacttcagccggcagcctgtgaagtacccccggggcggcgtgcggcctgtgacccaccagctgagcagcctggccctggtggccagcaagctgtgtgaggagacccccatcacctctgtgccccggggcagcctgcggggccggggccccagccctgctgctgccagccctgagggcagccccctgcggaggacccccctgcccaagcactttgagatcacccaggagacagcccggctgctgagcaagctggacagcgaggccgtgccccgggccacctgctgcccagatgtgcagcctgaggaggccgaggaccacctgtag

SEQ ID NO: 107419 - DNA, 2826 bp, Artificial Sequence
  derived and/or modified sequence
atggacgccgccgagcccggcctgccccccggccccgagggccggaaaaggtactcagacatattcaggagccttgacaatctcgaaatttccctgggaaacgtcacgttggagatgttggccggcgatccattactaagcgaagaccccgaaccggacaagacccccacggctacagttactaatgaggcatcttgttggtccggcccaagtccagaaggccccgttcctctcaccggcgaggaattggacctcaggctgatcaggactaagggaggagtcgacgctgcattggagtatgctaagacttggtctcgatacgcaaaggaattgttggcgtggactgaaaagcgggcaagctacgaactcgaattcgccaagagtaccatgaagatcgccgaggccgggaaggtctccattcagcagcagtcccatatgccacttcagtacatttacactctgtttctggagcatgatctgagtctagggactctggccatggagacagtcgcacaacagaagagagattactaccaacctttggccgcaaagcgcaccgaaattgagaagtggaggaaggaatttaaggagcagtggatgaaagaacaaaaacgtatgaacgaggcagtgcaggctttgaggcgagcccagctgcagtacgtgcagcggagtgaagaccttagggccagatcccaaggtagccccgaagattctgcacctcaggcatctcctggaccctccaaacagcaggaacgcagacggcgctctagagaggaggcgcaggctaaggctcaggaagccgaggccctctaccaggcctgcgtccgggaagccaatgcgaggcaacaggatctggagatagccaagcagaggattgtatcccacgttaggaagctggtgttccagggcgacgaggtgttgcgacgggtgacattgtccttgttcggactgcggggcgcccaggcagaacggggtccccgtgccttcgccgcactggccgagtgttgcgctcctttcgaaccaggtcagcgttaccaggaatttgtgagagccctcaggcctgaggctcctccacctccaccaccagctttttcgtttcaagagtttctgccctctctcaactcgtctccacttgatattagaaagaagttatccggaccactgccacctcgacttgacgaaaactccgcagaacccggtccctgggaagatcctggtaccggctggcggtggcagggtcccaccccaggcagtgacgtggattcagtaggtggaggatccgagtcccggagcctggattcaccaacctcaagtcccgacctgggagacggtctcgaaaatgggctgggctcaccgttcggcaagtggacactctcatctgcagcccaaacccatcagctgagaagactgcgaggtcccgctaagtgtcgcgagtgcgaggctttcatggtgtcagggacagaatgcgaggaatgcttcctcacctgccacaaaagatgcttagagaccctgctcattctgtgcggacacagaagactgcccgcccgtacgccacttttcggagtcgactttctgcagctgccaagagatttcccagaggaggtgcccttcgtggtgaccaagtgcacagcggagattgaacacagagccctcgacgtgcaggggatctacagagtgtccgggtctagagtaagagtcgaacggctgtgccaagcctttgaaaatgggcgggccttggtggaattgagcgggaactcaccccatgacgtgtcaagcgttcttaagcgctttttacaagagttgacagagcctgtgatcccattccacctgtacgacgcgttcatcagtctcgccaaaacattacacgcggaccccggcgacgacccgggaacgcctagtccctcgccggaggtcattagatctcttaagactctactcgtacaattgcccgatagtaattataacacactccgccacctggttgcacaccttttcagagtagctgcccgtttcatggaaaataagatgtctgccaataatctcggtattgtgttcgggcctactctgctgcgccctcctgacggaccccgagcggctagcgccatacctgtgacttgccttctcgactctgggcaccaggcccagttagtggagtttctgatcgtgcactatgagcagattttcgggatggacgagcttccacaagctacagaacccccgccacaggactccagtcccgctccaggaccactgaccaccagtagccagcctcctcctccacacctcgatcctgactctcagccacctgtcttagctagcgaccctggaccagacccacagcatcattccactctggagcagcatcccaccgctacccccaccgaaataccaaccccccaatccgatcagcgggaggacgtggctgaagatacaaaagatggcggaggcgaggtgtcctcccagggtccagaggactcactcttgggaacacagagcagaggacacttctcaagacagcctgtgaagtacccgcggggcggagtccggccggtgacacatcagctttcatcgctcgctctggtagcctctaagctctgcgaggagactcccattacgtctgtgccaagagggtcgctccgtggacgcggcccgagccctgctgcggctagtcccgagggctccccactcagacggacacccctccccaaacactttgaaatcacccaggaaacagcgcgtcttctgagcaaacttgactctgaggcggtgcctcgagcgacttgttgtcccgacgttcagcctgaagaggcggaggaccacctgtag

SEQ ID NO: 107420 - DNA, 2826 bp, Artificial Sequence
  derived and/or modified sequence
atggacgcggctgagcccggactgcccccaggacccgaaggtcgcaagcgctatagcgacatcttccgcagccttgataacctggagatctctcttggcaacgtgacattggaaatgcttgccggagaccctctgctgtccgaggatccggaacctgataaaactccaactgcgactgtcacaaatgaggccagttgctggagcggacccagtcccgagggccctgtcccactgactggagaggagctggacctccgactcatacgcacaaagggcggagtggacgctgcactggaatacgctaagacatggagtaggtacgcaaaagagctcctcgcctggacagaaaaacgggcttcttacgagctggagttcgcaaaaagtacaatgaagattgccgaggctggaaaagtttcaatccagcagcagtctcatatgcctttgcagtatatctataccctatttttggaacatgatcttagccttggaactttggccatggaaactgtcgcacagcagaagcgagattactaccaaccgctggccgcaaagagaacagagatagaaaagtggagaaaagagttcaaagagcaatggatgaaggagcagaaaaggatgaacgaggcagtgcaggcccttcgaagggcacagctgcagtacgtgcaacgatccgaagacctgagagctcggagtcagggcagccctgaggacagtgcacctcaggcatcacctggaccaagcaagcagcaggaacgacgcagaaggagtcgggaggaagctcaggccaaggctcaggaagcagaggctctttaccaggcatgcgtccgagaggctaacgcacggcagcaggacctcgaaatcgcgaaacagcgcattgtgtctcatgtcaggaagctggtgttccagggggatgaagtgcttcgcagagtcaccctgtcgttatttggactgcgtggcgcacaagcggagagaggtcctcgggcattcgctgcactagccgaatgctgtgcgccatttgagcccggtcagcgctaccaggaattcgtgcgtgcactgcgacccgaagctccacctcctccaccacctgcattctcgttccaagagttcctcccgtccctgaattcctctccactcgacattcgaaaaaaactctccggaccactgccaccccgactcgacgagaactcggccgaaccgggaccttgggaggatcctgggacaggttggcgctggcaagggcctacacctggttccgacgttgatagtgtgggtggtggttctgaatctcgcagcttagattcacccacctcctccccagatctgggagacggacttgagaacgggctggggtccccctttggtaagtggaccctttcatcagccgctcagacccaccagctccggagactcagaggccctgccaagtgcagggaatgcgaggcctttatggtctcaggtactgagtgcgaagagtgctttctgacctgccacaagagatgcctggagacgctactgatactctgtggtcaccgacgcctgcctgctagaactccactctttggggttgacttcctacaactcccacgggatttccccgaagaggttcccttcgtcgtgacaaaatgtacggctgagattgagcaccgcgcacttgatgtccaggggatatatagagtatcaggctcaagggtaagggtagaaagattgtgccaggcattcgagaatgggcgagccttggtagagctgagcggaaattctccccacgacgttagctcagttttgaaacggtttttgcaggagctgacagaacccgtgatcccctttcacctgtacgacgcgtttatcagtctggctaaaaccctgcacgctgatcccggtgacgatcctggcacacctagtccatctcctgaagtaattcgctctctgaagacattactggtccagctgccagattccaactataatacgttgcggcatttggtggcccatctgtttcgcgtggctgccaggttcatggagaacaaaatgtctgcaaacaatttgggcatagtgttcggacctactctgctgaggcccccagatggaccaagggctgcttccgccattccagtgacatgtctgttggattcaggacaccaggctcagttagtggagtttctgatcgttcactatgagcagatatttgggatggatgagctgccccaggctaccgaacctccgcctcaagatagctcccctgctcccggacccctgactaccagctcgcagccaccccctccccacttagatccagatagtcagccaccagttctggctagcgaccccggtcccgaccctcagcatcactccaccctagaacagcacccaactgcaacaccaacagaaatccccactccccagagcgaccagcgcgaagacgtggctgaagacaccaaagacggtggcggtgaggtgtcctcccagggtcccgaagattctttgctcggaacccagagtaggggccacttttcacgacagcctgttaaataccccagagggggtgtgagacctgtgactcaccagctgagttccctcgctctagtggccagcaaactttgtgaagagactcccattacatcagtccctcgcggatcactccggggaagaggtccgtctcctgctgctgcgtctccggaagggagtcctctccgcaggactccactacccaaacacttcgagatcactcaagaaactgccaggctactaagcaaactggactccgaggccgtacccagagcgacatgctgcccagatgtacaaccagaagaggcagaagaccatctgtag

SEQ ID NO: 107421 - DNA, 2826 bp, Artificial Sequence
  derived and/or modified sequence
atggacgccgccgagcccggcctgccccccggccccgagggcagaaagagatacagcgacatcttcagaagcctggacaacctggagatcagcctgggcaacgtgaccctggagatgctggccggcgaccccctgctgagcgaggaccccgagcccgacaagacccccaccgccaccgtgaccaacgaggccagctgctggagcggccccagccccgagggccccgtgcccctgaccggcgaggagctggacctgagactgatcagaaccaagggcggcgtggacgccgccctggagtacgccaagacctggagcagatacgccaaggagctgctggcctggaccgagaagagagccagctacgagctggagttcgccaagagcaccatgaagatcgccgaggccggcaaggtgagcatccagcagcagagccacatgcccctgcagtacatctacaccctgttcctggagcacgacctgagcctgggcaccctggccatggagaccgtggcccagcagaagagagactactaccagcccctggccgccaagagaaccgagatcgagaagtggagaaaggagttcaaggagcagtggatgaaggagcagaagagaatgaacgaggccgtgcaggccctgagaagagcccagctgcagtacgtgcagagaagcgaggacctgagagccagaagccagggcagccccgaggacagcgccccccaggccagccccggccccagcaagcagcaggagagaagaagaagaagcagagaggaggcccaggccaaggcccaggaggccgaggccctgtaccaggcctgcgtgagagaggccaacgccagacagcaggacctggagatcgccaagcagagaatcgtgagccacgtgagaaagctggtgttccagggcgacgaggtgctgagaagagtgaccctgagcctgttcggcctgagaggcgcccaggccgagagaggccccagagccttcgccgccctggccgagtgctgcgcccccttcgagcccggccagagataccaggagttcgtgagagccctgagacccgaggccccccccccccccccccccgccttcagcttccaggagttcctgcccagcctgaacagcagccccctggacatcagaaagaagctgagcggccccctgccccccagactggacgagaacagcgccgagcccggcccctgggaggaccccggcaccggctggagatggcagggccccacccccggcagcgacgtggacagcgtgggcggcggcagcgagagcagaagcctggacagccccaccagcagccccgacctgggcgacggcctggagaacggcctgggcagccccttcggcaagtggaccctgagcagcgccgcccagacccaccagctgagaagactgagaggccccgccaagtgcagagagtgcgaggccttcatggtgagcggcaccgagtgcgaggagtgcttcctgacctgccacaagagatgcctggagaccctgctgatcctgtgcggccacagaagactgcccgccagaacccccctgttcggcgtggacttcctgcagctgcccagagacttccccgaggaggtgcccttcgtggtgaccaagtgcaccgccgagatcgagcacagagccctggacgtgcagggcatctacagagtgagcggcagcagagtgagagtggagagactgtgccaggccttcgagaacggcagagccctggtggagctgagcggcaacagcccccacgacgtgagcagcgtgctgaagagattcctgcaggagctgaccgagcccgtgatccccttccacctgtacgacgccttcatcagcctggccaagaccctgcacgccgaccccggcgacgaccccggcacccccagccccagccccgaggtgatcagaagcctgaagaccctgctggtgcagctgcccgacagcaactacaacaccctgagacacctggtggcccacctgttcagagtggccgccagattcatggagaacaagatgagcgccaacaacctgggcatcgtgttcggccccaccctgctgagaccccccgacggccccagagccgccagcgccatccccgtgacctgcctgctggacagcggccaccaggcccagctggtggagttcctgatcgtgcactacgagcagatcttcggcatggacgagctgccccaggccaccgagccccccccccaggacagcagccccgcccccggccccctgaccaccagcagccagcccccccccccccacctggaccccgacagccagccccccgtgctggccagcgaccccggccccgacccccagcaccacagcaccctggagcagcaccccaccgccacccccaccgagatccccaccccccagagcgaccagagagaggacgtggccgaggacaccaaggacggcggcggcgaggtgagcagccagggccccgaggacagcctgctgggcacccagagcagaggccacttcagcagacagcccgtgaagtaccccagaggcggcgtgagacccgtgacccaccagctgagcagcctggccctggtggccagcaagctgtgcgaggagacccccatcaccagcgtgcccagaggcagcctgagaggcagaggccccagccccgccgccgccagccccgagggcagccccctgagaagaacccccctgcccaagcacttcgagatcacccaggagaccgccagactgctgagcaagctggacagcgaggccgtgcccagagccacctgctgccccgacgtgcagcccgaggaggccgaggaccacctgtag

SEQ ID NO: 107422 - protein, 719 aa, Artificial Sequence
  derived and/or modified sequence
MFVGVARHSGSQDEVSRGVEPLEAARAQPAKDRRAKGTPKSSKPGKKHRYLRLLPEALIRFGGFRKRKKAKSSVSKKPGEVDDSLEQPCGLGCLVSTCCECCNNIRCFMIFYCILLICQGVVFGLIDVSIGDFQKEYQLKTIEKLALEKSYDISSGLVAIFIAFYGDRKKVIWFVASSFLIGLGSLLCAFPSINEENKQSKVGIEDICEEIKVVSGCQSSGISFQSKYLSFFILGQTVQGIAGMPLYILGITFIDENVATHSAGIYLGIAECTSMIGYALGYVLGAPLVKVPENTTSATNTTVNNGSPEWLWTWWINFLFAAVVAWCTLIPLSCFPNNMPGSTRIKARKRKQLHFFDSRLKDLKLGTNIKDLCAALWILMKNPVLICLALSKATEYLVIIGASEFLPIYLENQFILTPTVATTLAGLVLIPGGALGQLLGGVIVSTLEMSCKALMRFIMVTSVISLILLVFIIFVRCNPVQFAGINEDYDGTGKLGNLTAPCNEKCRCSSSIYSSICGRDDIEYFSPCFAGCTYSKAQNQKKMYYNCSCIKEGLITADAEGDFIDARPGKCDAKCYKLPLFIAFIFSTLIFSGFSGVPIVLAMTRVVPDKLRSLALGVSYVILRIFGTIPGPSIFKMSGETSCILRDVNKCGHTGRCWIYNKTKMAFLLVGICFLCKLCTIIFTTIAFFIYKRRLNENTDFPDVTVKNPKVKKKEETDL

SEQ ID NO: 107423 - protein, 25 aa, Artificial Sequence
  derived and/or modified sequence
LNENTDFPDVTVKNPKVKKKEETDL

SEQ ID NO: 107424 - DNA, 87 bp, Artificial Sequence
  derived and/or modified sequence
aagaattggacaaaacacacaaacaaagcaaggaaggaatgaaaggatttgttgaaaatgaaagtacactccacagtgtgggagcag

SEQ ID NO: 107425 - DNA, 90 bp, Artificial Sequence
  derived and/or modified sequence
taagcaacttcagcaaagtctcaggatacaaaatcaatgtgcaaaaatctcaagcattcttatacacgaacaacagacaaacagagagct

SEQ ID NO: 107426 - DNA, 2160 bp, Artificial Sequence
  derived and/or modified sequence
atgttcgtgggcgtggccagacacagcggcagccaggacgaggtgagcagaggcgtggagcccctggaggccgccagagcccagcccgccaaggacagaagagccaagggcacccccaagagcagcaagcccggcaagaagcacagatacctgagactgctgcccgaggccctgatcagattcggcggcttcagaaagagaaagaaggccaagagcagcgtgagcaagaagcccggcgaggtggacgacagcctggagcagccctgcggcctgggctgcctggtgagcacctgctgcgagtgctgcaacaacatcagatgcttcatgatcttctactgcatcctgctgatctgccagggcgtggtgttcggcctgatcgacgtgagcatcggcgacttccagaaggagtaccagctgaagaccatcgagaagctggccctggagaagagctacgacatcagcagcggcctggtggccatcttcatcgccttctacggcgacagaaagaaggtgatctggttcgtggccagcagcttcctgatcggcctgggcagcctgctgtgcgccttccccagcatcaacgaggagaacaagcagagcaaggtgggcatcgaggacatctgcgaggagatcaaggtggtgagcggctgccagagcagcggcatcagcttccagagcaagtacctgagcttcttcatcctgggccagaccgtgcagggcatcgccggcatgcccctgtacatcctgggcatcaccttcatcgacgagaacgtggccacccacagcgccggcatctacctgggcatcgccgagtgcaccagcatgatcggctacgccctgggctacgtgctgggcgcccccctggtgaaggtgcccgagaacaccaccagcgccaccaacaccaccgtgaacaacggcagccccgagtggctgtggacctggtggatcaacttcctgttcgccgccgtggtggcctggtgcaccctgatccccctgagctgcttccccaacaacatgcccggcagcaccagaatcaaggccagaaagagaaagcagctgcacttcttcgacagcagactgaaggacctgaagctgggcaccaacatcaaggacctgtgcgccgccctgtggatcctgatgaagaaccccgtgctgatctgcctggccctgagcaaggccaccgagtacctggtgatcatcggcgccagcgagttcctgcccatctacctggagaaccagttcatcctgacccccaccgtggccaccaccctggccggcctggtgctgatccccggcggcgccctgggccagctgctgggcggcgtgatcgtgagcaccctggagatgagctgcaaggccctgatgagattcatcatggtgaccagcgtgatcagcctgatcctgctggtgttcatcatcttcgtgagatgcaaccccgtgcagttcgccggcatcaacgaggactacgacggcaccggcaagctgggcaacctgaccgccccctgcaacgagaagtgcagatgcagcagcagcatctacagcagcatctgcggcagagacgacatcgagtacttcagcccctgcttcgccggctgcacctacagcaaggcccagaaccagaagaagatgtactacaactgcagctgcatcaaggagggcctgatcaccgccgacgccgagggcgacttcatcgacgccagacccggcaagtgcgacgccaagtgctacaagctgcccctgttcatcgccttcatcttcagcaccctgatcttcagcggcttcagcggcgtgcccatcgtgctggccatgaccagagtggtgcccgacaagctgagaagcctggccctgggcgtgagctacgtgatcctgagaatcttcggcaccatccccggccccagcatcttcaagatgagcggcgagaccagctgcatcctgagagacgtgaacaagtgcggccacaccggcagatgctggatctacaacaagaccaagatggccttcctgctggtgggcatctgcttcctgtgcaagctgtgcaccatcatcttcaccaccatcgccttcttcatctacaagagaagactgaacgagaacaccgacttccccgacgtgaccgtgaagaaccccaaggtgaagaagaaggaggagaccgacctgtag

SEQ ID NO: 107427 - DNA, 78 bp, Artificial Sequence
  derived and/or modified sequence
ctgaacgagaacaccgacttccccgacgtgaccgtgaagaaccccaaggtgaagaagaaggaggagaccgacctgtag

SEQ ID NO: 107428 - DNA, 2160 bp, Artificial Sequence
  derived and/or modified sequence
atgttcgttggggtggccaggcactccggaagccaggacgaggtgtccagaggggtcgagcccctggaggccgcgcgcgcgcagccagctaaagatcgcagggccaaagggacacctaaaagttcaaagcccggaaagaagcatcggtaccttaggctcttgcccgaagcccttatacggtttggcgggtttagaaaacgtaagaaggcgaagagttcagtgagcaagaagccaggggaggttgatgacagcctcgagcaaccttgtggtctcggatgtttagtatcaacgtgttgcgaatgctgcaataacattcgctgtttcatgatcttctattgcatcctcctcatttgtcagggtgtagtattcggcctgatcgatgtttccattggggatttccagaaagagtaccagctcaagaccatcgaaaagttagccctcgagaagagctacgacattagcagcggcctggtagccatcttcattgctttctacggcgacagaaaaaaggtcatctggttcgtggcctctagcttcttaattgggctcgggtctctcttgtgcgcttttccctcaattaacgaggagaacaaacagagtaaggtgggcattgaggacatctgcgaagaaattaaagttgtaagcggctgtcagtccagtggaatctctttccagagtaagtacctgtcctttttcatcctcggtcagacggtgcagggaatcgctggtatgccattatacatcctagggattacattcattgacgagaatgtggctacccactccgcaggcatttatctgggcatcgctgaatgtacgtctatgataggctatgccctgggatacgtgctgggtgccccactcgtgaaagtccctgagaacactacttcagccaccaataccacagtgaataatggtagccccgagtggctgtggacttggtggattaactttctgttcgctgcagtggtggcctggtgcaccctcattccactgagctgcttcccaaacaacatgcctggatctacaagaatcaaggcccgcaaaaggaagcagttgcatttcttcgattcgagactaaaggacctgaaactgggcacaaatataaaggacctttgcgccgccctctggatcctcatgaagaaccccgtactgatttgtttggccttatccaaggctacagaatacttggtgatcatcggggcatccgaattcctgccaatttacctggagaaccaattcatccttacaccgacagtggcaaccacgttggcaggtttggtcttgatcccaggcggcgccctcggccagttattgggcggggtgattgtgtctactttagaaatgtcttgtaaagcgctgatgagattcatcatggtgacatccgtgattagccttatcctgctcgtctttatcatcttcgtcagatgtaacccggtgcagtttgccggcattaacgaagattacgatggtacgggaaagttaggaaatttgactgcgccctgtaatgagaagtgccgctgcagctcatcaatctactcatctatttgcgggcgcgacgacatagagtacttcagtccttgtttcgcaggttgcacatactctaaggcccaaaaccaaaaaaagatgtactacaactgttcgtgtattaaagaggggctcattacagcggatgccgaaggggactttattgacgctcgccccggaaagtgcgatgccaaatgctacaaattaccccttttcattgctttcattttttccaccctgatattcagtggattttctggcgtgcctattgtgttggcgatgacccgtgttgtgccagacaaacttcggtccctggcacttggagtgtcctatgtcatcctgcgcattttcggaacgattccaggaccgagtatttttaagatgagcggggagacgtcctgtattcttcgagatgttaataagtgtggacacaccggacgctgttggatctataacaagaccaaaatggccttcttgctggtcgggatatgttttctgtgcaaactgtgcacgattattttcaccactatcgcattctttatttataaaaggaggcttaacgagaatacggactttcctgatgtcaccgtcaagaatcctaaagtcaaaaaaaaggaggaaacagatttatag

SEQ ID NO: 107429 - DNA, 2160 bp, Artificial Sequence
  derived and/or modified sequence
atgtttgtgggagtggctcggcactcggggtcccaagatgaagtttcacgcggtgtggagcctctggaggccgcccgagctcagcctgcgaaagatcgccgcgccaaggggaccccgaagtcctcaaagccaggaaagaaacatcggtacctgcgccttctgccggaagctctcatccgatttgggggattccggaagaggaaaaaagctaagtccagtgttagcaagaagcccggagaagttgacgactcactagaacaaccatgcggactgggttgccttgttagtacatgctgtgagtgttgtaacaatattaggtgttttatgattttttattgtatcctcctcatttgtcaaggagtggttttcggattaatagacgtgtcaattggtgatttccagaaagagtatcaacttaaaaccatcgaaaagctggccctggaaaaaagctatgatatcagctcgggactcgtggccatcttcattgctttctatggggatagaaaaaaagtgatatggttcgtcgcctcctcctttctcatcggcctgggtagcctgctctgtgcatttccttcgatcaacgaggaaaacaagcaatctaaagtcggcattgaggacatttgtgaagaaatcaaggtcgtcagcggatgtcagagctcaggaatctcttttcagagcaagtacctgtctttcttcatcctcgggcagactgtacagggcattgccggaatgcccctttatatcctgggaatcacattcatagatgaaaacgtggcaacacactcagcaggcatttatctcggcatcgcagagtgtaccagcatgattggttacgccttgggatatgtcttaggtgcacccttggtcaaggtgcccgagaacacgacatcagcaaccaatacaactgtgaacaacggttcgcccgagtggctctggacctggtggatcaactttctgttcgcagcggtagtggcatggtgcacattgattccactgtcctgcttcccaaataatatgcccggcagcacacgaatcaaggcaaggaaacgaaaacagcttcactttttcgatagccgcttgaaagatctgaagctggggaccaatattaaggacctttgtgccgctttgtggatcctgatgaagaaccccgtcctgatttgtttggcgctcagcaaggccactgagtatctagtcatcatcggtgcatcagaattcttgcccatttatctggaaaaccaattcattctcacacctaccgtggcgacaactctggctgggctcgtattgatcccgggcggggctctgggtcagctgctgggtggtgtgatcgtgagtaccctggaaatgagctgcaaagccctgatgaggtttatcatggtaactagcgtgatcagcctcatcctgctcgtgttcattatctttgtgcgatgcaatccagtgcaattcgccggcatcaatgaagactatgacggaacaggcaagctaggcaacctcacagctccgtgcaacgagaagtgccgttgttctagctcaatttatagcagtatttgcggccgcgacgacatcgagtatttctccccctgcttcgccggttgcacttatagcaaggcccaaaaccaaaaaaagatgtattacaattgttcttgcataaaggagggcctgatcacggccgatgccgagggagatttcattgacgcacgtcctggcaagtgcgacgcaaagtgttataaacttcctctgttcattgcattcatcttttctaccctgatcttctcagggtttagtggagttcctattgtcctggccatgaccagggtggttcctgacaagctccggtccttggctctgggggttagttacgtgattctcagaatctttggcacaatacctggcccttctattttcaaaatgtccggagaaacaagctgcatcctacgggacgtaaataaatgcggccacaccggacggtgctggatctataacaagacaaagatggcctttcttctcgtcgggatttgctttctttgtaaactttgtactataatctttactacaatagcattctttatctataagagaaggctgaacgagaatacagactttccagatgtgactgtcaaaaatcctaaggtgaagaagaaagaggagacagatctctag

SEQ ID NO: 107430 - DNA, 78 bp, Artificial Sequence
  derived and/or modified sequence
ctcaatgagaacacagattttcccgatgtcaccgttaaaaaccctaaggtgaagaagaaggaggagaccgatctttag

SEQ ID NO: 107431 - DNA, 2160 bp, Artificial Sequence
  derived and/or modified sequence
atgtttgtgggcgtggcccggcacagcggcagccaggatgaggtgtcccggggcgtggagcccctggaggccgcccgggcccagcctgccaaggacagaagagccaagggcacccccaagagcagcaagccaggcaagaagcaccgctacctgcggctgctgcctgaggccctgatccgctttggaggcttcaggaagaggaagaaggccaagagctctgtgtccaagaagccaggagaggtggatgacagcctggagcagccctgtggcctgggctgcctggtgtccacctgctgtgagtgctgcaacaacatccgctgcttcatgatcttctactgcatcctgctgatctgccagggcgtggtgtttggcctgattgatgtgtccatcggggacttccagaaggagtaccagctgaagaccatcgagaagctggccctggagaagagctatgacatcagcagcggcctggtggccatcttcatcgccttctatggagacaggaagaaggtgatctggtttgtggccagcagcttcctgattggcctgggcagcctgctgtgtgccttccccagcatcaatgaggagaacaagcagagcaaggtgggcatcgaggacatctgtgaggagatcaaggtggtgtctggctgccagagcagcggcatctccttccagagcaagtacctgtccttcttcatcctgggccagacagtgcagggcattgctggcatgcccctgtacatcctgggcatcaccttcattgatgaaaatgtggccacccacagcgctggcatctacctgggcattgctgaatgtacctccatgattggctacgccctgggctacgtgctgggcgcccccctggtgaaggtgcctgagaacaccaccagcgccaccaacaccaccgtgaacaacggcagccctgagtggctgtggacctggtggatcaacttcctgtttgctgctgtggtggcctggtgcaccctcatccccctgagctgcttccccaacaacatgcctggcagcacccgcatcaaggccaggaagaggaagcagctgcacttctttgacagccggctgaaggacctgaagctgggcaccaacatcaaggacctgtgtgccgccctgtggatcctgatgaagaaccctgtgctgatctgcctggccctgagcaaggccacagagtacctggtgatcatcggggccagcgagttcctgcccatctacctggagaaccagttcatcctgacccccaccgtggccaccaccctggccggcctggtgctgatccctggaggagccctgggccagctgctgggcggcgtgattgtgtccaccctggagatgagctgcaaggccctgatgaggttcatcatggtgaccagcgtcatcagcctcatcctgctggtgttcatcatctttgtgcgctgcaaccctgtgcagtttgctggcatcaatgaagattatgatggcaccgggaagctgggcaacctgacagccccctgcaatgaaaaatgtcgctgcagcagcagcatctacagcagcatctgtggcagagatgacatcgagtacttcagcccctgctttgctggctgcacctacagcaaggcccagaaccagaagaagatgtactacaactgcagctgcatcaaggagggcctcatcacagcagatgctgagggggacttcattgatgcccggcctggaaaatgtgatgccaagtgctacaagctgcccctcttcatcgccttcatcttcagcaccctcatcttcagcggcttctctggagtgcccatcgtgctggccatgaccagggtggtgcctgacaagctgcggagcctggccctgggcgtgtcctatgtgatcctgcgcatcttcggcaccatccctggccccagcatcttcaagatgtctggagagaccagctgcatcctgagagatgtgaacaagtgtggccacacaggccgctgctggatctacaacaagaccaagatggccttcctgctggtgggcatctgcttcctgtgcaagctgtgcaccatcatcttcaccaccatcgccttcttcatctacaagaggcggctgaatgaaaatacagacttcccagatgtgacagtgaagaaccccaaggtgaagaagaaggaggagacagacctgtag

SEQ ID NO: 107432 - DNA, 78 bp, Artificial Sequence
  derived and/or modified sequence
ctcaatgaaaatacagacttcccagatgtgacagtgaagaaccccaaggtgaagaagaaggaggagacagacctgtag

SEQ ID NO: 107433 - DNA, 2160 bp, Artificial Sequence
  derived and/or modified sequence
atgttcgtgggcgtggcccggcacagcggcagccaggacgaggtgtcccgcggggtggagccactggaagcggcgagggctcagccagcgaaggacaggagagctaagggcaccccaaagtccagtaagcctggtaagaagcatcgttacctgagactcttgcctgaggctctgattcggttcggtgggttccgcaagaggaagaaagcaaagtccagcgtctcaaagaaacccggcgaagtggacgactctttggagcaaccgtgtggcttaggctgcttagtgtccacctgctgtgagtgttgcaacaatattcgctgctttatgattttctactgtattctgcttatttgccaaggtgtagtcttcggcctgattgatgtgtctatcggcgatttccaaaaagagtatcagcttaagacaattgaaaagttggccttggaaaagagctatgatattagttccggcctggtggccattttcatagcattttatggagatcggaagaaagtaatttggtttgtggcatcttcttttttaataggactcggaagtctcctgtgcgctttcccgagtatcaacgaggaaaataaacagtcaaaagttggtatcgaagacatctgcgaagagataaaagtagtttcaggctgccagagtagtggaattagcttccagtcaaaatacctgagtttctttatcctgggccagaccgttcaaggcatagcaggaatgcccctgtatatcttgggtatcactttcatcgatgaaaacgtagccactcattccgccggcatttacttaggtatcgccgagtgcacatcaatgatcgggtatgccctgggatacgtgcttggggcccccctagttaaggtccctgagaatacgacttcggccacgaataccacggtgaataatgggtcccccgagtggctttggacatggtggataaatttcctgttcgctgccgtcgtcgcttggtgtacactcatccccctgtcgtgctttccaaacaacatgcccggctccacaagaataaaagcacggaagcgcaaacaactccacttcttcgatagtcggctcaaggacttaaagctcggtacaaatattaaagatctttgcgccgccctctggattctgatgaaaaacccagtgttgatttgtctggcactgagcaaagcaactgaatacctggtgattatcggagcatccgagttccttcctatctatcttgagaaccagttcatcctcaccccaacagtggccacaacgcttgcaggcttagtgctgatcccaggcggggcactgggtcagctgcttgggggagttatcgtgagtacgctggaaatgtcgtgtaaggcacttatgcgatttataatggtaacatcggttatctcactcatccttcttgttttcatcatcttcgtccgctgcaacccagttcaatttgccgggataaatgaggactacgacggcactggaaaactgggcaatttgactgcgccttgcaacgagaaatgcagatgcagttcttccatctattcttctatatgtggtcgtgacgacatcgagtattttagcccatgctttgcgggatgcacctactcaaaagcccaaaatcagaaaaagatgtattacaactgctcatgtataaaggaaggcctaatcaccgccgatgcagagggagactttatcgatgcccggcccggtaagtgtgatgctaagtgttataagctccccctcttcattgctttcattttcagcactctcattttttcaggctttagcggggtcccgatcgtccttgcgatgacccgcgtggtccctgacaaactgcgctccctggccctcggagtcagttacgtgattttgcggatattcggaacgattccaggcccttcaatctttaaaatgagcggtgagacctcttgtattttgagggatgtgaacaaatgtggccacaccgggaggtgctggatctacaacaaaactaagatggcgttcctgctagtcggcatttgctttttatgtaaattgtgcacaattatctttaccaccatagcctttttcatttataagcggaggctcaatgagaacactgactttccagacgtcaccgtcaaaaatccaaaggtcaaaaagaaagaggaaaccgacctatag

SEQ ID NO: 107434 - DNA, 2160 bp, Artificial Sequence
  derived and/or modified sequence
atgttcgtgggcgtggcccggcacagcggcagccaggacgaggtgtctcgtggagtggagcctttggaagctgccagggcccaacctgcaaaggaccgacgtgccaaaggcaccccgaaatccagcaaacctgggaaaaagcatagatacctcaggcttttgcctgaagcccttattcgttttggcgggttccggaagaggaagaaagccaaaagcagcgtgagcaaaaagcccggtgaagtcgatgactcccttgagcagccctgtggccttggttgcctggtttccacatgctgcgaatgttgcaacaacatccgctgctttatgatattctattgcatcctactgatctgccaaggagtggtttttggactgatcgacgtctctatcggtgacttccagaaggagtatcagttgaagactatcgagaagctcgccctcgaaaagtcgtatgacattagtagcggacttgtggcaattttcatcgccttttacggcgatcgcaaaaaggttatctggttcgtggccagttcttttttaatcggtcttggcagtttactgtgtgcgtttcctagtatcaatgaggaaaataagcagagcaaagttggaattgaagatatctgtgaggagattaaggtcgtctccggatgccagtcctccggtatcagcttccagtctaaatatttatcgttctttatactggggcagacagtgcagggcattgccgggatgcccttgtatatcctgggcattacttttatcgacgagaacgttgccactcactccgcgggtatctatcttggaatagctgagtgcacgagcatgatcggctacgctcttggctatgtgctgggggcacccctggtcaaggtccccgagaacacaaccagtgcaaccaacaccaccgtgaacaatggatctcctgagtggttgtggacatggtggatcaattttctgtttgcagccgttgtggcgtggtgcacactgattcccttgtcttgctttccaaataacatgcccggctccactcggattaaggctcgcaaaagaaaacagcttcatttttttgattcccgcctcaaggacctgaagctaggcaccaatatcaaagatttatgcgcggccctgtggatcctgatgaagaatccagtgctgatctgcttggctctgagtaaagccaccgagtatttagtgatcatcggagcaagcgagtttctgcctatatatctggagaaccagtttattttgactccaaccgtcgccaccacacttgctggactagtgcttattcccgggggagcactgggtcagctgctgggcggggtcatcgtgtcaacactggaaatgtcatgcaaagccctgatgagattcatcatggtgacctcagtcatttcacttattctactggtattcatcattttcgtgcgatgtaaccccgttcagttcgcaggaattaacgaggactatgacgggacgggcaagctcgggaacctgaccgcaccatgcaatgagaagtgtcgttgctcaagctctatctatagcagcatctgtggaagggatgacattgagtacttctccccatgtttcgccggctgtacttattccaaggcccagaaccagaagaagatgtattacaactgctcctgcattaaagaggggttgattacagcagacgcagaaggagacttcattgacgcgagacctggtaagtgcgacgctaaatgctacaagctacctcttttcatcgcctttatcttctccacccttatcttctccggcttttccggcgttccaattgtgctggccatgactcgagtggtcccggacaagcttcgcagtctggcccttggagtgagttatgttatccttcgcattttcggcactattcccggacccagcatcttcaagatgtctggcgagacttcatgtatcctgcgcgatgtgaacaaatgtggccacaccggacggtgctggatatacaataagactaaaatggcgttcctcctggttggcatttgtttcctgtgtaaactgtgcaccattatattcaccacaatcgctttttttatttacaagcgacggttgaatgagaatactgactttccagacgtcactgtcaagaatccgaaggtaaagaaaaaggaggagacagacctgtag

SEQ ID NO: 107435 - DNA, 78 bp, Artificial Sequence
  derived and/or modified sequence
ctgaacgagaacaccgacttccccgacgtgaccgtgaagaaccccaaggtcaagaagaaagaggagacagacctgtag

SEQ ID NO: 107436 - DNA, 2160 bp, Artificial Sequence
  derived and/or modified sequence
atgttcgtcggtgtggcccgacatagcgggagccaagacgaagtttcgcggggagttgagcctctcgaagctgctagagctcagcctgccaaggacagacgggcaaagggaacaccaaagtcatcaaagccgggaaagaagcaccgctacctgagactccttccagaggctctgatacgttttggtggatttaggaaacgaaaaaaggccaagagtagcgtgagtaaaaagcccggtgaggtcgacgactctctggagcagccttgcggtctgggttgcctagtatcaacctgctgcgaatgctgcaacaatattcggtgtttcatgatcttttattgtattttgttgatctgccaaggagtcgtgtttggcttgattgacgtctccattggagactttcaaaaggagtaccaactgaaaacgatcgaaaagctcgccctggaaaaatcatatgatatatctagcgggctggtggccatcttcatagccttctacggcgatcgcaagaaagtgatttggtttgtggctagttcattcctcatcggactgggttccctcttatgtgcattcccatccatcaacgaggagaataaacagtccaaggtgggcatagaagatatttgcgaagagataaaggtggtgagcgggtgtcagagtagcgggatttcattccagagcaaatacctttctttcttcattctgggtcagacagttcaaggtattgccggtatgcccctttatatccttggtattacttttattgatgaaaatgtggctacacacagtgcaggaatctacctggggatcgccgaatgtaccagcatgataggttatgccctcggatacgtcctaggcgcaccattggtaaaggtcccagagaatacgacgtcagcaactaacactacagtcaacaacgggagtcctgagtggctgtggacctggtggatcaatttcctgtttgccgcagtggtcgcctggtgcacgctgattcctttgagctgcttcccaaataatatgcctggatccacaagaataaaggcccgaaagcgtaagcagcttcatttcttcgactcacgtctaaaagacctcaaacttggcaccaacattaaggatctgtgtgccgctctgtggatactgatgaagaaccctgttcttatctgcttagccctgtcaaaggctactgaatatctcgtcatcattggagcatccgagttccttccaatatacttagagaatcaatttattctgacacccaccgtcgccacgacactggcaggtttggtgcttataccgggtggtgcgcttggccaattgttaggaggtgtcattgtgtctaccctggagatgagctgtaaggccctcatgaggtttattatggtgacatcagtcatcagccttatcttgctggtgtttatcatctttgtccgctgtaacccggtgcagtttgccggtatcaatgaagactacgacggcaccggcaagctcggcaaccttaccgcaccttgcaacgagaagtgccggtgtagcagcagtatctactcatctatttgtgggagggatgacattgagtattttagcccctgcttcgccggttgtacatactcaaaggcccagaatcaaaagaaaatgtactacaactgtagttgtattaaggaaggactgatcacagccgatgccgaaggtgactttatagatgccagaccgggaaaatgcgacgctaaatgctataagctacccctttttattgcatttattttctctacactgatcttttccggcttctcaggtgtcccaattgtcctggccatgacccgggtggtgccagacaagctgaggagcttagcgctgggggtgtcatacgttatcctgcggatcttcggaactatccctggaccctcaatcttcaagatgagcggcgaaacgagttgtatccttagggatgttaataagtgtggccatactggccgttgttggatctacaacaaaacaaaaatggcctttctgttggttggaatttgttttctctgcaaattgtgtacgatcatctttaccacgattgcattcttcatttataaacgtaggctcaacgaaaatacagattttcccgacgtaacagtgaagaaccccaaagtgaagaagaaggaagagaccgacctctag

SEQ ID NO: 107437 - DNA, 2160 bp, Artificial Sequence
  derived and/or modified sequence
atgttcgttggggtggctcggcacagcggtagccaggacgaggtttcaaggggggtcgagccgctggaggccgcacgcgcacagcccgcaaaagaccggcgagccaagggaacacccaaatcttctaagcccggaaaaaaacacaggtatctgagattgctgccggaagctctgattcgatttgggggatttagaaaaaggaaaaaggcgaaatcctctgtatcaaaaaagcctggagaagtagacgactcgctcgaacaaccttgcggactgggctgtctggtaagcacgtgctgtgaatgctgtaataacatccggtgttttatgattttctattgcatcttgttgatatgtcagggagtggtgttcggccttatagacgtctctattggggatttccagaaggagtatcagcttaaaactatcgaaaaactcgccctcgaaaagtcttacgatatctcctccggcttagtcgccatttttatagccttttacggcgataggaaaaaggtgatttggttcgttgcttctagcttcctaatcggactcggatcccttctctgtgcttttccatctataaatgaggagaacaaacagagtaaggtgggaattgaagacatatgtgaggagataaaagtggtttcaggctgccagtcctcaggcatcagtttccagtccaagtatctctcattctttatactgggtcagactgtccaaggcatcgctggtatgcctctctacattttaggcattacatttatcgacgagaacgttgccacacattcagcgggtatttacctagggatcgcagaatgtactagtatgatagggtatgcattggggtatgtgttgggtgctccattagttaaggtccccgagaataccaccagtgcgaccaatacgactgtaaataatggatctcccgaatggctttggacttggtggattaattttctgtttgcagccgtggtagcctggtgtactttaattcccttgtcttgcttcccgaataacatgccaggtagcacaaggattaaggcccgaaagcgcaagcagttacacttcttcgactcccggctgaaagatcttaagttgggaacaaacatcaaggacctgtgcgccgctctctggatcctcatgaagaatcccgtgctgatctgcctggccctgagcaaggccaccgagtatctggtgattatcggggcatctgagttcctcccaatttacctggagaaccagttcattttaactcctacggtcgcaactacactggcgggtttagtacttattcccggtggcgctctgggacagctcttgggaggagtgattgttagcaccctcgaaatgtcatgtaaagctctgatgcggttcatcatggtcacttctgtgatttcgctaattctcctcgtgttcattattttcgtgagatgcaaccctgtgcagttcgctgggataaacgaggactatgacggcaccggtaaactcggtaacctcacagcaccatgtaacgagaagtgcaggtgttcttcctcaatctatagctctatatgcggtagagacgacatcgaatacttcagtccttgtttcgctgggtgcacgtactctaaagcacagaatcagaagaagatgtattacaactgcagctgtatcaaagaaggcctaataacggctgatgcagagggtgattttatcgatgccaggccaggcaaatgtgacgcaaaatgctataaactgccgctattcatcgccttcatctttagcacattgatttttagcggctttagcggcgtacccatcgtgttagcaatgaccagggtcgtcccagacaagctcagatctttggctttgggagtctcttacgtcatcctcagaatttttggcaccattccaggcccatccatcttcaaaatgtctggagagacttcatgtattctgagagacgtgaataaatgcggtcacactgggaggtgctggatttacaacaagacgaagatggcctttctgctggtaggcatttgttttctctgtaagctgtgcacaattatcttcaccactatcgcttttttcatctacaagcgtagactgaacgagaataccgacttccctgacgtgaccgtgaaaaatccgaaggttaagaaaaaggaggaaaccgatctgtag

SEQ ID NO: 107438 - DNA, 78 bp, Artificial Sequence
  derived and/or modified sequence
ctcaatgaaaataccgactttccagacgtaaccgtcaagaatcctaaagtcaagaaaaaggaagagacggatctatag

SEQ ID NO: 107439 - DNA, 2437 bp, Artificial Sequence
  derived and/or modified sequence
gcttgggcggcaagagccccttgtggccaccgagtcctccgacgccctcgccaggctggcctttgggttggcccaggcaggacgggcagccgagagcactcgggccgcgtcgccaggagccgcccagggtgagccatgttcgtaggcgtcgcccggcactctgggagccaggatgaagtctcaaggggagtagagccgctggaggccgcgcgggcccagcctgctaaggacaggagggccaagggaaccccgaagtcctcgaagcccgggaaaaaacaccggtatctgagactacttccagaggccttgataaggttcggcggtttccgaaaaaggaaaaaagccaagtcctcagtttccaagaagccgggagaagtggatgacagtttggagcagccctgtggtttgggctgcttagtcagcacctgctgtgagtgttgcaataacattcgctgcttcatgattttctactgcatcctgctcatatgtcaaggtgtggtgtttggtcttatagatgtcagcattggcgattttcagaaggaatatcaactgaaaaccattgagaagttggcattggaaaagagttacgatatttcatctggcctggtagcaatatttatagcattctatggagacagaaaaaaagtaatatggtttgtagcttcctcctttttaataggacttggatcacttttatgtgcttttccatccattaatgaagaaaataaacaaagtaaggtaggaattgaagatatttgcgaagaaataaaggttgtcagtggttgccagagcagtggtatatcattccaatcaaaatacctgtctttcttcatccttgggcagactgtgcagggaatagcaggaatgcctctttatatccttggaataacctttattgatgagaatgttgctacacactcagctggtatctatttaggtattgcagaatgtacatcaatgattggatatgctctgggttatgtgctaggagcaccactagttaaagtccctgagaatactacttctgcaacaaacactacagtcaataatggtagtccagaatggctatggacttggtggattaattttctttttgccgctgtcgttgcatggtgtacattaataccattgtcatgctttccaaacaatatgccaggttcaacacggataaaagctaggaaacgtaaacagcttcatttttttgacagcagacttaaagatctgaaacttggaactaatatcaaggatttatgtgctgctctttggattctgatgaagaatccagtgctcatatgcctagctctgtcaaaagctacagaatatttagttattattggagcttctgaatttttgcctatatatttagaaaatcagtttatattaacacccactgtggcaactacacttgcaggacttgttttaattccaggaggtgcacttggccagcttctgggaggtgtcattgtttccacattagaaatgtcttgtaaagcccttatgagatttataatggttacatctgtgatatcacttatactgcttgtgtttattatttttgtacgctgtaatccagtgcaatttgctgggatcaatgaagattatgatggaacagggaagttgggaaacctcacggctccttgcaatgaaaaatgtagatgctcatcttcaatttattcttctatatgtggaagagatgatattgaatatttttctccctgctttgcagggtgtacatattctaaagcacaaaaccaaaaaaagatgtactacaattgttcttgcattaaagaaggattaataactgcagatgcagaaggtgattttattgatgccagacccgggaaatgtgatgcaaagtgctataagttacctttgttcattgcttttatcttttctacacttatattttctggtttttctggtgtaccaatcgtcttggccatgacgcgggttgtacctgacaaactgcgttctctggccttgggtgtaagctatgtgattttgagaatatttgggactattcctggaccatcaatctttaaaatgtcaggagaaacttcttgtattttacgggatgttaataaatgtggacacacaggacgttgttggatatataacaagacaaaaatggctttcttattggtaggaatatgttttctttgcaaactatgcactatcatcttcactactattgcatttttcatatacaaacgtcgtctaaatgagaacactgacttcccagatgtaactgtgaagaatccaaaagttaagaaaaaagaagaaactgacttgtaactggatcatcattgtattctccaagatttgtttctgtgcccaactttcagaagaggaaaatcacacattatgtttacataagtagcaaaaatatatttatggtgatctgcattttcataataaagtgtcctattgtgaaaca

SEQ ID NO: 107440 - DNA, 2689 bp, Artificial Sequence
  derived and/or modified sequence
tttgcctcctgccctaggagaaacgttcgctctggaggcttgggcggcaagagccccttgtggccaccgagtcctccgacgccctcgccaggctggcctttgggttggcccaggcaggacgggcagccgagagcactcgggccgcgtcgccaggagccgcccagggtgagccatgttcgtaggcgtcgcccggcactctgggagccaggatgaagtctcaaggggagtagagccgctggaggccgcgcgggcccagcctgctaaggacaggagggccaagggaaccccgaagtcctcgaagcccgggaaaaaacaccggtatctgagactacttccagaggccttgataaggttcggcggtttccgaaaaaggaaaaaagccaagtcctcagtttccaagaagccgggagaagtggatgacagtttggagcagccctgtggtttgggctgcttagtcagcacctgctgtgagtgttgcaataacattcgctgcttcatgattttctactgcatcctgctcatatgtcaaggtgtggtgtttggtcttatagatgtcagcattggcgattttcagaaggaatatcaactgaaaaccattgagaagttggcattggaaaagagttacgatatttcatctggcctggtagcaatatttatagcattctatggagacagaaaaaaagtaatatggtttgtagcttcctcctttttaataggacttggatcacttttatgtgcttttccatccattaatgaagaaaataaacaaagtaaggtaggaattgaagatatttgcgaagaaataaaggttgtcagtggttgccagagcagtggtatatcattccaatcaaaatacctgtctttcttcatccttgggcagactgtgcagggaatagcaggaatgcctctttatatccttggaataacctttattgatgagaatgttgctacacactcagctggtatctatttaggtattgcagaatgtacatcaatgattggatatgctctgggttatgtgctaggagcaccactagttaaagtccctgagaatactacttctgcaacaaacactacagtcaataatggtagtccagaatggctatggacttggtggattaattttctttttgccgctgtcgttgcatggtgtacattaataccattgtcatgctttccaaacaatatgccaggttcaacacggataaaagctaggaaacgtaaacagcttcatttttttgacagcagacttaaagatctgaaacttggaactaatatcaaggatttatgtgctgctctttggattctgatgaagaatccagtgctcatatgcctagctctgtcaaaagctacagaatatttagttattattggagcttctgaatttttgcctatatatttagaaaatcagtttatattaacacccactgtggcaactacacttgcaggacttgttttaattccaggaggtgcacttggccagcttctgggaggtgtcattgtttccacattagaaatgtcttgtaaagcccttatgagatttataatggttacatctgtgatatcacttatactgcttgtgtttattatttttgtacgctgtaatccagtgcaatttgctgggatcaatgaagattatgatggaacagggaagttgggaaacctcacggctccttgcaatgaaaaatgtagatgctcatcttcaatttattcttctatatgtggaagagatgatattgaatatttttctccctgctttgcagggtgtacatattctaaagcacaaaaccaaaaaaagatgtactacaattgttcttgcattaaagaaggattaataactgcagatgcagaaggtgattttattgatgccagacccgggaaatgtgatgcaaagtgctataagttacctttgttcattgcttttatcttttctacacttatattttctggtttttctggtgtaccaatcgtcttggccatgacgcgggttgtacctgacaaactgcgttctctggccttgggtgtaagctatgtgattttgagaatatttgggactattcctggaccatcaatctttaaaatgtcaggagaaacttcttgtattttacgggatgttaataaatgtggacacacaggacgttgttggatatataacaagacaaaaatggctttcttattggtaggaatatgttttctttgcaaactatgcactatcatcttcactactattgcatttttcatatacaaacgtcgtctaaatgagaacactgacttcccagatgtaactgtgaagaatccaaaagttaagaaaaaagaagaaactgacttgtaactggatcatcattgtgattgcagatcatttgaggatcagagtgtgaaaacgagtttctcttttacagattctccaagatttgtttctgtgcccaactttcagaagaggaaaatcacacattatgtttacataagtagcaaaaatatatttatggtgatctgcattttcataataaagtgtcctattgtgaaacatttctgataatgtttttaatgtatgtagaatttttaggatttactgggagaattaaagtttaataattttagattatttacatttcttcttaatattctgctgtctagaaatattaaaaattatacaactaggaaataaagtaaaataataacattcaaagcc

SEQ ID NO: 107441 - protein, 1256 aa, Artificial Sequence
  derived and/or modified sequence
MKRNGSRNCLNRRSRFGSRERDWLREDVKRGCVYLYGADTTTATTTTTTSSSSSSSSSSSDLHLVLCTVETPASEICAGEGRESLYLQLHGDLVRRLEPTERPLQIVYDYLSRLGFDDPVRIQEEATNPDLGCMIRFYGEKPCHMDRLDRILLSGIYNVRKGKTQLHKWAERLVVLCGTCLIVSSVKDCQTGKMHILPLVGGKIEEVKRRQYSLAFSSAGAQAQTYHVSFETLAEYQRWQRQASKVVSQRISTVDLSCYSLEEVPEHLFYSQDITYLNLRHNFMQLERPGGLDTLYKFSQLKGLNLSHNKLGLFPILLCEISTLTELNLSCNGFHDLPSQIGNLLNLQTLCLDGNFLTTLPEELGNLQQLSSLGISFNNFSQIPEVYEKLTMLDRVVMAGNCLEVLNLGVLNRMNHIKHVDLRMNHLKTMVIENLEGNKHITHVDLRDNRLTDLDLSSLCSLEQLHCGRNQLRELTLSGFSLRTLYASSNRLTAVNVYPVPSLLTFLDLSRNLLECVPDWACEAKKIEVLDVSYNLLTEVPVRILSSLSLRKLMLGHNHVQNLPTLVEHIPLEVLDLQHNALTRLPDTLFSKALNKLNKLEQLEELNLSGNKLKTIPTTIANCKRLHTLVAHSNNISIFPEILQLPQIQFVDLSCNDLTEILIPEALPATLQDLDLTGNTNLVLEHKTLDIFSHITTLKIDQKPLPTTDSTVTSTFWSHGLAEMAGQRNKLCVSALAMDSFAEGVGAVYGMFDGDRNEELPRLLQCTMADVLLEEVQQSTNDTVFMANTFLVSHRKLGMAGQKLGSSALLCYIRPDTADPASSFSLTVANVGTCQAVLCRGGKPVPLSKVFSLEQDPEEAQRVKDQKAIITEDNKVNGVTCCTRMLGCTYLYPWILPKPHISSTPLTIQDELLILGNKALWEHLSYTEAVNAVRHVQDPLAAAKKLCTLAQSYGCQDNVGAMVVYLNIGEEGCTCEMNGLTLPGPVGFASTTTIKDAPKPATPSSSSGIASEFSSEMSTSEVSSEVGSTASDEHNAGGLDTALLPRPERRCSLHPTPTSGLFQRQPSSATFSSNQSDNGLDSDDDQPVEGVITNGSKVEVEVDIHCCRGRDLENSPPLIESSPTLCSEEHARGSCFGIRRQNSVNSGMLLPMSKDRMELQKSPSTSCLYGKKLSNGSIVPLEDSLNLIEVATEVPKRKTGYFAAPTQMEPEDQFVVPHDLEEEVKEQMKQHQDSRLEPEPHEEDRTEPPEEFDTAL

SEQ ID NO: 107442 - protein, 423 aa, Artificial Sequence
  derived and/or modified sequence
MKRNGSRNCLNRRSRFGSRERDWLREDVKRGCVYLYGADTTTATTTTTTSSSSSSSSSSSDLHLVLCTVETPASEICAGEGRESLYLQLHGDLVRRLEPTERPLQIVYDYLSRLGFDDPVRIQEEATNPDLGCMIRFYGEKPCHMDRLDRILLSGIYNVRKGKTQLHKWAERLVVLCGTCLIVSSVKDCQTGKMHILPLVGGKIEEVKRRQYSLAFSSAGAQAQTYHVSFETLAEYQRWQRQASKVVSQRISTVDLSCYSLEEVPEHLFYSQDITYLNLRHNFMQLERPGGLDTLYKFSQLKGLNLSHNKLGLFPILLCEISTLTELNLSCNGFHDLPSQIGNLLNLQTLCLDGNFLTTLPEELGNLQQLSSLGISFNNFSQIPEVYEKLTMLDRVVMAGNCLEVLNLGVLNRMNHIKHVDLR

SEQ ID NO: 107443 - DNA, 3771 bp, Artificial Sequence
  derived and/or modified sequence
atgaagagaaacggcagcagaaactgcctgaacagaagaagcagattcggcagcagagagagagactggctgagagaggacgtgaagagaggctgcgtgtacctgtacggcgccgacaccaccaccgccaccaccaccaccaccaccagcagcagcagcagcagcagcagcagcagcagcgacctgcacctggtgctgtgcaccgtggagacccccgccagcgagatctgcgccggcgagggcagagagagcctgtacctgcagctgcacggcgacctggtgagaagactggagcccaccgagagacccctgcagatcgtgtacgactacctgagcagactgggcttcgacgaccccgtgagaatccaggaggaggccaccaaccccgacctgggctgcatgatcagattctacggcgagaagccctgccacatggacagactggacagaatcctgctgagcggcatctacaacgtgagaaagggcaagacccagctgcacaagtgggccgagagactggtggtgctgtgcggcacctgcctgatcgtgagcagcgtgaaggactgccagaccggcaagatgcacatcctgcccctggtgggcggcaagatcgaggaggtgaagagaagacagtacagcctggccttcagcagcgccggcgcccaggcccagacctaccacgtgagcttcgagaccctggccgagtaccagagatggcagagacaggccagcaaggtggtgagccagagaatcagcaccgtggacctgagctgctacagcctggaggaggtgcccgagcacctgttctacagccaggacatcacctacctgaacctgagacacaacttcatgcagctggagagacccggcggcctggacaccctgtacaagttcagccagctgaagggcctgaacctgagccacaacaagctgggcctgttccccatcctgctgtgcgagatcagcaccctgaccgagctgaacctgagctgcaacggcttccacgacctgcccagccagatcggcaacctgctgaacctgcagaccctgtgcctggacggcaacttcctgaccaccctgcccgaggagctgggcaacctgcagcagctgagcagcctgggcatcagcttcaacaacttcagccagatccccgaggtgtacgagaagctgaccatgctggacagagtggtgatggccggcaactgcctggaggtgctgaacctgggcgtgctgaacagaatgaaccacatcaagcacgtggacctgagaatgaaccacctgaagaccatggtgatcgagaacctggagggcaacaagcacatcacccacgtggacctgagagacaacagactgaccgacctggacctgagcagcctgtgcagcctggagcagctgcactgcggcagaaaccagctgagagagctgaccctgagcggcttcagcctgagaaccctgtacgccagcagcaacagactgaccgccgtgaacgtgtaccccgtgcccagcctgctgaccttcctggacctgagcagaaacctgctggagtgcgtgcccgactgggcctgcgaggccaagaagatcgaggtgctggacgtgagctacaacctgctgaccgaggtgcccgtgagaatcctgagcagcctgagcctgagaaagctgatgctgggccacaaccacgtgcagaacctgcccaccctggtggagcacatccccctggaggtgctggacctgcagcacaacgccctgaccagactgcccgacaccctgttcagcaaggccctgaacaagctgaacaagctggagcagctggaggagctgaacctgagcggcaacaagctgaagaccatccccaccaccatcgccaactgcaagagactgcacaccctggtggcccacagcaacaacatcagcatcttccccgagatcctgcagctgccccagatccagttcgtggacctgagctgcaacgacctgaccgagatcctgatccccgaggccctgcccgccaccctgcaggacctggacctgaccggcaacaccaacctggtgctggagcacaagaccctggacatcttcagccacatcaccaccctgaagatcgaccagaagcccctgcccaccaccgacagcaccgtgaccagcaccttctggagccacggcctggccgagatggccggccagagaaacaagctgtgcgtgagcgccctggccatggacagcttcgccgagggcgtgggcgccgtgtacggcatgttcgacggcgacagaaacgaggagctgcccagactgctgcagtgcaccatggccgacgtgctgctggaggaggtgcagcagagcaccaacgacaccgtgttcatggccaacaccttcctggtgagccacagaaagctgggcatggccggccagaagctgggcagcagcgccctgctgtgctacatcagacccgacaccgccgaccccgccagcagcttcagcctgaccgtggccaacgtgggcacctgccaggccgtgctgtgcagaggcggcaagcccgtgcccctgagcaaggtgttcagcctggagcaggaccccgaggaggcccagagagtgaaggaccagaaggccatcatcaccgaggacaacaaggtgaacggcgtgacctgctgcaccagaatgctgggctgcacctacctgtacccctggatcctgcccaagccccacatcagcagcacccccctgaccatccaggacgagctgctgatcctgggcaacaaggccctgtgggagcacctgagctacaccgaggccgtgaacgccgtgagacacgtgcaggaccccctggccgccgccaagaagctgtgcaccctggcccagagctacggctgccaggacaacgtgggcgccatggtggtgtacctgaacatcggcgaggagggctgcacctgcgagatgaacggcctgaccctgcccggccccgtgggcttcgccagcaccaccaccatcaaggacgcccccaagcccgccacccccagcagcagcagcggcatcgccagcgagttcagcagcgagatgagcaccagcgaggtgagcagcgaggtgggcagcaccgccagcgacgagcacaacgccggcggcctggacaccgccctgctgcccagacccgagagaagatgcagcctgcaccccacccccaccagcggcctgttccagagacagcccagcagcgccaccttcagcagcaaccagagcgacaacggcctggacagcgacgacgaccagcccgtggagggcgtgatcaccaacggcagcaaggtggaggtggaggtggacatccactgctgcagaggcagagacctggagaacagcccccccctgatcgagagcagccccaccctgtgcagcgaggagcacgccagaggcagctgcttcggcatcagaagacagaacagcgtgaacagcggcatgctgctgcccatgagcaaggacagaatggagctgcagaagagccccagcaccagctgcctgtacggcaagaagctgagcaacggcagcatcgtgcccctggaggacagcctgaacctgatcgaggtggccaccgaggtgcccaagagaaagaccggctacttcgccgcccccacccagatggagcccgaggaccagttcgtggtgccccacgacctggaggaggaggtgaaggagcagatgaagcagcaccaggacagcagactggagcccgagccccacgaggaggacagaaccgagccccccgaggagttcgacaccgccctgtag

SEQ ID NO: 107444 - DNA, 1272 bp, Artificial Sequence
  derived and/or modified sequence
atgaagagaaacggcagcagaaactgcctgaacagaagaagcagattcggcagcagagagagagactggctgagagaggacgtgaagagaggctgcgtgtacctgtacggcgccgacaccaccaccgccaccaccaccaccaccaccagcagcagcagcagcagcagcagcagcagcagcgacctgcacctggtgctgtgcaccgtggagacccccgccagcgagatctgcgccggcgagggcagagagagcctgtacctgcagctgcacggcgacctggtgagaagactggagcccaccgagagacccctgcagatcgtgtacgactacctgagcagactgggcttcgacgaccccgtgagaatccaggaggaggccaccaaccccgacctgggctgcatgatcagattctacggcgagaagccctgccacatggacagactggacagaatcctgctgagcggcatctacaacgtgagaaagggcaagacccagctgcacaagtgggccgagagactggtggtgctgtgcggcacctgcctgatcgtgagcagcgtgaaggactgccagaccggcaagatgcacatcctgcccctggtgggcggcaagatcgaggaggtgaagagaagacagtacagcctggccttcagcagcgccggcgcccaggcccagacctaccacgtgagcttcgagaccctggccgagtaccagagatggcagagacaggccagcaaggtggtgagccagagaatcagcaccgtggacctgagctgctacagcctggaggaggtgcccgagcacctgttctacagccaggacatcacctacctgaacctgagacacaacttcatgcagctggagagacccggcggcctggacaccctgtacaagttcagccagctgaagggcctgaacctgagccacaacaagctgggcctgttccccatcctgctgtgcgagatcagcaccctgaccgagctgaacctgagctgcaacggcttccacgacctgcccagccagatcggcaacctgctgaacctgcagaccctgtgcctggacggcaacttcctgaccaccctgcccgaggagctgggcaacctgcagcagctgagcagcctgggcatcagcttcaacaacttcagccagatccccgaggtgtacgagaagctgaccatgctggacagagtggtgatggccggcaactgcctggaggtgctgaacctgggcgtgctgaacagaatgaaccacatcaagcacgtggacctgagatag

SEQ ID NO: 107445 - DNA, 501 bp, Artificial Sequence
  derived and/or modified sequence
atggccggccagagaaacaagctgtgcgtgagcgccctggccatggacagcttcgccgagggcgtgggcgccgtgtacggcatgttcgacggcgacagaaacgaggagctgcccagactgctgcagtgcaccatggccgacgtgctgctggaggaggtgcagcagagcaccaacgacaccgtgttcatggccaacaccttcctggtgagccacagaaagctgggcatggccggccagaagctgggcagcagcgccctgctgtgctacatcagacccgacaccgccgaccccgccagcagcttcagcctgaccgtggccaacgtgggcacctgccaggccgtgctgtgcagaggcggcaagcccgtgcccctgagcaaggtgttcagcctggagcaggaccccgaggaggcccagagagtgaaggaccagaaggccatcatcaccgagaactgggtgctgaaccagaagcacctgcaggacttccccggcgaggacaagtag

SEQ ID NO: 107446 - DNA, 3771 bp, Artificial Sequence
  derived and/or modified sequence
atgaagcggaatggctcccgcaattgccttaatcggaggtctcggttcggatcacgtgaacgcgactggctgcgtgaggatgtcaaacgtgggtgtgtttacttgtatggtgctgataccacgaccgcaaccaccactacaaccacaagctcaagtagcagctcctccagctcatcctccgacctacatcttgtcctgtgcaccgtggaaactcctgccagcgagatctgtgctggcgagggacgcgagtcactctatctccagttacatggcgatctggtgagacggctggagcccactgaacgtccgctgcagatcgtgtatgactacctgtccagacttggttttgacgatcctgtgcggatccaagaggaagcaacaaatcccgatctggggtgcatgatccgcttctacggcgagaagccatgccacatggatagacttgacaggattttgctgtcaggaatttacaatgtcagaaaggggaagactcaacttcataagtgggccgaacgattggttgttttgtgtggtacttgtctgattgttagctcggtgaaagattgccagaccggcaagatgcatatactcccacttgtcggcggaaagattgaggaggtcaagcgaaggcagtacagtctggcgttctcgagcgctggggcccaggctcagacgtatcatgtctcctttgaaactttggccgagtaccaacgttggcagagacaggcatccaaagtcgtaagccagaggatttccactgtcgatttgagttgttacagcctcgaagaagttcccgagcacttgttctattctcaggatatcacttatctgaatctgagacacaatttcatgcaactcgaacgccccggtggacttgacacgctgtacaaattctcacagttaaaagggctgaacttgtctcataacaaacttggtttgtttcccatcctattgtgtgagatcagcacgttaactgagttgaacttaagctgtaacgggtttcacgatttaccatcacagatcggtaatctgttgaatttacagacactgtgcttagacggcaattttttaactacacttccagaggaacttggaaacctacagcagctttcaagcctgggaattagctttaataacttttcacagatcccagaggtgtacgagaaattgaccatgttggatagagttgtgatggcaggaaattgtctcgaggttttgaatctgggcgtgctgaaccgaatgaaccatatcaagcacgtggatcttagaatgaatcacctgaagacaatggttatagagaacttggaaggcaacaaacacattacgcacgtggatttgcgagataacagactcaccgacctcgatctgtctagcctgtgttcccttgagcaactgcactgcggccgcaaccaactgagagaactcaccctgtccggattttccctgaggaccctctacgcttcctctaataggctgacagctgtcaatgtatacccagtcccctcattgcttacatttctggacctgtccagaaacctcttggaatgtgtgcctgattgggcctgcgaagccaagaaaattgaggtccttgatgtgagttataaccttttgactgaggtccctgtacgtattctgagcagcctgagcctgcgtaagcttatgttaggccacaaccacgttcaaaacctgccaaccctggtggagcacattcccctagaagtgttggacttgcagcacaacgctttaacccgattgccggacacactgttctcgaaagcgttgaataaactcaataagctcgaacaattagaggaactgaatctgtccggaaacaaattaaaaacaattcctacaacgatcgctaattgcaaacgcctgcatacgctggtggcacactctaataatatcagtatatttcctgagatcctccagcttcctcagatacaattcgtcgacctgtcatgtaatgatctgaccgagatcctaatccctgaggctcttcctgctacgctgcaggatttagatctgacaggcaacacgaacttggtcctcgaacataagacacttgacattttttcacacatcacaacccttaagattgaccaaaagcccctccctaccacagattctacggtgacctcaacattctggagccatggcctggctgagatggccggccagcgaaacaagctgtgcgtgagtgctttggcgatggatagcttcgcggagggcgttggtgccgtctacggcatgttcgatggtgacaggaatgaggaactaccccggctgttgcagtgtaccatggccgatgtcctgctggaggaagtgcagcagtcaaccaatgatacagttttcatggccaatacgtttctggtgtcacacaggaagctcgggatggccgggcagaagctggggtcctcggcgttgctgtgttatatacgcccggacactgcagaccctgcttcatctttttctcttactgtcgccaatgtggggacctgtcaggcagtcttatgccggggaggaaaacccgttcctttaagcaaggtcttttcactggagcaggacccggaggaggcccaacgtgtcaaggatcaaaaagctatcatcaccgaggacaacaaggtgaatggtgtaacgtgttgcaccaggatgttgggatgtacctatctatatccctggatcttgcctaagccccacatttcttctacccccctgaccattcaggacgaactcctgatcctgggcaacaaagccctgtgggagcacctgtcttacacggaagcagtgaatgccgtccggcatgtgcaagaccccctcgccgccgccaaaaagctctgcacgctggctcagagttacgggtgccaggacaatgtcggggcaatggtagtatacctgaatataggagaggaagggtgtacctgcgagatgaacggattaactctgcccggaccagtgggttttgcctctactactactataaaggatgcccctaaaccggctacccccagctcatcgagcggcattgcttccgagtttagctcagagatgagcacaagtgaggttagttcagaggtgggttccactgctagtgatgagcataatgccggcgggctggacaccgccctattgcctaggcccgagcggaggtgctctctccaccccactcctacctccggtctttttcagaggcagcccagtagtgccactttttcctccaatcagtccgataacggactcgacagtgatgacgaccaacctgtcgagggagtgatcacaaacggaagcaaggtggaggtagaggtcgacatccactgctgtcgcgggcgggatttggagaattctccgccgctcatagagtcgtcaccaaccttatgtagcgaggaacatgctagagggtcatgcttcgggatccgccgacagaactctgtgaactcagggatgctgcttccaatgtccaaagataggatggagctccagaaatcacctagcacctcttgcctgtacggaaaaaaactgtctaatggtagcatcgtacctctggaggacagccttaacctaatcgaggtcgccactgaagttcctaagcggaagactggatatttcgccgcgccaactcaaatggagcctgaagatcaattcgtggtacctcatgaccttgaagaagaggtaaaggagcagatgaaacaacaccaggacagccgcctcgaaccggaacctcacgaggaagatcgcaccgagcctcccgaagagtttgacactgctctgtag

SEQ ID NO: 107447 - DNA, 1272 bp, Artificial Sequence
  derived and/or modified sequence
atgaaacggaatgggagtcggaattgcctaaacaggagaagccggtttggttctcgcgagcgcgactggcttagagaagatgttaaaaggggctgcgtgtatttgtacggagccgacaccacgacggccaccaccacgacaaccacttcctctagctcctcaagcagctcttcctcgagcgacttacacctagtactctgcaccgttgagacccccgcctctgagatttgcgcaggggagggccgagaatcactttacctgcaacttcacggggatctggtgcggcggttggagccaactgagaggcctctacaaattgtttacgattaccttagccggttgggatttgacgatcctgtccgcatccaggaggaggctaccaaccctgacttggggtgtatgatcaggttttacggcgagaagccttgtcatatggaccgactggacaggatattgctttcgggaatttataacgtgcgcaagggcaagactcaattacacaagtgggccgagcgcttggttgttctttgcggaacttgcttaatcgtatcctccgtgaaggattgtcagacaggcaagatgcacattttaccactagtgggaggaaagattgaagaagtgaaacgcaggcagtattctcttgccttttcatccgcgggcgctcaggcgcagacataccacgtgtcttttgaaaccctggcggagtatcagcgctggcaaagacaagcttctaaagtggtttctcagcgaatcagcacggtggacttaagttgttactctcttgaggaggttccagagcacctgttctactcgcaggatattacatacctgaacttaaggcacaacttcatgcaattagaaaggcccggcggtctcgacactttgtacaagtttagtcagctgaagggccttaacttgagccacaacaaactgggcctcttcccgattctgttatgtgagattagtactctgacggagttgaatctaagttgtaatggtttccatgacctgcctagccaaatcggaaacttgctcaatcttcagacactctgtctcgacggaaatttcctaaccacccttcctgaagaactgggaaatctgcagcaattgagtagtctgggaatatcctttaataacttctcccagattcctgaagtgtacgaaaaacttacaatgctggatagagtggtgatggcaggtaattgtttggaggtccttaatcttggggtgctgaataggatgaatcacattaagcatgtcgacctaagatag

SEQ ID NO: 107448 - DNA, 501 bp, Artificial Sequence
  derived and/or modified sequence
atggccggacaacgcaacaagctctgcgtgtctgccttggcgatggactcgttcgcagagggcgtcggggcagtgtatggcatgttcgacggggacagaaacgaggagttgcccaggcttctgcaatgcaccatggcagacgtgctgctcgaggaggtgcagcagagcacgaacgataccgtgttcatggccaacacatttctcgtgagccaccggaaactcggaatggctggacagaaactgggctcctccgccctcctctgctatataagaccagacaccgccgaccccgctagctccttcagtctcacagtcgctaacgtcggtacctgtcaggctgtactctgccgaggcgggaagccagtaccactcagcaaagtgttctcactggaacaggatcctgaggaggcccagagggtgaaagatcagaaagcaattataaccgagaattgggttctgaaccaaaagcacttgcaagacttcccgggggaagacaaatag

SEQ ID NO: 107449 - DNA, 3771 bp, Artificial Sequence
  derived and/or modified sequence
atgaagagaaatggcagcaggaactgcctgaacagaagaagccgcttcggcagccgggagcgggactggctgcgggaggatgtgaagaggggctgtgtgtacctgtatggagctgacaccaccacagccaccaccaccaccaccaccagcagcagcagcagcagcagcagcagcagcagtgacctgcacctggtgctgtgcaccgtggagaccccagccagcgagatctgtgccggggagggccgggagagcctgtacctgcagctgcacggggacctggtgcggcggctggagcccacagagcggcccctgcagatcgtgtatgactacctgagccggctgggctttgatgatcctgtgcgcatccaggaggaggccaccaacccagacctgggctgcatgatccgcttctacggggagaagccctgccacatggaccggctggaccgcatcctgctgagcggcatctacaacgtgaggaagggcaagacccagctgcacaagtgggccgagcggctggtggtgctgtgtggcacctgcctgattgtgtcctctgtgaaggactgccagacaggcaagatgcacatcctgcccctggtgggcggcaagattgaggaggtgaagaggcggcagtacagcctggccttcagcagcgctggggcccaggcccagacctaccacgtgtcctttgagaccctggccgagtaccagcgctggcagaggcaggccagcaaggtggtgtcccagaggatcagcacagtggacctgagctgctacagcctggaggaggtgcctgagcacctgttctacagccaggacatcacctacctgaacctgcggcacaacttcatgcagctggagaggcctgggggcctggacaccctgtacaagttcagccagctgaagggcctgaacctgagccacaacaagctgggcctcttccccatcctgctgtgtgagatcagcaccctgacagagctgaacctgagctgcaatggcttccatgacctgcccagccagatcggcaacctgctgaacctgcagaccctgtgcctggatggcaacttcctgaccaccctgcctgaggagctgggcaacctgcagcagctgagcagcctgggcatctccttcaacaacttcagccagatccctgaggtgtatgagaagctgaccatgctggacagagtggtgatggccggcaactgcctggaggtgctgaacctgggcgtgctgaacaggatgaaccacatcaagcacgtggacctgaggatgaaccacctgaagaccatggtgattgagaacctggagggcaacaagcacatcacccacgtggacctgcgggacaaccggctgacagacctggacctgagcagcctgtgcagcctggagcagctgcactgcggcaggaaccagctgcgggagctgaccctgagcggcttcagcctgcggaccctgtatgccagcagcaaccggctgacagctgtgaatgtgtaccctgtgcccagcctgctgaccttcctggacctgagcaggaacctgctggagtgtgtgcctgactgggcctgtgaggccaagaagattgaggtgctggatgtgtcctacaacctgctgacagaggtgcctgtgcgcatcctgagcagcctgagcctgaggaagctgatgctgggccacaaccacgtgcagaacctgcccaccctggtggagcacatccccctggaggtgctggacctgcagcacaatgccctgacccggctgcctgacaccctcttcagcaaggccctgaacaagctgaacaagctggagcagctggaggagctgaacctgagcggcaacaagctgaagaccatccccaccaccatcgccaactgcaagaggctgcacaccctggtggcccacagcaacaacatcagcatcttccctgagatcctgcagctgccccagatccagtttgtggacctgagctgcaatgacctgacagagatcctgatccctgaggccctgcctgccaccctgcaggacctggacctgactggaaacaccaacctggtgctggagcacaagaccctggacatcttcagccacatcaccaccctgaagattgaccagaagcccctgcccaccacagacagcacagtgaccagcaccttctggagccacggcctggccgagatggccggccagaggaacaagctgtgtgtgtctgccctggccatggacagctttgctgagggcgtgggcgctgtgtatggcatgtttgatggagacagaaatgaggagctgccccggctgctgcagtgcaccatggctgatgtgctgctggaggaggtgcagcagagcaccaatgacacagtgttcatggccaacaccttcctggtgagccacaggaagctgggcatggccggccagaagctgggcagcagcgccctgctgtgctacatccggccagacacagctgaccctgccagcagcttcagcctgactgtggccaacgtgggcacctgccaggccgtgctgtgccggggcggcaagcctgtgcccctgagcaaggtgttcagcctggagcaggaccctgaggaggcccagagggtgaaggaccagaaggccatcatcacagaggacaacaaggtgaatggagtgacctgctgcaccaggatgctgggctgcacctacctgtacccctggatcctgcccaagccccacatcagcagcacccccctgaccatccaggatgagctgctgatcctgggcaacaaggccctgtgggagcacctgagctacacagaagctgtgaatgctgtgagacatgtgcaggaccccctggccgccgccaagaagctgtgcaccctggcccagagctatggctgccaggacaacgtgggcgccatggtggtgtacctgaacatcggggaggagggctgcacctgtgagatgaatggcctgaccctgcccggccctgtgggctttgccagcaccaccaccatcaaggatgcccccaagccagccacccccagcagcagcagcggcatcgccagcgagttcagcagcgagatgagcaccagcgaggtgagcagcgaggtgggcagcacagccagtgatgagcacaatgctgggggcctggacacagccctgctgcccaggcctgagcggcgctgcagcctgcaccccacccccaccagcggcctcttccagaggcagcccagcagcgccaccttcagcagcaaccagagcgacaatggcctggacagtgatgatgaccagcctgtggagggcgtcatcaccaacggcagcaaggtggaggtggaggtggacatccactgctgccggggccgggacctggagaacagcccccccctgattgagagcagccccaccctgtgcagcgaggagcacgcccggggcagctgcttcggcatccggcggcagaacagcgtgaacagcggcatgctgctgcccatgagcaaggacaggatggagctgcagaagagccccagcaccagctgcctgtatggcaagaagctgagcaatggcagcatcgtgcccctggaggacagcctgaacctgattgaggtggccacagaggtgcccaagaggaagacaggctactttgctgcccccacccagatggagcctgaggaccagtttgtggtgccccatgacctggaggaggaggtgaaggagcagatgaagcagcaccaggacagccggctggagcctgagccccatgaggaggacagaacagagcccccagaggagtttgacacagccctgtag

SEQ ID NO: 107450 - DNA, 1272 bp, Artificial Sequence
  derived and/or modified sequence
atgaagagaaatggcagcaggaactgcctgaacagaagaagccgcttcggcagccgggagcgggactggctgcgggaggatgtgaagaggggctgtgtgtacctgtatggagctgacaccaccacagccaccaccaccaccaccaccagcagcagcagcagcagcagcagcagcagcagtgacctgcacctggtgctgtgcaccgtggagaccccagccagcgagatctgtgccggggagggccgggagagcctgtacctgcagctgcacggggacctggtgcggcggctggagcccacagagcggcccctgcagatcgtgtatgactacctgagccggctgggctttgatgatcctgtgcgcatccaggaggaggccaccaacccagacctgggctgcatgatccgcttctacggggagaagccctgccacatggaccggctggaccgcatcctgctgagcggcatctacaacgtgaggaagggcaagacccagctgcacaagtgggccgagcggctggtggtgctgtgtggcacctgcctgattgtgtcctctgtgaaggactgccagacaggcaagatgcacatcctgcccctggtgggcggcaagattgaggaggtgaagaggcggcagtacagcctggccttcagcagcgctggggcccaggcccagacctaccacgtgtcctttgagaccctggccgagtaccagcgctggcagaggcaggccagcaaggtggtgtcccagaggatcagcacagtggacctgagctgctacagcctggaggaggtgcctgagcacctgttctacagccaggacatcacctacctgaacctgcggcacaacttcatgcagctggagaggcctgggggcctggacaccctgtacaagttcagccagctgaagggcctgaacctgagccacaacaagctgggcctcttccccatcctgctgtgtgagatcagcaccctgacagagctgaacctgagctgcaatggcttccatgacctgcccagccagatcggcaacctgctgaacctgcagaccctgtgcctggatggcaacttcctgaccaccctgcctgaggagctgggcaacctgcagcagctgagcagcctgggcatctccttcaacaacttcagccagatccctgaggtgtatgagaagctgaccatgctggacagagtggtgatggccggcaactgcctggaggtgctgaacctgggcgtgctgaacaggatgaaccacatcaagcacgtggacctgaggtag

SEQ ID NO: 107451 - DNA, 501 bp, Artificial Sequence
  derived and/or modified sequence
atggccggccagaggaacaagctgtgtgtgtctgccctggccatggacagctttgctgagggcgtgggcgctgtgtatggcatgtttgatggagacagaaatgaggagctgccccggctgctgcagtgcaccatggctgatgtgctgctggaggaggtgcagcagagcaccaatgacaccgtcttcatggccaacaccttcctggtgagccacaggaagctgggcatggccggccagaagctgggcagcagcgccctgctgtgctacatccggccagacacagctgaccctgccagcagcttcagcctgactgtggccaacgtgggcacctgccaggccgtgctgtgccggggcggcaagcctgtgcccctgagcaaggtgttcagcctggagcaggaccctgaggaggcccagagggtgaaggaccagaaggccatcatcacagagaactgggtgctgaaccagaagcacctgcaggacttccctggagaggacaagtag

SEQ ID NO: 107452 - DNA, 3771 bp, Artificial Sequence
  derived and/or modified sequence
atgaagcggaacggcagccggaactgcctgaaccggcggagccggttcgggtccagggagcgggattggctgcgcgaggatgtgaagcgtgggtgcgtgtatttatacggcgcggacaccaccaccgctaccaccaccaccacgacctcttcgagttcaagttcctcatcttcgagttccgatctgcatctggtgctgtgcactgttgaaacccccgcctccgaaatctgcgccggggaaggccgcgagtcactctacctgcagctacatggagacttagttagaagactggagcccacagaaaggcccctgcagatcgtgtacgattacctgtcccggttgggctttgatgatccagtgagaatccaggaagaagccactaatcctgaccttggatgcatgataagattttatggcgagaagccatgccatatggaccggctcgatcgcatactgctaagcggtatttataatgttcggaaagggaagacccagctgcacaaatgggcagagcgcctcgtcgtattgtgcggcacctgcctaatcgtatctagtgttaaagattgtcagacaggcaagatgcatatcctgccacttgtcggcgggaaaattgaggaagtgaaaagacgtcaatattctttagccttttcatccgccggcgcacaggctcagacctatcatgtaagtttcgaaacgctggccgaatatcagagatggcaacggcaggccagcaaagtcgtttcgcaaagaattagcaccgtggatctaagctgttatagcctcgaagaagtacctgagcacctcttctactctcaagacatcacgtatttaaatctcagacacaattttatgcagctcgagaggccaggtgggctggacaccctatataaattttctcaattgaaaggactcaacctctctcataacaaactgggcttgtttcctatcctcctgtgtgagatcagcaccctgaccgagctgaacttgagttgtaatggctttcacgacttacctagccagataggcaatcttctcaatcttcaaaccctgtgtctggacggtaactttttgactacactgcctgaggagctgggtaatctgcagcaattgtcttctctgggcatctcatttaacaatttctcccagatacccgaggtctacgagaagctgacaatgctagatcgtgtggtaatggccggcaactgtttagaggtgctgaacctaggcgtactcaatcgtatgaaccacataaaacatgtggacctccggatgaatcatcttaagacaatggtgatagagaacctggaagggaacaagcacattacacatgtagatctgcgggacaacaggttgacagatctggacctgagctcactctgctcgcttgagcagctccactgtggccgaaaccagcttagagagctcacgctttctggtttttctctgcggacactctatgcttcatccaaccgtctcacagctgtgaatgtgtaccctgtccccagcttgctcacgtttttagatctctccaggaatctgttggagtgtgtcccagactgggcctgtgaagctaagaaaatcgaagtccttgacgtgtcatataacctcctcactgaggttcctgttcgcatcctcagtagcttaagtctgcgaaagctgatgctgggacataaccacgtgcagaatcttcccacactagtagaacacatccctctggaagtcctcgatctacagcacaacgctctgacgcggctccctgataccttgttctctaaggccttgaataagctgaataaattggagcagctagaggagcttaatctctcagggaacaagctaaagacaataccgactaccattgctaactgcaagagacttcacacgctggtggctcactcaaacaatataagcatcttccctgaaatacttcagctcccgcagattcaattcgtcgacttgtcttgcaatgacttgaccgagatcctcatacccgaagcactgccagcgaccctgcaggacttagacctaactggaaacacaaatctggttctggaacacaaaaccctcgacatcttcagccacatcaccaccttgaaaatagaccagaagccccttcccacaactgattccacggttacatctacattctggtcgcatggcctcgctgagatggctggacagagaaacaaactgtgcgttagtgctcttgccatggatagcttcgcagaaggcgtcggcgctgtgtatggaatgttcgacggagatagaaatgaagaacttccacggctcctgcagtgtaccatggccgacgtgctcctcgaagaggttcagcagagcaccaatgacaccgtctttatggcaaacacattcttggtgtctcaccggaagttgggtatggcgggccagaagttgggctcctcggccttactatgctatatccggcccgacaccgcggatcccgccagctcatttagtcttactgtagctaacgtaggaacatgccaagcagtcctatgtcgcggaggcaaacctgtgccactgtcaaaagtattcagtctggaacaagatcccgaggaagcccagagggttaaggaccaaaaagctattatcaccgaggacaataaagtgaatggtgtgacctgttgtacgcgcatgctgggatgcacctatctgtatccatggattctgccaaaacctcatatctctagtactccccttaccattcaggatgagttgctcatcttaggtaacaaagctctgtgggagcatctttcctacaccgaggctgtaaacgccgtccggcacgtgcaagatccgctcgccgccgctaagaagctgtgcacacttgcccagtcatacggctgccaggataatgtgggagctatggtcgtttacctgaacataggggaggaggggtgcacttgtgagatgaacgggctcaccctgcccgggcctgtggggttcgcgtccacaaccacgataaaagacgccccaaaacctgccacccccagctcctcctccggcatcgcgtcagaattttcgtctgaaatgtcgaccagtgaggtgagctcggaggtaggaagcaccgcgtcagacgagcataatgcagggggacttgacacagctctgcttccaaggcctgagagacgctgttctctccacccgactcccacaagtggtctctttcagcggcagcccagtagtgctacatttagtagcaatcagtcagacaatgggttggacagtgatgacgaccagcccgtagaaggcgtgattaccaatgggtccaaagtagaagtggaggtcgacatccactgttgtagaggcagagatctggagaactccccgcccctgatcgaatcaagccccacgctctgtagcgaagagcacgcccggggttcgtgcttcggtatccgcagacagaattctgttaattcagggatgttattaccaatgagcaaggacaggatggaacttcaaaaatctccatccacttcctgtctttacggcaagaagctctccaacgggagcatcgttcccctcgaagattcattgaatctaattgaggtggcaacggaggtgcctaagcggaagaccggatattttgcggctcccacgcagatggagccagaggaccagttcgtcgtgcctcacgacttagaggaagaggtcaaggaacaaatgaaacagcaccaggactctcgcctggagcccgagcctcatgaggaggacaggacagaacccccagaggagtttgataccgctttatag

SEQ ID NO: 107453 - DNA, 1272 bp, Artificial Sequence
  derived and/or modified sequence
atgaagcggaacggcagccggaactgcctgaaccggcggagccggtttggcagcagagagcgagactggctaagagaggacgtcaagcgaggttgtgtgtacctttatggcgcggatactaccactgcaaccacaactacaacaaccagctcatcgtcctctagctcctcctcttcgtcggacctgcatcttgtgctgtgcacggtggaaaccccagcctccgaaatttgcgctggggagggccgagaatccctttacttgcagctccacggagacctggttagaagattggagccaacagaaagacccctgcaaatcgtctacgactacctctctcgactgggctttgatgatcccgtgcgcatccaggaggaggctacgaaccctgacctcggctgcatgataaggttctatggagagaaaccatgccatatggaccggcttgaccggatcctgctgagtggtatttacaacgtacgaaagggaaaaacccaactgcacaagtgggccgagcgacttgtagtcctgtgcggaacctgcctgattgtgtcgtctgttaaagattgccaaactggcaaaatgcatattctccccctagtcgggggcaagatcgaggaggtgaagcgccgacagtactccctcgccttctcctctgccggagcgcaggcacagacatatcacgtgtcctttgagaccttggccgagtaccagcggtggcagaggcaggcctctaaagtcgtgagccagagaatctccaccgtggatctttcctgttactcccttgaggaagtccccgagcacctcttttattcccaggatattacttacttaaacctacggcacaacttcatgcagctggaaagacccgggggactcgacactctatataagttttcccagctcaaaggcctgaatctaagccacaacaagctggggctgttcccaatcctcctgtgtgaaatttcgactctcacagagctgaatctgtcttgtaacggattccacgacctgccctcacagattgggaaccttctgaaccttcagaccctctgcctagacggaaatttcctaaccacactcccagaagagttgggaaacttgcagcagctgtcgagtttagggatctcctttaacaacttcagtcagattcctgaggtctacgagaaactgaccatgctcgatcgcgtggtgatggccgggaactgtctggaagtgcttaatctcggtgttctgaacagaatgaatcacattaagcacgtggacttgaggtag

SEQ ID NO: 107454 - DNA, 501 bp, Artificial Sequence
  derived and/or modified sequence
atggccggccagcggaacaagctgtgcgtgagcgccctggccatggacagctttgcagagggcgtgggcgccgtatatgggatgtttgatggggatcgaaacgaggagctccccagactgttacagtgcactatggcagacgtcctgctcgaggaggttcagcagagcactaacgatacggtgtttatggcaaacaccttccttgttagccacagaaagctgggcatggctggtcaaaagctgggcagttcagccttactgtgctatatccgccccgataccgccgatccagcttcttccttctccttgactgtggcgaacgtaggtacctgccaggcagtactctgtcggggagggaaacctgtaccactcagcaaagtcttctccttagaacaagatccagaggaggcacagagggtgaaggaccaaaaggctatcattacagaaaactgggtgctgaaccagaaacatttgcaggatttccctggagaagataagtag

SEQ ID NO: 107455 - DNA, 3771 bp, Artificial Sequence
  derived and/or modified sequence
atgaagagaaacggaagtcgaaactgcttgaaccgcagatcacgctttggctcccgagagcgcgactggcttcgcgaagacgtcaagcgaggatgtgtctacctttatggcgctgacaccactactgcaaccactacgaccaccacgtcatctagttcttcaagctcttcaagctcttctgacctgcacctggtgctatgtacagtggagacccctgccagcgagatctgtgctggagagggcagagagtctttatacttacaattgcatggagatcttgtacgccgtctggagccaacagagaggcccttacaaatagtctacgactacctgagtcggttgggtttcgacgatcctgtgaggatacaggaggaggctaccaatccagaccttggctgtatgattcggttctacggggaaaagccgtgccatatggacagactagaccgaatccttctgtctggcatctacaacgtgaggaagggaaagacacaacttcataagtgggcggagaggctggtcgtgctgtgtggaacctgcctgatagtcagctccgtcaaggactgccaaaccggcaagatgcatattctccccctggtgggtggaaaaatcgaagaagttaagagacgtcagtactccttagcgttctcgtcagctggggcacaggctcagacctaccacgtgtcttttgaaaccttagcagaatatcaaagatggcagagacaggcaagtaaggtggtgtctcagaggatttcaacagtggatctgtcctgctatagcctggaggaggtcccagagcatctcttctactctcaggacattacctacctgaacctgcgccataatttcatgcagctggagcgtccaggaggcctggacacattgtataagttcagccagcttaaaggactgaatctctctcacaataagctgggcctcttcccgatcctgctatgcgaaattagcaccctgactgaactaaatctgtcttgcaatggatttcacgatcttccgagtcagattgggaacttgctgaacctccagactctgtgcctggacgggaatttcctaacgaccctgcctgaagagctgggcaatctgcagcaactgtcaagcctcgggatttcatttaacaacttttcgcaaattcctgaagtatacgaaaaacttacaatgctggaccgagtcgtcatggccggaaattgtttggaagtgctcaatctgggtgtgctgaaccgcatgaatcacattaaacatgtggatctacgaatgaaccacctcaagactatggtgattgaaaacctggaaggaaataagcatataacccacgtggatctcagggataaccgactgaccgacctggatctcagttctctgtgctctctggaacagcttcattgcgggagaaatcaactgcgtgagctgactctctccggatttagcctgcggaccctgtacgctagctccaataggcttacggccgtaaacgtgtaccccgtgccatcgctgctgacctttttggatctgagtcggaatctactggaatgtgtcccagattgggcctgcgaagctaaaaagatcgaggtgttagacgtgtcctataatttactgactgaggtcccagtaagaatcctgagctccctgtcactgaggaagttgatgttaggccacaaccacgtccaaaatctgcccaccctggttgagcacatcccattagaggtgctggacttgcagcataacgccctcacccggttgcccgatactctgtttagcaaggccttaaataagctgaacaagctggaacagttagaggagctcaatctatcaggaaacaaactgaaaactatccctacgaccatcgctaattgtaaaagactgcatacactggtagcacatagtaataacatttctatctttccagagattctgcagcttccacagatccaattcgtggacctgtcgtgcaacgatctgaccgaaattttgatcccagaggcccttcctgcaactctgcaggacctggacctgacagggaatactaacttagtgctcgagcacaaaacccttgatatctttagtcacattaccacactgaagatcgatcaaaagcctcttcctacaacggattccaccgtaacaagcaccttctggtcccatggcctcgccgagatggccggacagcgcaataagctttgcgtgagtgcactggccatggatagtttcgcagagggggtgggagccgtgtatggcatgttcgacggtgataggaatgaagaattgcctcgcctgctacagtgcacaatggccgacgtcttactcgaggaggttcaacagtctactaatgacactgtctttatggcaaacacattcttggtttcacaccgcaagttaggcatggcaggccagaagctgggttcgtctgccctgctctgctatatcagaccagacacagctgaccctgcctcttccttctcactgaccgtggctaacgtgggcacttgtcaggccgtattgtgccgcggtggtaaacccgtccccctgtcgaaagtcttttccctcgagcaggaccctgaagaggcccagcgcgtcaaggatcagaaggccattataaccgaagataataaggtgaacggtgtaacttgctgtactcggatgctaggctgtacatacctttacccctggattctccccaagccccatatctcttcaactccactgacaatccaggacgagctcctgattctaggcaacaaggccctttgggagcatctgtcctacacagaggctgtgaacgcagttcgacacgtccaagacccattagccgcagcaaagaagctgtgtactcttgctcaatcttacggctgtcaagacaacgtgggcgctatggtcgtttacctcaacatcggcgaggagggatgcacttgcgaaatgaacgggctgacactccctggccctgtgggatttgcctccaccaccaccatcaaagacgccccaaaacccgcaacgccttcctcttcttccggtattgctagcgaattctcctctgagatgagcactagcgaggtgagtagtgaagttggttctaccgctagcgatgaacacaacgcaggcggactcgacaccgctttgctgcctaggcctgaacgaaggtgttcgctgcaccccacaccaacgtccgggctcttccaaaggcagccctcatcagctacatttagctctaaccaaagcgacaatggcctagatagtgatgatgatcagcccgtggagggggttataactaacgggtcaaaggtggaagtggaggtggatattcattgttgtaggggcagggatcttgagaacagcccgccactgattgaatctagccccaccctgtgcagcgaagaacatgccaggggtagctgtttcgggattagaaggcagaattccgtaaattctggcatgctgctacctatgtccaaagatcgaatggaacttcagaagtcaccaagtacttcatgtctgtatgggaaaaaactctccaacggctctattgtccccctcgaggatagccttaacctgatagaggttgctaccgaagttcctaagcgcaagactggatatttcgcagctccaacacagatggagcctgaggatcagttcgtagtgcctcacgatctggaggaagaggttaaagagcaaatgaagcagcaccaagattctcggcttgagcccgagccacatgaggaagaccggacagagcccccagaagaattcgataccgctctgtag

SEQ ID NO: 107456 - DNA, 1272 bp, Artificial Sequence
  derived and/or modified sequence
atgaagaggaatgggagccggaactgcctcaaccgtcgatctcggtttggttcccgtgaacgagactggctaagagaagacgtcaagagaggatgcgtatatctttatggggcagatactactaccgccaccaccacaacaaccacaagttcctctagctcaagcagttcctcatcatctgacctgcaccttgtattgtgtacagttgaaacgccagcttccgagatctgtgctggagaaggacgagagagcctctacctgcagctccatggagatttggttcgtcgcttggagcccacagagaggccattacagatcgtttatgactacctgtcgagactcggcttcgacgacccagttcgcattcaggaagaagccactaaccctgacctcgggtgtatgatccgtttctatggcgaaaagccatgccacatggataggctggatcgcattcttctcagcggaatctataacgtgaggaagggtaagacacagctgcacaaatgggctgagcggctagtggtgctctgtggcacatgcctgatcgtctctagcgtcaaagactgccagacaggcaagatgcacattctgcctctcgtcgggggaaaaatagaggaagtaaaaaggcgccagtacagcctagctttctcttccgcaggagcccaagcacaaacataccacgttagctttgaaactttggctgaataccagagatggcagcgacaggcaagcaaagtggtgtcccaacggatttccaccgtcgacctgtcatgctactccctcgaagaggtgccagagcaccttttttactcccaagatataacttatctcaatctgcgacacaatttcatgcagctcgaaaggcccggtgggctggacactctgtacaaattctcccagctgaagggccttaacttgtcacacaacaaattgggcctgttcccgatccttctgtgtgaaatctccacgctgacggagctgaacctgagttgtaacggattccatgaccttcccagccagatcggtaatctacttaatttgcagaccctgtgtcttgacggaaattttctaaccacgctaccggaggaactcggcaatctacaacagctaagcagtctggggattagcttcaacaacttctcacaaattccagaggtgtatgagaaacttactatgctggaccgagtggttatggcgggaaattgcctcgaggtgctcaatctgggcgtgcttaataggatgaatcacattaaacatgtggaccttaggtag

SEQ ID NO: 107457 - DNA, 501 bp, Artificial Sequence
  derived and/or modified sequence
atggcaggtcagaggaataagctttgtgtgagcgctctggcaatggacagttttgccgagggagttggcgcagtttacgggatgtttgatggcgatcgcaatgaggagttgccaaggctcctgcagtgcactatggctgacgtgctgctcgaagaagtccagcagagcactaatgacacggttttcatggcaaatacctttctggtgtcacaccgaaagctgggaatggcgggtcagaaactgggctcaagcgctttactttgttacattcggccagacacggcagaccccgctagtagcttctcactgactgtggcaaacgtcgggacttgccaggctgttctgtgtcggggaggcaagccagtacccctcagtaaggtctttagcctggagcaggaccctgaggaggcacagagagtgaaagatcagaaagccatcatcacggaaaattgggtgctcaatcagaagcacctccaggattttcctggggaagacaagtag

SEQ ID NO: 107458 - DNA, 7718 bp, Artificial Sequence
  derived and/or modified sequence
agaaatatgaaacgcaatgggagcagaaattgtttgaataggagaagtaggtttggttctcgagaaagagactggctaagagaagatgtaaagagaggctgtgtttacctttatggagcagacactaccactgccactacaaccaccaccacctcctcttcctcttcctcctcctcctcttcctctgacttacatctcgtcctttgcactgtagagacaccagcatcagaaatatgtgctggagagggaagagaaagtctttatttacagcttcatggagacctggtcaggagactggaacctactgaacgacctcttcagatcgtttatgattacttatccaggctgggatttgatgatcctgtgcgcatacaggaggaggctacaaatcctgacctcggctgtatgattcgattttatggtgaaaaaccatgccacatggatcgtttggatcgaatcctattgtctggcatctataatgtacgcaagggaaagacccagctgcataagtgggctgagcgcctagttgtcctctgtggtacctgccttatcgtttcctcagtgaaggattgtcaaactggaaagatgcacattttgcctctggttggtggaaagatagaagaagtgaagcgacggcaatactcccttgctttcagctcagcaggagcccaagctcagacctatcatgtcagcttcgagactttggccgagtaccagcgatggcaacggcaagcatccaaggtggtgtcccagcgaatcagtaccgtggatctctcgtgttacagcctcgaggaggttcctgagcatctcttctatagtcaagatattacctacctcaacttgcgacacaacttcatgcagttagaaagacccggaggcctcgatacactctacaaattttctcaactgaagggcctgaacttgtcccataataaacttgggttgtttcctatattgttatgcgagatctctaccctgactgagctcaacctttcctgtaatggatttcatgacctaccaagtcaaattggcaatctgctaaatcttcaaaccctctgtcttgatggcaactttctgactactttacctgaagaattgggaaatctacaacagctttcctccttgggaatttccttcaacaactttagtcaaattcctgaggtttatgagaaactcactatgttagatagagtggttatggcaggaaattgcctggaagtcctgaacttaggggtgctgaataggatgaaccatatcaagcatgtggatttaaggatgaaccatttgaaaaccatggttattgaaaatctggagggaaataaacacatcacccacgtggatctgcgggacaaccgactgactgacttggatcttagctccttatgcagcttggaacagctgcactgtgggcggaatcagctgagggagctaacactcagtggcttttcccttcggaccctctatgccagttccaacaggctgacagcagtgaacgtctatccagtacccagcctgctcactttcttggatctctcccgaaacctgctagagtgtgtccctgactgggcctgtgaagcaaagaagatagaagtattagatgtgagctataatcttctcacagaggttcccgtgagaattctgagtagcttgagtcttagaaaactgatgctgggacacaatcatgtgcaaaaccttccaacactggtagagcacatccccctcgaggtgctggatcttcagcataatgcactcacgaggctgccagacaccctcttctccaaggccttaaacaaactaaataaattggagcaattggaggaactgaacctaagtggcaacaagcttaaaaccattcccacaaccatagcaaactgtaaaaggctgcacacccttgttgcacactccaacaacatcagcattttcccagaaatactgcagttgcctcagatccagtttgtagacctaagttgcaacgacttgacagaaatcctgattccagaggctttgcctgctacattacaagaccttgacctgactggaaatacaaatctggttctggaacacaagacactggacatatttagccatatcacaaccctgaaaattgatcagaaacctttgccaaccacagattctacagttacgtcaaccttctggagccatggactggctgagatggcagggcagagaaataagctgtgtgtctcagcacttgctatggatagctttgcagagggggtgggagctgtgtatggcatgtttgatggagaccgaaatgaggagctcccgcgcctgctgcagtgtacgatggcagatgtgcttttagaagaggtacagcagtcaactaatgacacagttttcatggctaacaccttcttggtatctcacaggaaattaggaatggctggccagaagttgggctcctccgctctcctgtgctacatccgccctgacactgccgatccagcaagtagctttagcttgactgtagccaatgttggcacgtgccaagcagtcctgtgccgaggtgggaagccagtgcccctctctaaagtcttcagcctggagcaggacccagaggaggctcaaagggtgaaggaccaaaaagccatcatcacagaggacaacaaagtgaatggggtaacctgctgtacccggatgctgggctgtacatacctctacccttggatcctccccaagccccacatatcttccactccgctgaccattcaagatgagttgctgattctgggaaacaaagcattgtgggaacacttgtcctacacagaagctgtcaatgctgtacgtcacgtacaagacccattagcagctgctaagaagctgtgcacattagcgcagagctatggctgtcaggacaatgtaggggcgatggtagtttatttgaatattggtgaggaaggctgcacttgtgaaatgaatgggctcaccctcccaggtcctgtgggatttgcttcaaccaccactatcaaggatgcccctaagccagccactccatcctctagcagtgggattgcctctgagttcagcagtgagatgtccacctcagaggtgagcagtgaagtggggtccactgcttctgatgagcataatgctgggggcctggacactgccttgcttccgaggccagagcggcgctgcagcctccacccaacacccacctctgggctgtttcagcgccagccttcttctgctaccttctccagtaaccagtctgacaacggcctggacagtgatgatgaccagcccgttgagggggtcataaccaatggcagcaaggtagaggtggaagtagacatccactgctgcagggggagggatctggagaactcaccccctctcatagagagttctcctaccctgtgttctgaggaacatgctagagggtcgtgttttgggatccgaagacagaacagtgtgaatagtggcatgctcctgccaatgagcaaggacaggatggagttacagaagtctccctccacctcctgcctctatgggaagaaactctccaatggctctattgtgcccctagaggacagcctgaacctcattgaagtggccacagaagtgcccaagaggaaaactggctattttgctgcccccactcagatggaaccagaggaccagtttgttgtgcctcatgacctggaagaagaagtgaaggaacaaatgaaacagcaccaggacagccggctcgagcctgagccccatgaagaggatcggaccgagcccccggaggagttcgacacagcactatgactgccccactgggcacagtgtgggaggaggctgtgcagggttggggtagggacttgctagaggcattctgcctctacatttctttttgtttgttcgttttttttttgtttgtttgttttgagacggagtcttgctcagtcgctcaggctggagtgcaatggtggggtctcgggtcactgcagcctctgtccctgggttcaagccattctcctgtctcagcctcccgagtagctgggattacaggcacctgccattatgcccggctaagttttattttttttttttagagacggggtttcaccatgttggccaggctggtgttgaactcttgacctcaggtgatccaccctcctctgcctcccaaagtgctgtgattacaggcctcagccaccatgcccagccctgcgtctacatttctaaaccatagctgtgtggggttgaactcggagccaaaaagtgtgagagccatcaggggctggctctggataaactggtagccactatcagtgttaagtttcacatttaacctgcattggaattcccaggggtactgggaagaaagcagctgttctgtatcagtcctaccacctgccattaaccctttctctcctaggatcattttgagaatttgcctgcctgggcaggaaagggactatttctgtggaggaaaaaagtgaagattgattctctttactagttgctgctgatggatctctgtgacagagaaatcaccttatctcagactaatggggtgtgatgtgactagtcacatggcttttcattcttctctacgagaatacagcctatcaaaatgatgtctgttggaaatgtagaaccaatcaaacagataatttatgtatgtaatgtaatgagagcacttttcattgactgtgaactttttatttttgaatctgcactcgagccaatcttcttagaggcagcccggcaccttcatccataggcagagagagaactgggtgttggagacttattcgagggtataggaagggccctgtgaagttgatttaacttttggatgtcagactgtgaaagctcctgagaaacttggggtaataggatcttcttttggggatgaaaatggggaaggcgtgaggacctagactacttctccctagatcagaaaaagagaattaccccttgacaaatatgatacctgctaggtatttcccagggaaatttagggattggcgtctttccctagcatgtggaggaattggcagacagcttcctaagggcggggagcgggggcccaaggctgacactgcttgcatccacgtgaccttaagttatggcagatgactctgaaacggactgaggccaatgagaacagatggatggagcactcaggttagacttgttccttctcctatgctggaggagagggatggttctctagaatgttggaggtgagttgagagctcgcctcttgaatgttgaacagtgtactcttctgaaaactgcatattcactttatgtggtttcagaatactgggctcaatactaacataagaaagacacttcattgagaaattcttaagcttacagaaaacctatactctttgcacattccacataaccctagcaaaatgcagtttcttcatacttctgtcactttttccattggaagatttgcttaggaaaattaattcctatttattcccacaaaatgttggcattgcttgattttacccaatggggaatgtgctttgaatttttggaacacttttacaattaaaaataaagtagggccatttttaatttgtttcatcagaaactatgttaaagagagggttaaatataaatatattttcgtgtgtatttttgggaagatttttgttcaaagcaatagtcaaaatcagatgacctgtccataataattatgtgtcttcatcttctcagaggccccatgctcatatgcacgtgtcattgggatacactcttgggggatttggtacactctaatggatgtctaatgttcaacccctcgagaatctgaacttgagtccccagattgtcaaactactggtcagctattgagaattttagaactcaggtctttgatttgaagtagggaacatagtggctcacacagagtttaggtgctgttagaaagatgggaacaagagtgttttgccaccttatttttatatgggaaattttttttaatgaagaaaaaatgaaaatgaaataacaggatgatagtgatgagtgatgtaaaacatcttacttagatggcagaaccttcgggttgtagaatagtgatgtctaaaaattaaagttattttgggaatacaccactttaatagtatagtcttataaaaattattcattatggtgaacccttcttgtctgctattcgtttcccaacctacttattggaaccacctcaaaacccagttctgaaatgaccttaccaaaagtaaatgtatttattttttagtcagcagaactctgtaattccaaatgttgttctgtgtggtagaattttttttcaggaaccattaggttgtattgaaaatctttgttataggcgataccaaaactgattattcttttttgcagtctgctttaattcatgtccttctgcagttgctctgtattaaaacagggtaaaaaggccatagcccattatgaaaaatataatacaaaactctttgacctatgaggtaacttacagacattgtgttttctaaacaggctgtcagtgaaagcccgtatctgtctccaggtgaatgtaatttacttccgagtactttacccagaggatgtgttccccaggtgggcagagtacagttgatctctagcacagacagagattctggcctctgcatattctcaggtctctgtgtgtacctcccattgagtagagaagcttaagataatttctgagagaagaacactgctgattgtgggagcagtttaggagtccatggaagaaagaaaaatacatgtgtcttggcagccatggtgtatttttgtccaaatggattggaaggatatttgaatatttgaatgttggtatgacataaagctgcagtgcactatagagtcaagtcattgaattaccactcctgatacagggctttattgtactactgtgaagtgtatgtgtgcaatacattggtgagttcatttactggtgtacggaagagccagcaggagcagcgtggtcattgctgggtgctattacagttgcttgtagtgagtgctgttttccaggagatggagccagttgggtgtggcagatctactgaatatcaaatgatgctcttcttcccatgtagaccttcagcaaaagccggtacttggaagccacaggctcaccttctctatctatccaataattattaatgaagagacctccataagggagcagctggctgttatcgataaatgtaccaattattaaataattagtctccaagccattcagtgatgtcttcagcatcactataggactgtctagtgtcactttttacttccttctgggtggaggctttccgactcccaatcatgaaggcaagttaatctttccagttagtgacttttgccccatagttggggtaagcacttcctagattgagaaaaagcagctacagtcaatcctgctctgtttgcctcatttggtgatcagtcagtcacacataagttccttgtattctaaatttcatgcacttctcccagatgctatagggttttctctcactgttgccagtggatgtcatccagacagtgggctcatatcttacggttttgtgcaatcattgtcgtattgtagtcttaagactcattatagtgtatttttgatatttttgaaatgtgttaaattttttaattcaataatatgagccagagcatgttgcagcaaatctattgtttgtaaaaataacaataacaataataaataaaataaagtggaa

SEQ ID NO: 107459 - DNA, 3485 bp, Artificial Sequence
  derived and/or modified sequence
aagcgcccgcgagccgccggccgggagggatccgggtcctgaagagaaatatgaaacgcaatgggagcagaaattgtttgaataggagaagtaggtttggttctcgagaaagagactggctaagagaagatgtaaagagaggctgtgtttacctttatggagcagacactaccactgccactacaaccaccaccacctcctcttcctcttcctcctcctcctcttcctctgacttacatctcgtcctttgcactgtagagacaccagcatcagaaatatgtgctggagagggaagagaaagtctttatttacagcttcatggagacctggtcaggagactggaacctactgaacgacctcttcagatcgtttatgattacttatccaggctgggatttgatgatcctgtgcgcatacaggaggaggctacaaatcctgacctcggctgtatgattcgattttatggtgaaaaaccatgccacatggatcgtttggatcgaatcctattgtctggcatctataatgtacgcaagggaaagacccagctgcataagtgggctgagcgcctagttgtcctctgtggtacctgccttatcgtttcctcagtgaaggattgtcaaactggaaagatgcacattttgcctctggttggtggaaagatagaagaagtgaagcgacggcaatactcccttgctttcagctcagcaggagcccaagctcagacctatcatgtcagcttcgagactttggccgagtaccagcgatggcaacggcaagcatccaaggtggtgtcccagcgaatcagtaccgtggatctctcgtgttacagcctcgaggaggttcctgagcatctcttctatagtcaagatattacctacctcaacttgcgacacaacttcatgcagttagaaagacccggaggcctcgatacactctacaaattttctcaactgaagggcctgaacttgtcccataataaacttgggttgtttcctatattgttatgcgagatctctaccctgactgagctcaacctttcctgtaatggatttcatgacctaccaagtcaaattggcaatctgctaaatcttcaaaccctctgtcttgatggcaactttctgactactttacctgaagaattgggaaatctacaacagctttcctccttgggaatttccttcaacaactttagtcaaattcctgaggtttatgagaaactcactatgttagatagagtggttatggcaggaaattgcctggaagtcctgaacttaggggtgctgaataggatgaaccatatcaagcatgtggatttaaggtaaggttattctttaccacaccttcctttaaattgactctggtggacctttatgtcttctgtttatgaagatttgtttaaaacattagggtttttaaaattttgttgttgttttgagacaaggtctcactttgtcacccaagctggcatacagtggcacgatctcggcccactgcagtcttgacctcccgttctcaggcgattctcccacctcagcctcccgagtagttgggacttcaggtgcgcaccacgaggcctggctaatttttttctacttttagtagagatgaggtttcaccatgttgtgcaggcaggtctcgaactcctggactcgagcagtccacccacctcagcctcccaaagtgctgggattacagccaccgcacctggcccataactttaggttttttgaatagtgtagaaatatatgttttcaaaggtatagtaagactttatttatcactcagtagcagagagattaaggatcaggtagttgtaccatgtgatagagactatcaaattgcctttgacaaagattgttctcacttaccctcccatcagtgtatattttttattttaaaaattttttatagagatggggtcttgctgtgttgcccaggctggtcttgaactccctggctcaagtaatcctcctgccttggcctcctaaagtgttgggattacaggtgtgagccagtgtgcccgacccctccaccattttatgagaattcccattttctcatatctttgtcagtattggattttagcatttctttttatttatcatcagtctagtaggttgaaaaaagtatttcattgttttaatcaacgtttatttacatagcagtgaggttgaacatctttttatatgtatattagtagtttgtagatttccataaatgaccatttttctgttgagtcattgggtttcttcttgatacccattgtattacaattaaaatgttaagggtttcattactaagaactttttatgagagttttattttctagtcataatattttcctaaaggaagctggtaaaaagacacctactggatgttctgttatttacagtaagccattgatgtagcttgtaaagacagtaagagagtttttttttttttttaaaccacactggagacttaagagagagatttatagaaatacaggaaagtgagaatagacctgcataaattaaatcatacacctgtgtagaaaaaacccagaggtcattttctataatttgcctttgaactcttccatatatatatatatatatatatatatatatatatatatatgtgcagattatttccttgtctgttaattaattttatgtttgaaccttagctctagagatagagcaggcatagcaacaggaagaagtatggctccatccttatactctggacatggtactgttgtgactgctttgctactcactgactcaaaaggttgtgttcatcttcctgttcctttgtcctacttagtgcccacctgacattattaggtatttggatataagtgtttaactgttcgtagatatggcctcttttttccttctctttattaatttgtatacgtatttgccaatttggattgtctaacttagctgtaccttgagttattcatcaactaattatttatatagtaccttgcaaaatgaggcgagtagtgaaattcttaagttgtttaggaaacagagaaagggggccgggcacggtggctcatgcctgtaatcccagcactttgggaggccgaggcaggcagatcatctgaggttaggagttcaagcctggccaacatggtgaaaccccagctctactaaaaatacaaaaaattagcctggcatggtgggggtgattctaatcccagcaacttgggaggctgaagcaggagaatcgctttaacctgggaggcagaggttgcagtgaaccgagatcacgccattgcactccagcctgcgcaacacagtgaaactccatctcaaaaaaaaaaagtaaacagagaaagggatcatacctgtcctattttttatttttattctggtaagcacatttaatagactcttatttatgattattttcttgtttctgcgtattaaggatgaaccatttgaaaaccatggttattgaaaatctggagggaaataaacacatcacccacg

SEQ ID NO: 107460 - protein, 657 aa, Artificial Sequence
  derived and/or modified sequence
MFVGVARHSGSQDEVSRGVEPLEAARAQPAKDRRAKGTPKSSKPGKKHRYLRLLPEALIRFGGFRKRKKAKSSVSKKPGEVDDSLEQPCGLGCLVSTCCECCNNIRCFMIFYCILLICQGVVFGLIDVSIGDFQKEYQLKTIEKLALEKSYDISSGLVAIFIAFYGDRKKVIWFVASSFLIGLGSLLCAFPSINEENKQSKVGIEGIAECTSMIGYALGYVLGAPLVKVPENTTSATNTTVNNGSPEWLWTWWINFLFAAVVAWCTLIPLSCFPNNMPGSTRIKARKRKQLHFFDSRLKDLKLGTNIKDLCAALWILMKNPVLICLALSKATEYLVIIGASEFLPIYLENQFILTPTVATTLAGLVLIPGGALGQLLGGVIVSTLEMSCKALMRFIMVTSVISLILLVFIIFVRCNPVQFAGINEDYDGTGKLGNLTAPCNEKCRCSSSIYSSICGRDDIEYFSPCFAGCTYSKAQNQKKMYYNCSCIKEGLITADAEGDFIDARPGKCDAKCYKLPLFIAFIFSTLIFSGFSGVPIVLAMTRVVPDKLRSLALGVSYVILRIFGTIPGPSIFKMSGETSCILRDVNKCGHTGRCWIYNKTKMAFLLVGICFLCKLCTIIFTTIAFFIYKRRLNENTDFPDVTVKNPKVKKKEETDL

SEQ ID NO: 107461 - DNA, 1974 bp, Artificial Sequence
  derived and/or modified sequence
atgttcgtgggcgtggccagacacagcggcagccaggacgaggtgagcagaggcgtggagcccctggaggccgccagagcccagcccgccaaggacagaagagccaagggcacccccaagagcagcaagcccggcaagaagcacagatacctgagactgctgcccgaggccctgatcagattcggcggcttcagaaagagaaagaaggccaagagcagcgtgagcaagaagcccggcgaggtggacgacagcctggagcagccctgcggcctgggctgcctggtgagcacctgctgcgagtgctgcaacaacatcagatgcttcatgatcttctactgcatcctgctgatctgccagggcgtggtgttcggcctgatcgacgtgagcatcggcgacttccagaaggagtaccagctgaagaccatcgagaagctggccctggagaagagctacgacatcagcagcggcctggtggccatcttcatcgccttctacggcgacagaaagaaggtgatctggttcgtggccagcagcttcctgatcggcctgggcagcctgctgtgcgccttccccagcatcaacgaggagaacaagcagagcaaggtgggcatcgagggcatcgccgagtgcaccagcatgatcggctacgccctgggctacgtgctgggcgcccccctggtgaaggtgcccgagaacaccaccagcgccaccaacaccaccgtgaacaacggcagccccgagtggctgtggacctggtggatcaacttcctgttcgccgccgtggtggcctggtgcaccctgatccccctgagctgcttccccaacaacatgcccggcagcaccagaatcaaggccagaaagagaaagcagctgcacttcttcgacagcagactgaaggacctgaagctgggcaccaacatcaaggacctgtgcgccgccctgtggatcctgatgaagaaccccgtgctgatctgcctggccctgagcaaggccaccgagtacctggtgatcatcggcgccagcgagttcctgcccatctacctggagaaccagttcatcctgacccccaccgtggccaccaccctggccggcctggtgctgatccccggcggcgccctgggccagctgctgggcggcgtgatcgtgagcaccctggagatgagctgcaaggccctgatgagattcatcatggtgaccagcgtgatcagcctgatcctgctggtgttcatcatcttcgtgagatgcaaccccgtgcagttcgccggcatcaacgaggactacgacggcaccggcaagctgggcaacctgaccgccccctgcaacgagaagtgcagatgcagcagcagcatctacagcagcatctgcggcagagacgacatcgagtacttcagcccctgcttcgccggctgcacctacagcaaggcccagaaccagaagaagatgtactacaactgcagctgcatcaaggagggcctgatcaccgccgacgccgagggcgacttcatcgacgccagacccggcaagtgcgacgccaagtgctacaagctgcccctgttcatcgccttcatcttcagcaccctgatcttcagcggcttcagcggcgtgcccatcgtgctggccatgaccagagtggtgcccgacaagctgagaagcctggccctgggcgtgagctacgtgatcctgagaatcttcggcaccatccccggccccagcatcttcaagatgagcggcgagaccagctgcatcctgagagacgtgaacaagtgcggccacaccggcagatgctggatctacaacaagaccaagatggccttcctgctggtgggcatctgcttcctgtgcaagctgtgcaccatcatcttcaccaccatcgccttcttcatctacaagagaagactgaacgagaacaccgacttccccgacgtgaccgtgaagaaccccaaggtgaagaagaaggaggagaccgacctgtag

SEQ ID NO: 107462 - DNA, 1974 bp, Artificial Sequence
  derived and/or modified sequence
atgttcgttggggtggcaaggcacagtggcagccaagatgaggtcagtcgcggtgtggaaccacttgaggccgcccgcgcgcagcctgctaaagacagacgggccaaaggaactcccaaatcctcaaaacccggaaagaaacacaggtacctacggttattacccgaggctcttatccggttcggtggattcagaaagcgaaaaaaggctaaatcaagtgtaagtaagaagcctggggaggtcgatgatagcttagaacagccatgcgggctgggttgtctggtgtctacatgctgtgagtgttgtaataatatccggtgttttatgatattttattgtatactcctgatatgtcagggcgtggtgttcgggttgatcgatgtctcaattggggacttccaaaaagagtatcagctgaaaactattgagaagctagcgctggaaaaatcttacgatatctcttccggtttagtcgcaatctttatcgccttctatggcgataggaaaaaagtgatctggttcgttgcgtctagttttctgatcggtctgggtagtctgttgtgcgccttccctagtattaatgaggagaataaacagtcgaaagtagggattgagggcatcgcagaatgtacatcgatgatagggtacgcactggggtatgtcctgggggcacctctggtaaaagtacccgagaacactacttctgccacaaatactacagtgaacaacgggagtccagaatggttatggacctggtggattaattttctgtttgccgctgtcgttgcatggtgtacactgattccactgtcctgtttcccaaacaatatgcctggcagcacgcggattaaggctcgcaagcggaaacaattgcactttttcgatagtcgcttaaaagatctgaaactcgggacaaacataaaagacctttgtgccgcactgtggattctgatgaagaatcctgtactgatctgcctagctctgagcaaggcgactgagtatttagtgattatcggggcctcagagtttctcccaatctacctggaaaatcagttcattctgactccaactgtcgccacgactctggccggcctggtgttaatccctggcggcgctcttggccagctcctggggggcgttatagtgagcactctggagatgagctgtaaggcattgatgcgctttatcatggttacctctgttatctcattaatcctgctggtgttcataatcttcgtgaggtgcaaccctgttcagtttgctggtattaacgaggactatgatgggaccgggaagctggggaacctcactgctccctgcaacgagaagtgccggtgctcttcatccatctatagttccatctgtggacgtgatgacatcgagtacttctcaccctgctttgctggatgcacctactccaaagcacagaaccaaaagaagatgtactataattgttcctgcatcaaggaagggcttattactgctgacgccgagggcgactttattgacgcccggcctgggaagtgtgatgctaagtgttacaagctgccacttttcatcgccttcatcttctccacacttatcttttcagggttcagcggggtgcctattgttctagccatgactcgcgtggtgccagataagctacgctctctcgcccttggtgtaagttatgtaattctgcgaatcttcggcaccattccagggccttctatctttaaaatgtcaggtgaaacttcttgtattctgagggatgtgaacaagtgtggacacacaggccgctgttggatctacaataagacaaaaatggcctttctgttagtgggcatttgcttcttatgtaagttgtgcaccattattttcactacaatcgccttcttcatttacaagcggcgcctcaatgagaatacagactttccagatgtgactgtgaagaatccaaaggtgaagaaaaaagaagagaccgatctgtag

SEQ ID NO: 107463 - DNA, 1974 bp, Artificial Sequence
  derived and/or modified sequence
atgtttgtgggcgtggcccggcacagcggcagccaggatgaggtgtcccggggcgtggagcccctggaggccgcccgggcccagcctgccaaggacagaagagccaagggcacccccaagagcagcaagccaggcaagaagcaccgctacctgcggctgctgcctgaggccctgatccgctttggaggcttcaggaagaggaagaaggccaagagctctgtgtccaagaagccaggagaggtggatgacagcctggagcagccctgtggcctgggctgcctggtgtccacctgctgtgagtgctgcaacaacatccgctgcttcatgatcttctactgcatcctgctgatctgccagggcgtggtgtttggcctgattgatgtgtccatcggggacttccagaaggagtaccagctgaagaccatcgagaagctggccctggagaagagctatgacatcagcagcggcctggtggccatcttcatcgccttctatggagacaggaagaaggtgatctggtttgtggccagcagcttcctgattggcctgggcagcctgctgtgtgccttccccagcatcaatgaggagaacaagcagagcaaggtgggcatcgagggcattgctgaatgtacctccatgattggctacgccctgggctacgtgctgggcgcccccctggtgaaggtgcctgagaacaccaccagcgccaccaacaccaccgtgaacaacggcagccctgagtggctgtggacctggtggatcaacttcctgtttgctgctgtggtggcctggtgcaccctcatccccctgagctgcttccccaacaacatgcctggcagcacccgcatcaaggccaggaagaggaagcagctgcacttctttgacagccggctgaaggacctgaagctgggcaccaacatcaaggacctgtgtgccgccctgtggatcctgatgaagaaccctgtgctgatctgcctggccctgagcaaggccacagagtacctggtgatcatcggggccagcgagttcctgcccatctacctggagaaccagttcatcctgacccccaccgtggccaccaccctggccggcctggtgctgatccctggaggagccctgggccagctgctgggcggcgtgattgtgtccaccctggagatgagctgcaaggccctgatgaggttcatcatggtgaccagcgtcatcagcctcatcctgctggtgttcatcatctttgtgcgctgcaaccctgtgcagtttgctggcatcaatgaagattatgatggcaccgggaagctgggcaacctgacagccccctgcaatgaaaaatgtcgctgcagcagcagcatctacagcagcatctgtggcagagatgacatcgagtacttcagcccctgctttgctggctgcacctacagcaaggcccagaaccagaagaagatgtactacaactgcagctgcatcaaggagggcctcatcacagcagatgctgagggggacttcattgatgcccggcctggaaaatgtgatgccaagtgctacaagctgcccctcttcatcgccttcatcttcagcaccctcatcttcagcggcttctctggagtgcccatcgtgctggccatgaccagggtggtgcctgacaagctgcggagcctggccctgggcgtgtcctatgtgatcctgcgcatcttcggcaccatccctggccccagcatcttcaagatgtctggagagaccagctgcatcctgagagatgtgaacaagtgtggccacacaggccgctgctggatctacaacaagaccaagatggccttcctgctggtgggcatctgcttcctgtgcaagctgtgcaccatcatcttcaccaccatcgccttcttcatctacaagaggcggctgaatgaaaatacagacttcccagatgtgacagtgaagaaccccaaggtgaagaagaaggaggagacagacctgtag

SEQ ID NO: 107464 - DNA, 1974 bp, Artificial Sequence
  derived and/or modified sequence
atgttcgtgggcgtggcccggcacagcggcagccaggacgaggtgtctagaggtgttgagccattggaggctgctagagcccagccggccaaggataggagagcaaaaggcactccaaaatcctccaagcccggtaagaaacatagatacctacgccttctccccgaggcattaatccggtttggcggatttcgtaaaagaaagaaggccaagtcatccgtctccaaaaagcccggggaggtagatgactccctcgaacagccttgcggcctcggatgcctggtctcaacctgctgcgagtgctgtaataacataagatgtttcatgatattttactgcatactcttaatttgtcagggcgtggtttttggacttatcgacgtttcaattggcgacttccagaaagagtaccagctcaagaccatcgaaaaactggccctggaaaagtcttatgatattagcagcggattggtcgcaattttcatagccttttatggcgacagaaagaaggttatctggtttgttgcatcctcatttttgatcggcctcgggtctctgttgtgcgccttcccttccattaatgaggaaaataaacagagcaaggtgggaatagagggaatagcggagtgcacctcaatgattgggtatgctctaggatacgtccttggcgctccccttgtgaaggttcctgagaacactacctctgctaccaacacaacagtcaataacggctcgcctgagtggctgtggacctggtggatcaatttcctttttgctgccgtggtggcatggtgcaccctcattcctctgagctgtttccctaataatatgcctggtagcaccagaatcaaagctagaaaacgtaagcagcttcactttttcgacagcagactcaaagatttaaaactcggaaccaacatcaaggatctttgcgcagcactgtggatcctaatgaaaaatcccgttctcatttgcctggcactctcaaaggcaacagaatacttggtcatcatcggggcttcagagttccttcccatatatctcgagaatcagttcattttgactcccaccgtggcaacgactctggccgggctcgttcttatacctggaggcgctttgggacagctcttgggtggcgtcatcgtctccactttggagatgagctgcaaggcccttatgcgctttatcatggtgacatctgtcatcagcctaattctattggttttcatcattttcgtccggtgcaatcctgtgcagtttgctggaatcaatgaagattatgacggcactggtaagctgggcaatctgacggctccttgcaatgaaaaatgtcgatgctcctctagcatttattcaagtatctgcggaagggatgacatcgagtatttcagcccctgcttcgctggctgtacatattccaaggctcagaatcagaagaaaatgtactacaactgtagttgtatcaaagagggcctcattacagctgacgcggagggcgattttattgatgcaagacctggaaaatgcgatgcaaaatgctataagctgccactctttattgccttcatcttcagtacgctcatatttagcggcttctccggcgtaccaatcgtcctcgcgatgacccgagtggtgccagataaactgagaagcctggccttgggggtaagctacgtcatcctcagaatattcggtactattcctgggccgagtatctttaagatgtccggagagacaagctgtattctgagggatgtcaacaagtgcgggcataccggccgttgctggatctataataaaactaaaatggctttcctgctcgttggcatttgctttctatgcaagctctgcactatcatctttaccaccatcgcgttcttcatctataagagaagacttaatgaaaacacagatttccctgatgtgacagtgaagaaccccaaggtgaagaaaaaagaggagaccgacctctag

SEQ ID NO: 107465 - DNA, 1974 bp, Artificial Sequence
  derived and/or modified sequence
atgtttgtgggcgtcgccaggcactcgggatcacaggatgaggtttctaggggagtagaaccactggaggctgccagggcgcagccagctaaagatcgcagagccaagggcacacccaagtcaagtaaacccggaaagaaacatcgttatctgcggctgctccccgaagcactgattcgattcgggggatttcggaaacggaagaaggccaaaagctccgtctctaagaaacccggtgaggtcgatgattccttagaacagccctgtggcttaggatgcctagtttcgacatgctgcgagtgttgcaataatatccggtgctttatgattttttactgtatccttctgatttgccagggtgtggtctttggactgattgacgtgagcatcggggactttcagaaagagtaccaactgaagactattgagaagctggccctggagaaatcttatgacatctccagcggtctggtggccatcttcattgctttctacggcgacaggaagaaagttatttggttcgtggcctcctcatttttgatcggactgggatcacttctgtgtgcatttccaagcatcaatgaagaaaataaacagtcgaaagttggtattgaggggatcgccgagtgtacatcgatgattggctacgctctgggttatgtgctcggggcacccctggtcaaagttccagagaataccacaagcgcaaccaacaccacagtgaataatggaagtcctgagtggctttggacatggtggattaactttctgttcgctgctgtggtggcgtggtgtacactgattccgttgagttgttttcctaataatatgcctggtagtacccgcatcaaagctagaaagcgaaagcagctgcatttctttgattccagactgaaagatctaaagctggggacgaatattaaagatctttgcgctgccctgtggatcctgatgaaaaatcccgtactgatttgtctcgccctttcgaaagcaacggagtatctagtgattatcggagcttctgagttcttgcctatctacttagagaaccaatttatcctgacccctaccgtcgcgactacgttggctggcttggtgttgatccccggaggggctctcggtcagctgcttgggggagtaattgtgtcaacactggagatgagttgcaaggctctgatgaggttcatcatggtgactagcgttatctccctaatcctgctcgtgttcattatctttgttcgttgcaatccagttcagttcgctggaatcaacgaggactacgatgggacggggaagcttggaaatctgacggctccatgcaatgagaagtgccgttgctcctcgtctatatattcttccatctgcggcagggatgatattgagtattttagcccctgcttcgcgggttgcacctatagcaaggcacaaaaccagaaaaagatgtattataattgtagttgcataaaagaagggctgataacagccgacgctgagggggacttcatagatgcgaggcccggaaaatgcgatgctaagtgttacaaactgcccctgtttattgcctttatattcagtacgctgatcttctcgggcttttctggcgttcccatagttttagccatgacccgagtggtcccggataagctacgctctctggccctcggcgtcagttatgtcatcttgcggatcttcgggactataccaggcccttcaatcttcaaaatgtcgggagaaacctcctgcattttgcgggatgtaaataaatgtgggcatacaggcagatgctggatctataacaagaccaagatggctttcctactcgttgggatctgctttctttgcaaactatgcactattattttcactacgatagccttcttcatctacaagcgcaggctcaatgagaataccgattttccagatgtaacggtgaaaaaccccaaggtgaaaaagaaggaggagacagacctgtag

SEQ ID NO: 107466 - DNA, 2340 bp, Artificial Sequence
  derived and/or modified sequence
tttgcctcctgccctaggagaaacgttcgctctggaggcttgggcggcaagagccccttgtggccaccgagtcctccgacgccctcgccaggctggcctttgggttggcccaggcaggacgggcagccgagagcactcgggccgcgtcgccaggagccgcccagggtgagccatgttcgtaggcgtcgcccggcactctgggagccaggatgaagtctcaaggggagtagagccgctggaggccgcgcgggcccagcctgctaaggacaggagggccaagggaaccccgaagtcctcgaagcccgggaaaaaacaccggtatctgagactacttccagaggccttgataaggttcggcggtttccgaaaaaggaaaaaagccaagtcctcagtttccaagaagccgggagaagtggatgacagtttggagcagccctgtggtttgggctgcttagtcagcacctgctgtgagtgttgcaataacattcgctgcttcatgattttctactgcatcctgctcatatgtcaaggtgtggtgtttggtcttatagatgtcagcattggcgattttcagaaggaatatcaactgaaaaccattgagaagttggcattggaaaagagttacgatatttcatctggcctggtagcaatatttatagcattctatggagacagaaaaaaagtaatatggtttgtagcttcctcctttttaataggacttggatcacttttatgtgcttttccatccattaatgaagaaaataaacaaagtaaggtaggaattgaaggtattgcagaatgtacatcaatgattggatatgctctgggttatgtgctaggagcaccactagttaaagtccctgagaatactacttctgcaacaaacactacagtcaataatggtagtccagaatggctatggacttggtggattaattttctttttgccgctgtcgttgcatggtgtacattaataccattgtcatgctttccaaacaatatgccaggttcaacacggataaaagctaggaaacgtaaacagcttcatttttttgacagcagacttaaagatctgaaacttggaactaatatcaaggatttatgtgctgctctttggattctgatgaagaatccagtgctcatatgcctagctctgtcaaaagctacagaatatttagttattattggagcttctgaatttttgcctatatatttagaaaatcagtttatattaacacccactgtggcaactacacttgcaggacttgttttaattccaggaggtgcacttggccagcttctgggaggtgtcattgtttccacattagaaatgtcttgtaaagcccttatgagatttataatggttacatctgtgatatcacttatactgcttgtgtttattatttttgtacgctgtaatccagtgcaatttgctgggatcaatgaagattatgatggaacagggaagttgggaaacctcacggctccttgcaatgaaaaatgtagatgctcatcttcaatttattcttctatatgtggaagagatgatattgaatatttttctccctgctttgcagggtgtacatattctaaagcacaaaaccaaaaaaagatgtactacaattgttcttgcattaaagaaggattaataactgcagatgcagaaggtgattttattgatgccagacccgggaaatgtgatgcaaagtgctataagttacctttgttcattgcttttatcttttctacacttatattttctggtttttctggtgtaccaatcgtcttggccatgacgcgggttgtacctgacaaactgcgttctctggccttgggtgtaagctatgtgattttgagaatatttgggactattcctggaccatcaatctttaaaatgtcaggagaaacttcttgtattttacgggatgttaataaatgtggacacacaggacgttgttggatatataacaagacaaaaatggctttcttattggtaggaatatgttttctttgcaaactatgcactatcatcttcactactattgcatttttcatatacaaacgtcgtctaaatgagaacactgacttcccagatgtaactgtgaagaatccaaaagttaagaaaaaagaagaaactgacttgtaactggatcatcattgtgattgcagatcatttgaggatcagagtgtgaaaacgagtttctcttttacagattctccaagatttgtttctgtgcccaactttcagaagaggaaaatcacacattatgtttacataagtagcaaaaatatatttatggtgatctgcattttcataataaagtgtcctattgtgaaaca

SEQ ID NO: 107467 - protein, 578 aa, Artificial Sequence
  derived and/or modified sequence
MNISVDLETNYAELVLDVGRVTLGENSRKKMKDCKLRKKQNESVSRAMCALLNSGGGVIKAEIENEDYSYTKDGIGLDLENSFSNILLFVPEYLDFMQNGNYFLIFVKSWSLNTSGLRITTLSSNLYKRDITSAKVMNATAALEFLKDMKKTRGRLYLRPELLAKRPCVDIQEENNMKALAGVFFDRTELDRKEKLTFTESTHVEIKNFSTEKLLQRIKEILPQYVSAFANTDGGYLFIGLNEDKEIIGFKAEMSDLDDLEREIEKSIRKMPVHHFCMEKKKINYSCKFLGVYDKGSLCGYVCALRVERFCCAVFAKEPDSWHVKDNRVMQLTRKEWIQFMVEAEPKFSSSYEEVISQINTSLPAPHSWPLLEWQRQRHHCPGLSGRITYTPENLCRKLFLQHEGLKQLICEEMDSVRKGSLIFSRSWSVDLGLQENHKVLCDALLISQDSPPVLYTFHMVQDEEFKGYSTQTALTLKQKLAKIGGYTKKVCVMTKIFYLSPEGMTSCQYDLRSQVIYPESYYFTRRKYLLKALFKALKRLKSLRDQFSFAENLYQIIGIDCFQKNDKKMFKSCRRLT

SEQ ID NO: 107468 - protein, 15 aa, Artificial Sequence
  derived and/or modified sequence
MNISVDLETNYAELV

SEQ ID NO: 107469 - protein, 69 aa, Artificial Sequence
  derived and/or modified sequence
MNISVDLETNYAELVLDVGRVTLGENSRKKMKDCKLRKKQNESVSRAMCALLNSGGGVIKAEIENEDYS

SEQ ID NO: 107470 - protein, 128 aa, Artificial Sequence
  derived and/or modified sequence
MNISVDLETNYAELVLDVGRVTLGENSRKKMKDCKLRKKQNESVSRAMCALLNSGGGVIKAEIENEDYSYTKDGIGLDLENSFSNILLFVPEYLDFMQNGNYFLIFVKSWSLNTSGLRITTLSSNLYK

SEQ ID NO: 107471 - DNA, 1737 bp, Artificial Sequence
  derived and/or modified sequence
atgaacatcagcgtggacctggagaccaactacgccgagctggtgctggacgtgggcagagtgaccctgggcgagaacagcagaaagaagatgaaggactgcaagctgagaaagaagcagaacgagagcgtgagcagagccatgtgcgccctgctgaacagcggcggcggcgtgatcaaggccgagatcgagaacgaggactacagctacaccaaggacggcatcggcctggacctggagaacagcttcagcaacatcctgctgttcgtgcccgagtacctggacttcatgcagaacggcaactacttcctgatcttcgtgaagagctggagcctgaacaccagcggcctgagaatcaccaccctgagcagcaacctgtacaagagagacatcaccagcgccaaggtgatgaacgccaccgccgccctggagttcctgaaggacatgaagaagaccagaggcagactgtacctgagacccgagctgctggccaagagaccctgcgtggacatccaggaggagaacaacatgaaggccctggccggcgtgttcttcgacagaaccgagctggacagaaaggagaagctgaccttcaccgagagcacccacgtggagatcaagaacttcagcaccgagaagctgctgcagagaatcaaggagatcctgccccagtacgtgagcgccttcgccaacaccgacggcggctacctgttcatcggcctgaacgaggacaaggagatcatcggcttcaaggccgagatgagcgacctggacgacctggagagagagatcgagaagagcatcagaaagatgcccgtgcaccacttctgcatggagaagaagaagatcaactacagctgcaagttcctgggcgtgtacgacaagggcagcctgtgcggctacgtgtgcgccctgagagtggagagattctgctgcgccgtgttcgccaaggagcccgacagctggcacgtgaaggacaacagagtgatgcagctgaccagaaaggagtggatccagttcatggtggaggccgagcccaagttcagcagcagctacgaggaggtgatcagccagatcaacaccagcctgcccgccccccacagctggcccctgctggagtggcagagacagagacaccactgccccggcctgagcggcagaatcacctacacccccgagaacctgtgcagaaagctgttcctgcagcacgagggcctgaagcagctgatctgcgaggagatggacagcgtgagaaagggcagcctgatcttcagcagaagctggagcgtggacctgggcctgcaggagaaccacaaggtgctgtgcgacgccctgctgatcagccaggacagcccccccgtgctgtacaccttccacatggtgcaggacgaggagttcaagggctacagcacccagaccgccctgaccctgaagcagaagctggccaagatcggcggctacaccaagaaggtgtgcgtgatgaccaagatcttctacctgagccccgagggcatgaccagctgccagtacgacctgagaagccaggtgatctaccccgagagctactacttcaccagaagaaagtacctgctgaaggccctgttcaaggccctgaagagactgaagagcctgagagaccagttcagcttcgccgagaacctgtaccagatcatcggcatcgactgcttccagaagaacgacaagaagatgttcaagagctgcagaagactgacctag

SEQ ID NO: 107472 - DNA, 48 bp, Artificial Sequence
  derived and/or modified sequence
atgaacatcagcgtggacctggagaccaactacgccgagctggtgtag

SEQ ID NO: 107473 - DNA, 210 bp, Artificial Sequence
  derived and/or modified sequence
atgaacatcagcgtggacctggagaccaactacgccgagctggtgctggacgtgggcagagtgaccctgggcgagaacagcagaaagaagatgaaggactgcaagctgagaaagaagcagaacgagagcgtgagcagagccatgtgcgccctgctgaacagcggcggcggcgtgatcaaggccgagatcgagaacgaggactacagctag

SEQ ID NO: 107474 - DNA, 387 bp, Artificial Sequence
  derived and/or modified sequence
atgaacatcagcgtggacctggagaccaactacgccgagctggtgctggacgtgggcagagtgaccctgggcgagaacagcagaaagaagatgaaggactgcaagctgagaaagaagcagaacgagagcgtgagcagagccatgtgcgccctgctgaacagcggcggcggcgtgatcaaggccgagatcgagaacgaggactacagctacaccaaggacggcatcggcctggacctggagaacagcttcagcaacatcctgctgttcgtgcccgagtacctggacttcatgcagaacggcaactacttcctgatcttcgtgaagagctggagcctgaacaccagcggcctgagaatcaccaccctgagcagcaacctgtacaagtag

SEQ ID NO: 107475 - DNA, 1737 bp, Artificial Sequence
  derived and/or modified sequence
atgaatatcagcgtcgacctggaaactaattatgcggagcttgtgctggacgtgggccgtgttacactcggcgagaactccagaaagaagatgaaagattgtaagctgcgcaagaagcaaaacgaatctgtttcaagagctatgtgtgcactcttaaattctgggggaggcgtgatcaaagctgaaatcgagaacgaggactattcctacaccaaagatgggattggcctcgacctggaaaattcatttagtaacatcctactctttgtacccgagtaccttgattttatgcaaaatggtaattattttttgatctttgtgaagagctggagtctgaacacctccggtctgcgcattacaaccctgtcttctaacctctacaaaagagacatcacctccgccaaagtgatgaatgcaaccgccgctctagaatttttgaaagatatgaagaagacacgtggacgactttatctgagacctgaattacttgccaagcgaccctgtgtggacattcaagaagaaaacaatatgaaggccctggctggggtgtttttcgacaggaccgagctggaccggaaagagaaactcacattcaccgagagcactcatgtagagattaaaaattttagcactgaaaaattgctccagagaatcaaggagattctgcctcaatacgtgagcgcctttgccaacacggacggcggttatctcttcatcgggctcaacgaggacaaggagattatcggcttcaaggcggagatgtccgatctggacgatcttgaacgagagatcgaaaagtcgatcagaaaaatgcccgtacatcatttctgcatggaaaagaaaaaaatcaactacagttgcaaattcctaggtgtttacgacaagggctcactgtgtgggtacgtttgtgcactgcgcgtagagagattctgctgtgctgtctttgcaaaggagcctgacagttggcacgttaaggacaatagagtaatgcaacttacaagaaaggagtggatacagttcatggttgaagccgaaccaaagtttagtagttcatatgaggaagtcatttctcagattaacacgtccctccctgccccccactcctggcctttgttagagtggcagagacagcgccaccactgtccagggctgtccggacgcatcacttatactcccgaaaatctgtgccggaaactgttcctgcagcatgagggtctgaagcagcttatctgtgaagaaatggactccgtgaggaagggatctctgatcttttcacgcagctggagtgttgacctggggctgcaggagaatcataaggtcttgtgcgacgccctgcttattagccaagacagcccaccggtgctttataccttccatatggtgcaggacgaggaattcaaggggtactccacacagacggctctgaccctgaagcagaagctggctaagataggaggatatactaaaaaggtctgcgtgatgaccaagattttctatctgagccccgagggtatgaccagctgccagtacgatttaagaagccaggtgatctaccccgaatcatattatttcactcggcgtaagtatctgcttaaggccttgttcaaagctttgaagcgcttgaagtccctccgcgaccaattcagcttcgcagagaatctgtaccagataattggcattgactgtttccagaagaacgataaaaaaatgtttaaatcctgtagacggctgacgtag

SEQ ID NO: 107476 - DNA, 1737 bp, Artificial Sequence
  derived and/or modified sequence
atgaacatttctgtggacctggagaccaattacgctgaacttgtcttagatgtaggacgggtgacactgggcgagaatagccggaaaaagatgaaggactgcaagctccgtaaaaaacagaatgagagtgtgtccagggctatgtgcgcgcttctgaactctgggggtggggtcatcaaagcggagatcgagaatgaagactacagctacaccaaggatggtatcggtctagatctggaaaactcatttagcaacatcctcctcttcgtgcccgagtacctggacttcatgcaaaacggaaattattttcttatatttgtcaagtcctggtcgctgaacacttcaggactccgcattacaactctgagtagtaatttatataaacgcgatatcacatcagcaaaggtgatgaatgcaacagccgctctggaatttctgaaagacatgaagaaaactagaggaagactgtacctcagacccgaattgctggcaaagcgtccctgtgtcgacattcaggaggagaataatatgaaagccttggccggcgtatttttcgaccggacagagctagacaggaaagagaaactaactttcacagagtccacccacgtcgagatcaaaaacttttctactgagaagttactccaaaggatcaaggaaatcttaccacagtatgtctctgcttttgccaacactgatggcggctacctgtttattggactaaatgaggataaggagatcatcgggtttaaagctgagatgtcagacctggatgacctagagcgcgaaattgaaaaaagtatcaggaaaatgcctgtgcaccacttctgtatggaaaagaaaaagattaactactcctgtaagttcctaggagtgtatgataaaggctccctttgcggttacgtttgcgctcttagggtcgaacgcttttgttgtgccgtctttgcaaaagagccagattcctggcacgtaaaggacaacagggtaatgcagctcaccagaaaggagtggattcagttcatggtggaggccgagcccaagtttagtagtagctatgaggaggtgatcagccagatcaacacctctcttccagcccctcattcttggccccttttggaatggcaacggcagaggcatcattgcccgggattgagcggaagaattacttatacgcccgagaatctttgccggaaactgttcctccagcatgaggggctgaagcagttgatttgcgaggaaatggacagcgtaagaaaaggctctctcatattctcaaggtcttggtctgtcgacctgggcctacaggagaatcataaagtgttgtgtgatgctttgctgataagtcaggactccccaccagtactgtacacgttccacatggtgcaggacgaggaattcaaaggatatagcactcagactgccctcacgctgaaacagaaactggccaagatcggtggatacacgaagaaagtgtgcgttatgacaaaaattttctacttatccccagagggcatgacctcctgccagtacgatctgcggtcccaggtcatctaccctgagagttactactttactagacggaaatacttactgaaagccctctttaaggcacttaaacggctcaaatcgctcagggatcagttcagctttgccgagaacctataccaaatcatcggtatcgattgtttccagaagaatgacaaaaaaatgttcaagagttgcaggcgactcacctag

SEQ ID NO: 107477 - DNA, 48 bp, Artificial Sequence
  derived and/or modified sequence
atgaatatttctgtggacctggagactaattatgccgagctagtttag

SEQ ID NO: 107478 - DNA, 210 bp, Artificial Sequence
  derived and/or modified sequence
atgaacatttccgttgacctcgaaactaattatgcggagttggtgctggacgttggtcgcgttacccttggggagaattctaggaagaaaatgaaggattgcaagctaagaaagaagcagaatgaatccgtgagccgcgctatgtgcgcactgttgaattcaggtggaggagttattaaagccgagattgagaatgaagactatagttag

SEQ ID NO: 107479 - DNA, 387 bp, Artificial Sequence
  derived and/or modified sequence
atgaatattagtgtggacttggagaccaattatgccgagctggttctggatgtgggcagggtgactctcggcgagaatagccggaaaaaaatgaaagattgtaagctgcggaaaaaacagaacgagtccgtgagtagggcaatgtgtgctcttctaaactcaggcggcggcgtaatcaaagcagagatcgaaaatgaggattattcctataccaaggatgggattgggctggacctggagaatagctttagcaacatcctcctcttcgtgcctgaatatctcgactttatgcaaaatggaaactattttcttatttttgtcaagtcgtggtctctgaacacgtccggtttgcggattacgacgctctccagtaacctctacaagtag

SEQ ID NO: 107480 - DNA, 1737 bp, Artificial Sequence
  derived and/or modified sequence
atgaacatctccgtagatctcgagacgaattacgccgagctggtcctagatgtgggaagggtaaccctcggagaaaacagccgcaaaaagatgaaagattgcaagcttaggaagaagcagaacgagtccgtctctagggccatgtgcgctctgctgaatagtgggggaggcgtgattaaggctgaaattgaaaacgaggactactcctacaccaaggacggcatcgggttggatctggagaattcgttctccaacattctactgtttgtgcccgagtacctggattttatgcagaacggcaattatttccttatctttgtgaaaagttggtcgcttaacacaagcgggcttcgcatcacaacactcagctctaatctatataagcgggatatcacaagtgcaaaagtgatgaacgccacagcagcgctggaatttcttaaggatatgaagaagaccagagggcggctataccttaggccagagctgcttgccaaacgcccttgcgttgatattcaggaggagaataatatgaaagctcttgccggtgtattctttgaccgcaccgaattggatcgcaaagagaagctgacctttacggaatccactcatgtagagattaagaacttcagcaccgaaaagctgctgcagaggattaaagaaattctgcctcagtatgtatcggcgtttgcgaataccgacggagggtatcttttcatcggtcttaatgaggataaagaaatcattgggtttaaagctgaaatgagtgatctggacgatctggaaagggagatcgagaaatctattcggaagatgccagttcaccacttctgcatggaaaagaagaaaattaattacagctgtaaattccttggcgtgtatgataaagggagtctgtgcggttatgtgtgtgccttgcgggtcgagaggttctgctgcgccgtcttcgctaaggagcctgattcgtggcacgttaaggataacagggtgatgcaattgaccagaaaagaatggattcagttcatggttgaggcagaacctaaattcagctcttcatatgaggaggtcatctcccaaatcaatacatccctccctgccccccatagttggcctctgcttgaatggcagaggcagaggcaccactgccctgggttatctggtagaatcacctacacacccgaaaacctttgccgcaagttgttcttgcagcacgaagggctgaaacagcttatctgcgaggagatggactctgtccgcaaaggaagtctgatattcagcaggtcttggtctgttgacctgggcctgcaagaaaaccacaaagtcctatgtgatgccctgctcatttcccaggactccccaccagtactctacacgttccatatggttcaggatgaggagtttaagggttatagtacacaaacggcgctcaccctgaagcagaagctcgccaaaattggcgggtacacaaagaaggtatgcgtgatgaccaagatcttctatctgagtcccgaggggatgacatcctgtcagtacgacttgagatctcaggtgatatatccagaaagctactatttcactagacggaaatatctgctgaaggccctgttcaaagccctgaagcgcctaaagtctctgagggaccaattctcatttgcggagaacttataccaaattatcgggatcgattgcttccagaaaaacgataaaaagatgtttaaatcctgtagacgtctgacatag

SEQ ID NO: 107481 - DNA, 1737 bp, Artificial Sequence
  derived and/or modified sequence
atgaacatctctgtggacctggagaccaactatgcagagctggtgctggatgtgggccgggtgaccctgggggagaacagcaggaagaagatgaaggactgcaagctgaggaagaagcagaatgaatctgtgtcccgggccatgtgtgccctgctgaacagcggcggcggcgtcatcaaggccgagattgaaaatgaagactacagctacaccaaggatggcatcggcctggacctggagaacagcttcagcaacatcctgctgtttgtgcctgagtacctggacttcatgcagaatggaaactacttcctgatctttgtgaagtcctggagcctgaacaccagcggcctgcgcatcaccaccctgagcagcaacctgtacaagagggacatcaccagcgccaaggtgatgaatgccacagctgccctggagttcctgaaggacatgaagaagacccggggccgcctgtacctgcggcctgagctgctggccaagaggccctgtgtggacatccaggaggagaacaacatgaaggccctggccggggtcttctttgacagaacagagctggacaggaaggagaagctgaccttcacagagagcacccacgtggagatcaagaacttcagcacagagaagctgctgcagaggatcaaggagatcctgccccagtatgtgtctgcctttgccaacacagatggcggctacctgttcatcggcctgaatgaagacaaggagatcatcggcttcaaggccgagatgtctgacctggatgacctggagcgggagattgagaagagcatcaggaagatgcctgtgcaccacttctgcatggagaagaagaagatcaactacagctgcaagttcctgggcgtgtatgacaagggcagcctgtgtggctacgtgtgtgccctgcgggtggagcgcttctgctgtgctgtgtttgccaaggagccagacagctggcacgtgaaggacaacagagtgatgcagctgaccaggaaggagtggatccagttcatggtggaggccgagcccaagttcagcagcagctatgaggaggtgatcagccagatcaacaccagcctgcctgccccccacagctggcccctgctggagtggcagaggcagaggcaccactgccccggcctgagcggccgcatcacctacaccccagagaacctgtgcaggaagctgttcctgcagcacgagggcctgaagcagctgatctgtgaggagatggacagcgtgaggaagggcagcctcatcttcagccgctcctggagcgtggacctgggcctgcaggagaaccacaaggtgctgtgtgatgccctgctgatcagccaggacagcccccctgtgctgtacaccttccacatggtgcaggatgaggagttcaagggctacagcacccagacagccctgaccctgaagcagaagctggccaagattggaggctacaccaagaaggtgtgtgtgatgaccaagatcttctacctgagccctgagggcatgaccagctgccagtatgacctgcggagccaggtgatctacccagagagctactacttcaccaggaggaagtacctgctgaaggccctcttcaaggccctgaagaggctgaagagcctgcgggaccagttctcctttgctgagaacctgtaccagatcatcggcatcgactgcttccagaagaatgacaagaagatgttcaagagctgccggcggctgacctag

SEQ ID NO: 107482 - DNA, 48 bp, Artificial Sequence
  derived and/or modified sequence
atgaacatctctgtggacctggagaccaactatgcagagctggtgtag

SEQ ID NO: 107483 - DNA, 210 bp, Artificial Sequence
  derived and/or modified sequence
atgaacatctctgtggacctggagaccaactatgcagagctggtgctggatgtgggccgggtgaccctgggggagaacagcaggaagaagatgaaggactgcaagctgaggaagaagcagaatgaatctgtgtcccgggccatgtgtgccctgctgaacagcggcggcggcgtcatcaaggccgagattgaaaatgaagactacagctag

SEQ ID NO: 107484 - DNA, 387 bp, Artificial Sequence
  derived and/or modified sequence
atgaacatctctgtggacctggagaccaactatgcagagctggtgctggatgtgggccgggtgaccctgggggagaacagcaggaagaagatgaaggactgcaagctgaggaagaagcagaatgaatctgtgtcccgggccatgtgtgccctgctgaacagcggcggcggcgtcatcaaggccgagattgaaaatgaagactacagctacaccaaggatggcatcggcctggacctggagaacagcttcagcaacatcctgctgtttgtgcctgagtacctggacttcatgcagaatggaaactacttcctgatctttgtgaagtcctggagcctgaacaccagcggcctgcgcatcaccaccctgagcagcaacctgtacaagtag

SEQ ID NO: 107485 - DNA, 1737 bp, Artificial Sequence
  derived and/or modified sequence
atgaacatcagcgtggacctggagaccaactacgccgagctggtgttagatgtcgggcgggtgacgctcggggaaaatagtcggaagaaaatgaaagactgtaaactgcgcaaaaagcaaaatgaaagtgttagtcgcgccatgtgcgcactgctcaattctggcggaggggtgatcaaggccgagattgagaatgaggattactcctacacaaaagacggcataggcctggacctggaaaattctttctctaatatccttctgtttgtacccgaatacttggattttatgcaaaacggcaattacttcctgattttcgtgaagtcttggtcccttaacactagcggccttcggatcactacactgagctccaatctttacaagagggatattacaagcgctaaggtcatgaatgccaccgctgcgctggagtttctgaaggacatgaaaaagacaagggggcgactgtaccttaggccagaactgctcgccaaaagaccctgtgttgatattcaggaggagaataatatgaaggctttggcaggagtgtttttcgaccgcacggaacttgatagaaaggagaagctcacatttaccgagtctactcacgttgaaatcaaaaacttttccactgagaaattgcttcaaaggatcaaggaaattcttccccagtacgtgagtgcattcgccaataccgatggaggctatctcttcatcggcctgaatgaagacaaagaaataatcggcttcaaagcagaaatgtccgacttggacgatctggagagggagattgaaaagtctatcagaaagatgcccgtgcaccacttttgcatggagaaaaagaagattaactattcgtgcaaatttctaggcgtgtatgacaaaggatcattgtgtggctacgtatgcgcactgagggtagagcgcttctgctgcgccgtattcgccaaagagcccgacagttggcatgttaaagataacagggtgatgcaactcacacggaaagagtggatccagtttatggtggaggctgagcctaaatttagtagtagctacgaggaagtgatcagccagattaacacttctctcccagccccacattcttggcctctcttggaatggcagcggcaacgacaccactgccccgggctgtcagggagaatcacctacacccccgagaatttatgccggaagttgttcctccagcatgagggactgaaacagcttatctgcgaggaaatggattctgtccgaaaagggtccctgatcttctcacggagctggagcgttgacctcggacttcaggagaaccacaaagtgctttgcgatgccctcctcatctcccaggatagccccccagtactgtacacattccatatggtgcaggacgaggagttcaaggggtacagcactcagacagcgttgacccttaagcagaaactcgccaagatcggcggatacacaaaaaaagtgtgcgttatgacaaagatcttttacctgtcaccagaggggatgactagctgccaatacgacctgcgcagtcaagtcatttatccagagagctactactttactcggcgcaagtacctgcttaaggccctttttaaggctctgaaacggctgaagagcttgcgagaccagttcagcttcgccgagaacctctatcagattataggtattgattgtttccagaaaaatgacaagaagatgttcaagtcttgcagaaggctgacatag

SEQ ID NO: 107486 - DNA, 1737 bp, Artificial Sequence
  derived and/or modified sequence
atgaacatcagcgtggacctggagaccaactacgccgagctggtgctggacgttggcagagtaacactgggggagaattccaggaagaaaatgaaagactgcaagcttcgcaaaaaacagaatgaaagcgtctccagggccatgtgcgctctgctgaactctggtggaggagtgattaaggctgagatcgagaatgaagattacagttacacgaaggatggaatcggtcttgacctggagaattcatttagtaacatcttactctttgtgccagagtatttagacttcatgcagaatggtaattatttccttatcttcgtgaaaagttggtcgctgaacacttcaggacttagaattacgacactcagcagtaacctctataaacgagacattacttccgcaaaagtaatgaacgcgaccgccgctttagagttcttgaaagatatgaagaagactcgcggcaggttgtatctgaggcctgaacttctggccaaaagaccctgcgtagatattcaggaggaaaacaacatgaaagcccttgctggcgtgttttttgaccggaccgagttggatcgaaaagaaaagctcaccttcaccgaatcgacgcatgtggagatcaaaaatttcagcaccgagaagctgttacagcggatcaaagagattctgcctcagtacgtgtctgcatttgctaataccgacgggggctacttattcatcggcctcaacgaagacaaagagattattgggtttaaagctgaaatgtccgacctggacgacttagagcgtgaaattgaaaaaagcattcggaaaatgcctgtccaccatttttgcatggagaaaaagaagattaattattcctgcaaatttctgggagtctacgacaagggaagcctgtgtggttatgtttgtgctctaagagtggagaggttctgttgtgcagtttttgcaaaggaaccggacagttggcacgttaaagacaatagggtgatgcagctgacgcggaaagagtggattcagttcatggtcgaggctgagccaaaattttcttcatcatacgaagaagttatctcacagataaatacttctctgcctgctcctcatagctggcctcttttggagtggcagcgtcagagacaccactgcccgggcctttctgggcgaattacgtataccccagagaacctgtgtaggaagctgtttttgcagcacgagggcctaaagcagctcatctgcgaggagatggattccgtgagaaaggggtcacttatctttagtagatcctggtccgtggaccttggactacaagagaatcacaaagtcctgtgtgatgcattattgataagtcaggactcgccacccgtgctgtacacatttcacatggtgcaggatgaggagttcaaggggtactccacccagactgccctgaccttgaaacagaaacttgcaaagatcggcggctatacaaaaaaggtgtgtgtgatgacaaaaatcttttatttatcaccggagggcatgacctcttgccaatatgatcttagatctcaggtcatttacccagagagctactatttcacaagaaggaaatatttgctgaaagctttgtttaaggctctcaagcggttgaagtcactccgggaccagttttcttttgccgagaacttatatcagatcatcggaattgactgctttcagaagaacgataaaaagatgttcaaatcctgtcgccgcctgacctag

SEQ ID NO: 107487 - DNA, 210 bp, Artificial Sequence
  derived and/or modified sequence
atgaacatcagcgtggacctggagaccaactacgccgagctggtgctcgacgttggtcgggttactctcggggagaattcacgcaagaagatgaaagactgcaagttgaggaagaagcaaaacgaatccgtgagccgagccatgtgcgcacttttaaactcaggaggcggcgttatcaaggcagaaattgaaaacgaagattactcgtag

SEQ ID NO: 107488 - DNA, 387 bp, Artificial Sequence
  derived and/or modified sequence
atgaacatcagcgtggacctggagaccaactacgccgagctggtgttagacgttggtcgtgttacactcggggaaaacagccggaagaagatgaaggattgtaaactcaggaagaagcagaatgaaagtgtctccagagcaatgtgcgcacttcttaacagcgggggcggggtcattaaagccgagatcgagaacgaagattactcctacactaaggacgggatcggcctagacctggagaatagcttctctaacatacttctgtttgtgccagaatacttggattttatgcagaatgggaattatttcctcatctttgtgaagtcttggagtctgaacacctctggccttcgcatcacaaccctgagctcaaatctgtataaatag

SEQ ID NO: 107489 - DNA, 1737 bp, Artificial Sequence
  derived and/or modified sequence
atgaacatcagcgtggacctggagaccaactacgccgagctggtgctcgacgtcggcagagtgactctcggagaaaatagccggaagaagatgaaagattgcaagctgcgcaagaagcagaacgagtcagttagcagagctatgtgcgccttgctcaattccggcggcggcgtgatcaaggcagagatcgagaacgaggattacagttacactaaagatggaatcggcctggatctggagaacagcttcagtaatattctgctctttgtaccagagtacctcgacttcatgcagaacggaaattacttcctcatctttgtcaagtcatggtctctgaacacaagcggactgcgcatcaccactttaagcagcaacctatataagagagacataacaagcgcaaaagtgatgaatgccactgctgctctggagttcctgaaagacatgaaaaaaaccagagggagactatatctccggcccgagctgctggcgaagcgtccctgtgtcgatatccaggaggaaaacaacatgaaggccctggccggagtcttctttgatcgcaccgaattggatcggaaagaaaaacttacgttcacagagagtactcacgtagagatcaagaacttttcgacagagaaattgctgcagcgcattaaagagatattgccccaatacgtgtcggcgtttgctaatacagacggaggttacctgtttattgggttgaacgaggataaggagattataggctttaaggctgaaatgtccgatctggatgaccttgagcgcgagatcgagaagtctatacggaaaatgccagtgcatcacttctgtatggaaaaaaaaaagattaattattcctgtaaattcctgggcgtgtacgacaaggggagcttgtgcggttatgtgtgcgccctccgggtggagcgcttctgttgcgccgtgtttgcaaaagagccggacagttggcacgttaaagacaacagggttatgcaattgactaggaaggagtggatccaattcatggttgaggccgagccgaagttcagcagtagctacgaagaagtgatttcccagatcaacactagtctccccgcacctcacagttggccactgctggagtggcagcgccagaggcatcactgccctggattgtctggtagaattacttatacaccagagaacctctgccgcaagctgttcctgcagcatgaggggttaaaacagttgatttgcgaagagatggactccgttcgtaaggggagccttatcttctcgcgatcttggtctgtagacctgggcttgcaagagaatcataaggtattatgtgacgcacttctcatctctcaggactctccccccgttttgtacactttccacatggtacaggatgaagaattcaaaggctattctacacagacggccctcactctcaagcagaagctggcaaaaatcgggggatacacaaaaaaagtttgtgttatgactaagatattttaccttagtccggagggaatgacgtcctgccagtacgatctgcgatcccaggtcatttatccagagagttactacttcactagacggaagtacctgttaaaagccctatttaaagccctgaagcgcctgaaatcactgagggaccagttctcattcgccgagaatctgtaccaaatcataggcatagactgctttcagaagaacgataaaaaaatgttcaagtcttgcagaaggctgacttag

SEQ ID NO: 107490 - DNA, 1737 bp, Artificial Sequence
  derived and/or modified sequence
atgaatatatctgtagacctggagaccaattacgcggaactagttcttgacgtcggtagggttaccttaggggaaaattcacggaagaagatgaaggactgtaaactgcgcaagaagcagaacgaaagcgtgagtcgtgcaatgtgcgcactattaaattctggtggcggtgtcataaaagcagagatcgagaacgaggattattcttatacaaaggacgggataggcttggatcttgagaatagtttcagtaacatccttctgttcgtgcctgagtatctggactttatgcaaaatggcaactattttttgatattcgtgaagtcttggagtctgaacacgtcaggactccggattactactctgagttcaaacctctacaaaagggacatcacttccgctaaggttatgaatgccactgcagccctagaattcctcaaagatatgaaaaagacgcgcggaagactttatctcagacctgaattgttagctaagaggccatgcgtggatattcaggaggaaaataatatgaaggctctagccggtgttttttttgacaggacggagctggacagaaaggagaagttgaccttcaccgaatcaacgcacgtggaaatcaaaaacttctcgacggagaaattgctgcagcggattaaagaaattctgccgcagtacgtctccgctttcgccaataccgacggcggttatctctttataggattgaacgaggacaaggagatcatcggctttaaggcagaaatgtcggacttagacgatctcgaacgcgagatagagaaaagtattagaaaaatgccagttcaccatttttgtatggagaaaaagaagataaactattcctgcaagtttctcggcgtttatgacaaggggtcgttgtgcggctacgtgtgtgccctccgcgtggaacgcttttgttgtgccgtatttgctaaagagcccgactcatggcacgtgaaggacaatcgagtgatgcagctgacccgaaaggagtggattcagtttatggtcgaggcagaaccgaaattttccagcagttatgaggaggtcatcagtcagataaataccagcttaccagctccccacagctggcccctgctggagtggcaacgtcaacggcatcactgccctggactctctggacgtatcacttacacgcccgagaatctgtgccgaaagttgtttctgcagcatgagggactgaagcagctgatctgcgaagaaatggatagtgtgaggaaaggttcccttatatttagccgcagctggtctgtagacctgggcctccaagagaatcataaggtactgtgcgatgccctgctgatctctcaagatagcccgccagtcctgtatacattccatatggtccaggacgaggagttcaagggatattcaacccagaccgcactcacactcaaacagaagttggcaaagattggcggttatacaaagaaggtttgcgtgatgactaagattttctatctaagtccagaaggaatgacatcatgccagtacgacctccgcagccaggtgatctatcctgaatcctattactttacacgcagaaaatacctgctcaaggcactgttcaaagcactaaagagactgaagagcctgcgagaccaattctcctttgctgaaaatttgtaccagatcatcggcatcgattgctttcagaaaaatgataaaaaaatgtttaagagttgcagaagattgacatag

SEQ ID NO: 107491 - DNA, 1737 bp, Artificial Sequence
  derived and/or modified sequence
atgaatatctctgtggaccttgagaccaattatgctgagctcgtgttggacgtggggagagtcacattgggagagaactcccgcaagaagatgaaggactgcaaactcaggaagaaacagaacgagtctgttagtcgggcaatgtgcgctctcctgaattccggagggggagtgattaaggctgagatcgagaacgaggactactcctacaccaaggatggcattggtctggatctggaaaattctttctccaatatcctgctttttgtgcctgaatacctggatttcatgcagaatggtaattatttcctgatcttcgtcaagagctggagtcttaacacatctgggctacgaattacgacactgtcatctaatctctataaacgcgacataactagcgctaaggttatgaacgctaccgccgctctggagttcttgaaggatatgaagaagacgagagggagattatatctgcggccagagcttctggccaagaggccatgtgttgatatccaggaggagaacaacatgaaagcactcgccggagtctttttcgatcggacagagctcgacagaaaggagaagttaacatttacggagagcacccacgttgagatcaagaatttctcaactgagaaattacttcaacgtatcaaggaaatactaccgcagtatgtgtccgcatttgccaacactgatgggggttatctctttattgggctcaacgaagacaaggagattatcgggtttaaggccgagatgagcgacctagatgatctggaaagagagatcgagaaatccattcgtaagatgcccgtgcatcacttctgcatggagaagaagaagataaattactcatgcaagttccttggagtttacgacaaaggaagtctctgcgggtacgtctgtgcactccgtgtggaacggttctgctgcgcggtgtttgcgaaggagccagattcctggcacgtcaaggataacagggttatgcagctgacccgcaaggagtggattcagtttatggtcgaggccgaacccaaattttcctcgagctacgaggaggtgattagccaaatcaacacgtcgcttccagccccacatagctggccgttgctggagtggcagagacaacgccatcactgtcccggactgagcggtcggataacctatactcctgagaatttgtgccggaagcttttcctccaacatgaaggcttaaagcaactcatctgcgaggagatggacagcgtcagaaagggatcattgattttctctaggtcatggagcgtagatttaggtctgcaggagaaccataaagtcctatgcgatgcacttctgatcagtcaagactctccacctgtcctctacacctttcacatggtccaagacgaggagtttaaggggtatagcacccaaaccgccctaaccctaaaacaaaaactggctaagatcgggggatatactaaaaaagtctgcgtgatgaccaagatcttctacctgtcacccgagggcatgaccagctgtcagtacgatctgcgctcgcaggtgatctacccagaatcctactacttcacccgcagaaagtatctgctcaaggcccttttcaaagcactgaagaggttaaagtcactccgcgatcagttctccttcgccgaaaatctgtatcaaatcatcggaatcgactgttttcaaaaaaatgataaaaagatgttcaagagttgccggcgtttaacgtag

SEQ ID NO: 107492 - DNA, 48 bp, Artificial Sequence
  derived and/or modified sequence
atgaacatttctgttgacttagaaaccaactacgccgagttagtatag

SEQ ID NO: 107493 - DNA, 210 bp, Artificial Sequence
  derived and/or modified sequence
atgaacattagcgtggacctggaaaccaattacgcagagcttgtgttagacgttggccgagtgacgttaggggagaattcccgaaaaaaaatgaaagactgcaagttgcggaaaaagcaaaacgaaagcgtgagccgagccatgtgcgccctgttgaatagcggagggggtgtgatcaaagccgagatagaaaacgaggattatagctag

SEQ ID NO: 107494 - DNA, 387 bp, Artificial Sequence
  derived and/or modified sequence
atgaacatctccgtggacctcgaaaccaactatgcagagttggttttagacgtggggagagttacgctaggagagaactctagaaagaagatgaaggactgtaagctccggaaaaaacagaatgagagcgtgtctcgggcaatgtgtgcgttattgaatagtgggggaggagttattaaagcagagatcgagaatgaggattactcctataccaaagatggcattggtctggacctggagaattcattctccaatattttgctatttgtgcctgaataccttgacttcatgcagaacggaaattactttctcattttcgtgaaatcttggtcacttaatacttctgggcttcgcattaccactctttcctcaaacctgtataagtag

SEQ ID NO: 107495 - DNA, 1737 bp, Artificial Sequence
  derived and/or modified sequence
atgaacatctcggtcgatcttgaaaccaattacgcagagctagtgctggatgtgggacgagtgacacttggggagaattcccggaaaaaaatgaaggactgcaagctgaggaagaaacagaatgaatccgtttcgagagcaatgtgtgctctgctcaacagtgggggaggggtcataaaagcagagattgaaaacgaggattattcatataccaaagatgggatcggactggaccttgaaaattcattcagcaatatactcttgtttgtcccagaataccttgatttcatgcagaatggtaattacttcctgatttttgttaagagttggtcactgaataccagcggactaaggatcactacgctgagtagtaacctgtataaacgtgacataacaagcgcgaaggtgatgaatgcaactgcagcacttgagttcctgaaggatatgaaaaagacacggggacgtctctacctccgtcctgagctgctcgcgaagcgaccatgtgtggatatacaggaagagaataacatgaaagctcttgctggggttttcttcgaccgcaccgagctcgacagaaaggagaaattgacctttacagagagcacacacgtggagatcaagaacttttcaacagagaaacttctgcaaagaataaaggaaatcctgccacagtacgtgtccgccttcgctaataccgatgggggatatctgtttatcggcttaaacgaagacaaagagatcattggcttcaaggctgagatgtccgacctggatgacctggagcgggagatcgagaagtctattcgtaagatgcccgtgcatcacttctgcatggagaagaaaaagatcaactactcctgtaaattccttggggtgtacgataaggggtctctctgtgggtacgtgtgcgctctgagagtcgagagattttgttgtgctgtattcgccaaggaacctgacagctggcatgtcaaagacaatcgcgtgatgcaactcacccgaaaggaatggatccagtttatggtggaagccgagcccaaattttcatcctcatacgaagaagttataagccagatcaatacctccctccctgccccacattcctggccgctactggagtggcagagacagaggcaccactgccctgggctttcgggcagaattacatatactccagaaaacctgtgtcgtaaactcttcttacagcacgaaggtttaaaacagctcatctgtgaggaaatggatagcgttcgcaaggggtccctcatttttagccggagctggtccgttgatctgggactgcaggagaatcacaaagtcttatgcgatgccctgttgatatcccaggatagcccgccagttctctacacatttcacatggtgcaggacgaggaatttaaggggtacagcacacagactgcccttacgctcaaacaaaagctggcaaagattggtggctatactaaaaaggtctgcgtaatgaccaaaattttttaccttagcccagagggaatgacgtcctgtcaatatgacctgcggagccaggttatctatcctgagtcttattacttcacccgaagaaagtacctgctgaaggccctgttcaaagctcttaaacggctaaaaagtcttcgcgatcaattctccttcgccgaaaacctctaccagattattggaattgactgcttccaaaaaaatgacaagaagatgttcaagtcctgccgacgactgacatag

SEQ ID NO: 107496 - DNA, 2383 bp, Artificial Sequence
  derived and/or modified sequence
tttgtaacttcacttcagcctcccattgatcgctttctgcaaccattcagactgatctcgggctcctatttcatttacattgtgtgcacaccaagtaaccagtgggaaaactttagagggtacttaaaccccagaaaattctgaaaccgggctcttgagccgctatcctcgggcctgctcccaccctgtggagtgcactttcgttttcaataaatctctgcttttgttgcttcattctttccttgctttgtttgtgtgtttgtccagttctttgttcaacacgccaagaacctggacactcttcactggtaacatattttggcaagccaaccaggagaaaagaatttctgcttggacactgcatagctgctgggaaaatgaacatcagtgttgatttggaaacgaattatgccgagttggttctagatgtgggaagagtcactcttggagagaacagtaggaaaaaaatgaaggattgtaaactgagaaaaaagcagaatgaaagtgtctcacgagctatgtgtgctctgctcaattctggagggggagtgatcaaggctgaaattgagaatgaagactatagttatacaaaagatggaataggactagatttggaaaattcttttagtaacattctgttatttgttcctgagtacttagacttcatgcagaatggtaactactttctgatttttgtgaagtcatggagcttgaacacctctggtctgcggattaccaccttgagctccaatttgtacaaaagagatataacatctgcaaaagtcatgaatgccactgctgcactggagttcctcaaagacatgaaaaagactagagggagattgtatttaagaccagaattgctggcaaagaggccctgtgttgatatacaagaagaaaataacatgaaggccttggccggggttttttttgatagaacagaacttgatcggaaagaaaaattgacctttactgaatccacacatgttgaaattaaaaacttctcgacagaaaagttgttacaacgaattaaagagattctccctcaatatgtttctgcatttgcaaatactgatggaggatatttgttcattggtttaaatgaagataaagaaataattggctttaaagcagagatgagtgacctcgatgacttagaaagagaaatcgaaaagtccattaggaagatgcctgtgcatcacttctgtatggagaagaagaagataaattattcatgcaaattccttggagtatatgataaaggaagtctttgtggatatgtctgtgcactcagagtggagcgcttctgctgtgcagtgtttgctaaagagcctgattcctggcatgtgaaagataaccgtgtgatgcagttgaccaggaaggaatggatccagttcatggtggaggctgaaccaaaattttccagttcatatgaagaggtgatctctcaaataaatacgtcattacctgctccccacagttggcctcttttggaatggcaacggcagagacatcactgtccagggctatcaggaaggataacgtatactccagaaaacctttgcagaaaactgttcttacaacatgaaggacttaagcaattaatatgtgaagaaatggactctgtcagaaagggctcactgatcttctctaggagctggtctgtggatctgggcttgcaagagaaccacaaagtcctctgtgatgctcttctgatttcccaggacagtcctccagtcctatacaccttccacatggtacaggatgaggagtttaaaggctattctacacaaactgccctaaccttaaagcagaagctggcaaaaattggtggttacactaaaaaagtgtgtgtcatgacaaagatcttctacttgagccctgaaggcatgacaagctgccagtatgatttaaggtcgcaagtaatttaccctgaatcctactattttacaagaaggaaatacttgctgaaagccctttttaaagccttaaagagactcaagtctctgagagaccagttttcctttgcagaaaatctataccagataatcggtatagattgctttcagaagaatgataaaaagatgtttaaatcttgtcgaaggctcacctgatggaaaatggactgggctactgagatatttttcattatatatttgataacattctctaattctgtgaaaatatttctttgaaaactttgcaagttaagcaacttaatgtgatgttggataattgggttttgtctattttcacttctccctaaataatcttcacagatattgtttgagggatattaggaaaattaatttgttaactcgtctgtgcacagtattatttactctgtctgtagttcctgaataaattttcttccatgcttgaa

SEQ ID NO: 107497 - DNA, 2539 bp, Artificial Sequence
  derived and/or modified sequence
gagggccggaaaacagaaaaggattcgcgttctttttactctgtggagagtgagcccgcggactgtagcctgggcctcgccaagttcctttgttctttgttttctttaaattaccttttttctttttgtcttaaaaaatacacatgggtgaaaaagaaacgagagctccctagagatcactcagagctgttttcgtgggtttttaacttccagttgctcaagggtccacgctggcatctggggtgtgctcgcacctgcgaagaatccagcttctagggagcaccgcgagctgttctttgttcaacacgccaagaacctggacactcttcactggtaacatattttggcaagccaaccaggagccatctctagaatgtcaaatggtctctcttcaactggaatgatgagaagtgaaacaaatatgcgaccatgaggacactgtaacctatggatggtgtgctgagactggaaacccaaaatgatgaaaagaatttctgcttggacactgcatagctgctgggaaaatgaacatcagtgttgatttggaaacgaattatgccgagttggttctagatgtgggaagagtcactcttggagagaacagtaggaaaaaaatgaaggattgtaaactgagaaaaaagcagaatgaaagtgtctcacgagctatgtgtgctctgctcaattctggagggggagtgatcaaggctgaaattgagaatgaagactatagttatacaaaagatggaataggactagatttggaaaattcttttagtaacattctgttatttgttcctgagtacttagacttcatgcagaatggtaactactttctgatttttgtgaagtcatggagcttgaacacctctggtctgcggattaccaccttgagctccaatttgtacaaaagagatataacatctgcaaaagtcatgaatgccactgctgcactggagttcctcaaagacatgaaaaagactagagggagattgtatttaagaccagaattgctggcaaagaggccctgtgttgatatacaagaagaaaataacatgaaggccttggccggggttttttttgatagaacagaacttgatcggaaagaaaaattgacctttactgaatccacacatgttgaaattaaaaacttctcgacagaaaagttgttacaacgaattaaagagattctccctcaatatgtttctgcatttgcaaatactgatggaggatatttgttcattggtttaaatgaagataaagaaataattggctttaaagcagagatgagtgacctcgatgacttagaaagagaaatcgaaaagtccattaggaagatgcctgtgcatcacttctgtatggagaagaagaagataaattattcatgcaaattccttggagtatatgataaaggaagtctttgtggatatgtctgtgcactcagagtggagcgcttctgctgtgcagtgtttgctaaagagcctgattcctggcatgtgaaagataaccgtgtgatgcagttgaccaggaaggaatggatccagttcatggtggaggctgaaccaaaattttccagttcatatgaagaggtgatctctcaaataaatacgtcattacctgctccccacagttggcctcttttggaatggcaacggcagagacatcactgtccagggctatcaggaaggataacgtatactccagaaaacctttgcagaaaactgttcttacaacatgaaggacttaagcaattaatatgtgaagaaatggactctgtcagaaagggctcactgatcttctctaggagctggtctgtggatctgggcttgcaagagaaccacaaagtcctctgtgatgctcttctgatttcccaggacagtcctccagtcctatacaccttccacatggtacaggatgaggagtttaaaggctattctacacaaactgccctaaccttaaagcagaagctggcaaaaattggtggttacactaaaaaagtgtgtgtcatgacaaagatcttctacttgagccctgaaggcatgacaagctgccagtatgatttaaggtcgcaagtaatttaccctgaatcctactattttacaagaaggaaatacttgctgaaagccctttttaaagccttaaagagactcaagtctctgagagaccagttttcctttgcagaaaatctataccagataatcggtatagattgctttcagaagaatgataaaaagatgtttaaatcttgtcgaaggctcacctgatggaaaatggactgggctactgagatatttttcattatatatttgataacattctctaattctgtgaaaatatttctttgaaaactttgcaagttaagcaacttaatgtgatgttggataattgggttttgtctattttcacttctccctaaataatcttcacagatattgtttgagggatattaggaaaattaatttgttaactcgtctgtgcacagtattatttactctgtctgtagttcctgaataaattttcttccatgcttgaactgggaaaa

SEQ ID NO: 107498 - DNA, 685 bp, Artificial Sequence
  derived and/or modified sequence
ctttttactctgtggagagtgagcccgcggactgtagcctgggcctcgccaagttcctttgttctttgttttctttaaattaccttttttctttttgtcttaaaaaatacacatgggtgaaaaagaaacgagagctccctagagatcactcagagctgttttcgtgggtttttaacttccagttgctcaagggtccacgctggcatctggggtgtgctcgcacctgcgaagaatccagcttctagggagcaccgcgagctgaaaagaatttctgcttggacactgcatagctgctgggaaaatgaacatcagtgttgatttggaaacgaattatgccgagttggttctagatgtgggaagagtcactcttggagagaacagtaggaaaaaaatgaaggattgtaaactgagaaaaaagcagaatgaaagtgtctcacgagctatgtgtgctctgctcaattctggagggggagtgatcaaggctgaaattgagaatgaagactatagttatacaaaagatggaataggactagatttggaaaattcttttagtaacattctgttatttgttcctgagtacttagacttcatgcagaatggtaactactttctgatttttgtgaagtcatggagcttgaacacctctggtctgcggattaccaccttgagctccaatttgtacaaa

SEQ ID NO: 107499 - DNA, 2294 bp, Artificial Sequence
  derived and/or modified sequence
gtggagagtgagcccgcggactgtagcctgggcctcgccaagttcctttgttctttgttttctttaaattaccttttttctttttgtcttaaaaaatacacatgggtgaaaaagaaacgagagctccctagagatcactcagagctgttttcgtgggtttttaacttccagttgctcaagggtccacgctggcatctggggtgtgctcgcacctgcgaagaatccagcttctagggagcaccgcgagctgaaaagaatttctgcttggacactgcatagctgctgggaaaatgaacatcagtgttgatttggaaacgaattatgccgagttggttctagatgtgggaagagtcactcttggagagaacagtaggaaaaaaatgaaggattgtaaactgagaaaaaagcagaatgaaagtgtctcacgagctatgtgtgctctgctcaattctggagggggagtgatcaaggctgaaattgagaatgaagactatagttatacaaaagatggaataggactagatttggaaaattcttttagtaacattctgttatttgttcctgagtacttagacttcatgcagaatggtaactactttctgatttttgtgaagtcatggagcttgaacacctctggtctgcggattaccaccttgagctccaatttgtacaaaagagatataacatctgcaaaagtcatgaatgccactgctgcactggagttcctcaaagacatgaaaaagactagagggagattgtatttaagaccagaattgctggcaaagaggccctgtgttgatatacaagaagaaaataacatgaaggccttggccggggttttttttgatagaacagaacttgatcggaaagaaaaattgacctttactgaatccacacatgttgaaattaaaaacttctcgacagaaaagttgttacaacgaattaaagagattctccctcaatatgtttctgcatttgcaaatactgatggaggatatttgttcattggtttaaatgaagataaagaaataattggctttaaagcagagatgagtgacctcgatgacttagaaagagaaatcgaaaagtccattaggaagatgcctgtgcatcacttctgtatggagaagaagaagataaattattcatgcaaattccttggagtatatgataaaggaagtctttgtggatatgtctgtgcactcagagtggagcgcttctgctgtgcagtgtttgctaaagagcctgattcctggcatgtgaaagataaccgtgtgatgcagttgaccaggaaggaatggatccagttcatggtggaggctgaaccaaaattttccagttcatatgaagaggtgatctctcaaataaatacgtcattacctgctccccacagttggcctcttttggaatggcaacggcagagacatcactgtccagggctatcaggaaggataacgtatactccagaaaacctttgcagaaaactgttcttacaacatgaaggacttaagcaattaatatgtgaagaaatggactctgtcagaaagggctcactgatcttctctaggagctggtctgtggatctgggcttgcaagagaaccacaaagtcctctgtgatgctcttctgatttcccaggacagtcctccagtcctatacaccttccacatggtacaggatgaggagtttaaaggctattctacacaaactgccctaaccttaaagcagaagctggcaaaaattggtggttacactaaaaaagtgtgtgtcatgacaaagatcttctacttgagccctgaaggcatgacaagctgccagtatgatttaaggtcgcaagtaatttaccctgaatcctactattttacaagaaggaaatacttgctgaaagccctttttaaagccttaaagagactcaagtctctgagagaccagttttcctttgcagaaaatctataccagataatcggtatagattgctttcagaagaatgataaaaagatgtttaaatcttgtcgaaggctcacctgatggaaaatggactgggctactgagatatttttcattatatatttgataacattctctaattctgtgaaaatatttctttgaaaactttgcaagttaagcaacttaatgtgatgttggataattgggttttgtctattttcacttctccctaaataatcttcacagatattgtttgagggatattaggaaaattaatttgttaactcgtctgtgcacagtattatttactctgtctgtagttcctgaataaattttcttccatgcttg

SEQ ID NO: 107500 - protein, 797 aa, Artificial Sequence
  derived and/or modified sequence
MVKQTIQIFARVKPPVRKHQQGIYSIDEDEKLIPSLEIILPRDLADGFVNNKRESYKFKFQRIFDQDANQETVFENIAKPVAGSVLAGYNGTIFAYGQTGSGKTFTITGGAERYSDRGIIPRTLSYIFEQLQKDSSKIYTTHISYLEIYNECGYDLLDPRHEASSLEDLPKVTILEDPDQNIHLKNLTLHQATTEEEALNLLFLGDTNRMIAETPMNQASTRSHCIFTIHLSSKEPGSATVRHAKLHLVDLAGSERVAKTGVGGHLLTEAKYINLSLHYLEQVIIALSEKHRSHIPYRNSMMTSVLRDSLGGNCMTTMIATLSLEKRNLDESISTCRFAQRVALIKNEAVLNEEINPRLVIKRLQKEIQELKDELAMVTGEQRTEALTEAELLQLEKLITSFLEDQDSDSRLEVGADMRKVHHCFHHLKKLLNDKKILENNTVSSESKDQDCQEPLKEEEYRKLRDILKQRDNEINILVNMLKKEKKKAQEALHLAGMDRREFRQSQSPPFRLGNPEEGQRMRLSSAPSQAQDFSILGKRSSLLHKKIGMREEMSLGCQEAFEIFKRDHADSVTIDDNKQILKQRFSEAKALGESINEARSKIGISENMAVPLMPDQQEEKLRSQLEEEKRRYKTMFTRLKALKVEIEHLQLLMDKAKVKLQKEFEVWWAEEATNLQVNSPAVNSLDHTKPFLQTSDSQHEWSQLLSNKSSGGWEVQDQGTGRFDVCDVNARKILPSPCPSPHSQKQSSTSTPLEDSIPKRPVSSIPLTGDSQTDSDIIAFIKARQSILQKQCLGSN

SEQ ID NO: 107501 - DNA, 2394 bp, Artificial Sequence
  derived and/or modified sequence
atggtcaaacaaactatccagatatttgcaagggtcaaaccgccggtgcgcaagcaccaacaggggatttattcaattgacgaagatgaaaaactaatcccatccttagagatcattcttccccgcgatctggccgatggattcgtgaacaataaacgcgaatcgtataagtttaaattccagagaatcttcgatcaagacgctaatcaagagacagtgttcgaaaacattgccaagcctgttgcaggctcagtgcttgctggctacaatggaaccatctttgcctacggtcagacaggatccggcaaaacatttactattaccggcggggccgaacgatacagcgatcgaggaattattcctcgcactctgtcctacatttttgaacagcttcagaaagatagttctaagatctacaccacccatatcagctacctggagatctataatgaatgcggctacgacctgctggatcctagacacgaggcaagctcgctggaagatctgccaaaggtgacaatattggaggatccagaccagaatattcacctgaaaaatctgacactgcaccaagcgacaactgaggaagaggccctcaacttattgtttttaggggacactaatcgtatgatcgctgaaactcccatgaatcaggccagtacccggagtcactgtatttttacgatccatctgtcaagcaaagagccaggcagtgccacggttaggcatgcaaaattgcacctggttgatcttgctggatctgagagagtggcaaaaacgggtgtggggggtcacctgctgactgaggcgaaatatatcaatctatcactgcactatttggagcaggtcatcattgcactgtctgagaaacaccgatcccacataccataccgcaattctatgatgacctcggtactgagggattcactgggcggcaattgcatgacaacgatgattgcaaccctgagtctggaaaagagaaacttagatgagtcaattagcacatgccgatttgcgcagcgggtggcgctgatcaagaacgaggccgtattgaacgaggaaattaatcctcgcttagtaatcaaacggctacagaaagagattcaagaactcaaggatgagttagctatggtcacaggtgaacagcgcaccgaagctctgactgaagctgagttactgcagctggagaaattaattacatcttttcttgaggaccaagacagtgactccagactggaggtgggcgcagacatgcggaaggtgcaccactgctttcatcacttaaaaaagcttcttaatgacaagaaaattctagagaataacacagtgtccagcgagagcaaggatcaagattgccaagaacctcttaaggaagaagagtaccgaaaacttcgagacattctgaagcagcgagacaatgaaatcaatattctggtaaatatgcttaaaaaagagaagaaaaaggcccaggaggccctgcatctcgcaggcatggacaggcgcgagttcagacaaagccagagccctcccttccgcctcggaaatcctgaggaggggcagcgaatgcggctttcttccgctccatcccaagcgcaggatttcagcattctcggtaagagaagttcactgctacacaaaaaaatcgggatgcgagaggaaatgagccttggatgtcaagaggcctttgaaattttcaaaagagatcacgccgatagcgtcaccattgacgataacaagcagatattgaagcagcggttcagcgaggccaaagctttaggggagagcattaacgaagcccggtctaaaattggcatttccgagaacatggccgtgcccctgatgcctgatcagcaagaagaaaagcttcgcagtcaactcgaggaggagaagcggcggtacaaaacaatgtttactcgcctcaaagccctgaaagtggagattgagcacctgcaattgttaatggataaagccaaggttaaactgcagaaagaattcgaggtttggtgggctgaagaggccactaacttacaggtgaatagtcccgcggtgaattccctggatcatactaagccttttcttcagacttctgattcacaacacgagtggtcccaactgctgtcaaataagtcttctggcggctgggaggtacaggatcagggaaccggacgattcgatgtgtgcgatgtgaatgcaaggaagattctgccatccccatgtccttcgccacactctcaaaaacagtcctccaccagtaccccactggaggactctattccaaagagacctgtctcctctatccccctgacaggagactctcagacagatagcgacatcatcgcgttcatcaaggcccggcaatcaatcctacagaaacagtgtttaggcagcaattag

SEQ ID NO: 107502 - DNA, 2488 bp, Artificial Sequence
  derived and/or modified sequence
gggtcattgcagagccagggaggagatggtgaagcagactatccagatattcgcgagggtgaagccccctgtccggaagcaccaacaagggatttattccatagatgaagatgaaaaattaatacctagcttggaaatcatcttaccacgtgatttggcagatgggtttgtgaataataagcgagaaagctacaaatttaaatttcaaagaatttttgatcaggatgcaaaccaagagaccgtttttgaaaacattgccaaaccagttgctgggagtgtcctggcaggttacaatggtaccatctttgcatatgggcaaacaggcagcgggaagacattcactatcacagggggtgcagagcgttacagtgacagaggcattatcccaaggacactgtcatacatttttgaacagttacaaaaggacagcagcaaaatatatacaacacacatttcctatttggaaatctacaatgaatgtggttatgatcttttggatccaagacatgaagcctccagtttggaagatttgccgaaagtgacaatactggaggatcctgatcagaacattcacctgaaaaacttgactctccatcaggcaaccacagaggaagaagctctgaatttgctttttttaggagacaccaaccgaatgattgcagagactcctatgaaccaagcttcaacccgttcccactgcattttcaccattcatttgtcaagcaaggaaccaggatctgcaactgtacgacatgccaaactccatctggttgacctggctggttcagagcgagttgcaaagactggagtagggggccatcttctaacagaggccaagtatatcaacttgtcactacattacttagaacaggttatcattgccctttcagaaaagcaccgttcgcacattccttatagaaactccatgatgaccagtgtcctaagagacagtttgggagggaactgcatgacaactatgattgcaacactctccttggagaaaaggaatcttgatgagtctatatcaacctgcagatttgcacagcgagtggcactcataaagaatgaagctgttcttaatgaagaaattaaccccagattagtgattaaacgcctacaaaaggaaatccaggaactgaaggatgaactggccatggtcactggggagcagaggacagaggcactcacagaagcagagctccttcagctggaaaaactaataacatcctttttggaagaccaggattcagacagtagattagaggttggcgcggatatgcgtaaagttcatcactgttttcatcatttaaagaaactattgaatgacaagaagatccttgaaaacaatacagtctcctctgaaagcaaagaccaagattgtcaagaaccattaaaagaagaagaatatagaaagctacgagatattctgaaacagagagataacgaaatcaatatcctggtcaacatgttaaaaaaagaaaagaagaaagctcaggaggctctccacttggctggcatggatagacgtgaattcagacagtcccagagcccacccttccgcctaggaaacccagaagaaggtcaaagaatgcgactatcctcagctccctcacaggcccaggacttcagcattttggggaaaagatccagtttgctccacaagaaaataggaatgagagaggaaatgtcattaggatgccaggaggcttttgaaatcttcaagagggaccacgctgacagcgttaccatcgatgacaacaaacagattctgaaacagagattttctgaagccaaggccctgggagaaagtataaatgaagcaagaagtaaaattggaatctcggaaaacatggccgtgcctctgatgccagaccagcaggaggagaagctgcgatcacaactggaggaagaaaagagaaggtataaaacaatgttcactcgcctgaaagccctgaaggtggagatcgagcacttgcagctgctcatggacaaagccaaggtgaagctacagaaagagtttgaagtctggtgggcagaggaggccaccaacctgcaggtaaattctccagcagtgaattcactcgatcacacgaagccatttctccagacatctgactcccagcatgaatggtcccaactcctctctaacaaaagttctggaggctgggaagtccaagatcaaggcactggcagattcgatgtctgtgatgtgaatgccaggaaaatcctgccctcgccttgccccagtccacacagccagaaacagagcagcaccagcaccccactggaagacagcatccccaagaggccagtgtcgtccatccctctcaccggagacagccagacggactcggacatcatcgccttcatcaaggccagacagagcattctgcagaagcaatgtttgggaagcaattgaatttccaggaaatatccatccatgaattatgccagcaagaatgaagcacagatgaaggcagcgcccctc

SEQ ID NO: 107503 - DNA, 2394 bp, Artificial Sequence
  derived and/or modified sequence
atggtgaagcagaccatccagatctttgcccgggtgaagccccctgtgaggaagcaccagcagggcatctacagcattgatgaagatgagaagctgatccccagcctggagatcatcctgccccgggacctggctgatggctttgtgaacaacaagcgggagagctacaagttcaagttccagaggatctttgaccaggatgccaaccaggagaccgtgtttgaaaatattgccaagcctgtggccggctctgtgctggccggctacaacggcaccatctttgcctacggccagacaggcagcggcaagaccttcaccatcaccggcggcgctgagcgctacagcgaccggggcatcatccccaggaccctgagctacatctttgagcagctgcagaaggacagcagcaagatctacaccacccacatctcctacctggagatctacaatgaatgtggctatgacctgctggaccccaggcatgaggccagcagcctggaggacctgcccaaggtgaccatcctggaggaccctgaccagaacatccacctgaagaacctgaccctgcaccaggccaccacagaggaggaggccctgaacctgctcttcctgggggacaccaacaggatgattgctgagacccccatgaaccaggccagcaccaggagccactgcatcttcaccatccacctgagcagcaaggagcccggcagcgccaccgtgagacatgccaagctgcacctggtggacctggccggcagcgagcgggtggccaagacaggagtgggcggccacctgctgacagaggccaagtacatcaacctgagcctgcactacctggagcaggtgatcatcgccctgtctgagaagcacaggagccacatcccctacagaaacagcatgatgacctctgtgctgcgggacagcctgggcggcaactgcatgaccaccatgattgccaccctgagcctggagaagaggaacctggatgagagcatcagcacctgccgctttgcccagagggtggccctgatcaagaatgaagctgtgctgaatgaggagatcaacccccggctggtgatcaagaggctgcagaaggagatccaggagctgaaggatgagctggccatggtgactggagagcagaggacagaggccctgacagaggccgagctgctgcagctggagaagctgatcaccagcttcctggaggaccaggacagcgacagccggctggaggtgggcgctgacatgaggaaggtgcaccactgcttccaccacctgaagaagctgctgaatgacaagaagatcctggagaacaacacagtgtcctctgagagcaaggaccaggactgccaggagcccctgaaggaggaggagtacaggaagctgcgggacatcctgaagcagagggacaatgagatcaacatcctggtgaacatgctgaagaaggagaagaagaaggcccaggaggccctgcacctggccggcatggaccggcgggagttccggcagagccagagcccccccttccggctgggcaaccctgaggagggccagaggatgaggctgagcagcgcccccagccaggcccaggacttcagcatcctgggcaagaggagcagcctgctgcacaagaagattggcatgagggaggagatgagcctgggctgccaggaggcctttgagatcttcaagagggaccacgccgacagcgtgaccattgatgacaacaagcagatcctgaagcagcgcttcagcgaggccaaggccctgggggagagcatcaatgaggcccggagcaagattggcatcagcgagaacatggctgtgcccctgatgccagaccagcaggaggagaagctgcggagccagctggaggaggagaagaggcgctacaagaccatgttcacccggctgaaggccctgaaggtggagattgagcacctgcagctgctgatggacaaggccaaggtgaagctgcagaaggagtttgaggtgtggtgggccgaggaggccaccaacctgcaggtgaacagccctgctgtgaacagcctggaccacaccaagcccttcctgcagaccagtgacagccagcacgagtggagccagctgctgagcaacaagagcagcggcggctgggaggtgcaggaccagggcaccggccgctttgatgtgtgtgatgtgaatgccaggaagatcctgcccagcccctgccccagcccccacagccagaagcagagcagcaccagcacccccctggaggacagcatccccaagaggcctgtgagcagcatccccctgactggagacagccagacagacagcgacatcatcgccttcatcaaggcccggcagagcatcctgcagaagcagtgcctgggcagcaactag

SEQ ID NO: 107504 - DNA, 2394 bp, Artificial Sequence
  derived and/or modified sequence
atggtgaagcagaccatccagatcttcgcccgggtgaagccccccgttcggaagcatcagcaaggaatctatagcatcgacgaggacgaaaagctgatcccatccctcgaaatcattttgcctcgcgacctcgccgatggattcgtaaacaataagcgcgagtcgtataaattcaagtttcaaagaatcttcgaccaagacgccaaccaggaaacagtcttcgaaaacattgctaagcccgtcgcagggagcgtactggccggttacaacggtaccatttttgcttatggccagacgggctccggaaagacttttacaattaccggcggggcggagaggtactcagaccgcggcattatcccgagaaccttgagctatatattcgagcagctccagaaagactcatcaaaaatatatacgacgcacatcagctacttagagatctataacgagtgtggttatgatctgctcgacccgcgtcacgaggctagttcccttgaagatctgcctaaagttacaattctggaagatcccgaccagaatatccaccttaaaaacttaaccctgcaccaggctacgacagaggaggaagctctgaatttgctcttcctgggcgacactaatcgcatgattgccgagactcccatgaatcaggcctcaactcggtctcactgcatctttactatccacctctcaagtaaggaacctggctcagcgacagtgaggcatgccaagctgcatttagttgatttagccggatccgaaagagtagccaagactggggtggggggccatctcctgactgaggctaagtatatcaacttaagtttgcattacctggaacaggtgattatcgccctgagcgagaagcacaggtctcatattccttaccgaaacagcatgatgactagtgtgcttcgagactcacttggtgggaactgcatgactacaatgatagccacgctttctctggaaaaaaggaatctggatgagtctattagcacttgtcgcttcgctcagagggttgctttaatcaagaacgaagccgtccttaacgaggagataaaccccagattggtaataaagcgcctgcagaaggaaatccaggagctcaaggatgaactggccatggtgactggcgagcaacgaacagaggcgctcaccgaagctgagctcctgcaactcgagaagctgataacctcctttctggaagatcaggattcagattctcggctagaggtaggagccgatatgaggaaagttcatcactgctttcatcatctgaagaagctgctgaacgacaagaaaattcttgagaataacacagttagctccgagagcaaggatcaagactgccaggaaccactgaaggaggaagagtaccggaagttgagagacatcttaaagcagagggacaacgaaatcaacatactggtgaatatgttgaaaaaagagaagaagaaggcacaggaagcattacatctcgctggaatggaccggagggagttcagacagtctcagtctcctccctttagactgggcaatcccgaggaaggacagcgcatgcgtctcagctctgccccctcccaggcacaggatttctctatactgggaaagaggtcgagccttctgcataagaagattgggatgagggaagaaatgtctctaggttgtcaggaggcctttgagatttttaagcgggaccatgcagattctgtcactatcgatgacaataagcaaattttgaaacagcgattttcagaagccaaagccttgggcgaatccattaatgaagcgagatccaagattggcattagcgaaaacatggccgtgcccttaatgcctgaccagcaagaggagaagctgcgttctcagcttgaggaagagaagagacgctataagacaatgttcacacgtctcaaggccctaaaggtggaaattgagcacctccagctgctgatggataaggcaaaggtgaaactccagaaagagttcgaagtgtggtgggcagaggaagccacgaatcttcaggtaaattctccggccgtaaattcgcttgaccacactaagccgttcctccagaccagtgattctcagcacgagtggagccagctgctgtctaacaaatcgtcgggagggtgggaggttcaggaccagggcactggtcggttcgatgtttgtgatgtgaacgcacgcaaaatcctgccctccccttgcccatccccgcacagccagaaacagtcgagcacttctacaccactggaagacagtatccctaagcgacctgtgagtagtatacccctgactggggacagtcagactgattctgatatcatagcttttatcaaagcaaggcagtcaattcttcagaaacagtgtctcggctcaaactag

SEQ ID NO: 107505 - DNA, 2394 bp, Artificial Sequence
  derived and/or modified sequence
atggtgaaacagactatacagatctttgcgagagtcaaaccacccgtacgaaagcaccagcaggggatttattccatcgatgaagacgagaaactcataccttctctggagattatcttgccgagggacctggccgatggatttgtaaacaataaaagggagtcgtacaaattcaagtttcagaggatattcgatcaggatgcgaatcaggagaccgtcttcgaaaacatagcaaagccagttgccggttccgttctggccggttacaacgggaccattttcgcctatgggcagaccggaagtggaaaaacttttactattaccggaggggctgagcgatactcagataggggtatcattcctagaactttaagctatatttttgaacaactccaaaaggatagttctaaaatctatacaacccacataagctacttggagatttataacgaatgcggctacgatctgttggaccctaggcatgaagcctcaagcctcgaggacctgcccaaggtgacgattttggaagaccccgatcagaatatccacttaaagaacttgaccctccaccaggcgactaccgaagaggaagctctcaacctgctcttcttaggagatacgaatcggatgatcgcagagactccgatgaaccaggcgtcaactaggtcacactgcatttttaccatccacctgtctagcaaagaaccgggatcagcaacagtgaggcacgctaaactacacctcgtggatctggctggcagcgagcgtgtggccaagacaggggtgggcggacacctcctgaccgaagctaagtacatcaacctgagcctgcactacctggaacaagtgatcattgccttgagcgaaaaacatcgctcccacattccgtatcgaaattcaatgatgacttctgtcctaagagatagcctcggaggaaattgtatgactacgatgattgccacactctccttagagaaacgtaatttagatgaaagcatatcgacgtgcaggttcgcccagcgggtggcgctgataaagaacgaagcggtcttaaatgaggagatcaaccctcgactggtgatcaaacgcctgcagaaggagatacaagaactcaaggatgagcttgccatggtcaccggcgaacaacgcacagaggcacttaccgaggcagagctcttgcagctcgagaaactaatcacctcttttctggaagaccaggacagcgattcacgattggaggtgggggcagacatgcgaaaagtgcatcactgtttccatcacctgaagaaattgctcaacgataagaagatcctcgagaacaacacagtgtccagcgagtccaaggaccaggactgtcaggagccgcttaaggaggaagagtaccggaagctgagggacatcctgaaacagagggataatgaaattaacattctggtgaacatgctaaaaaaagagaaaaaaaaagctcaggaggccctgcatctggccggaatggacaggagagagtttcgccagtcccagtccccgccttttcgacttggcaaccccgaggaaggccagcggatgcggctgagcagcgcgccatctcaggcgcaggacttctcgattctcggcaagaggagttctctgctgcacaagaagattggtatgcgagaggaaatgagcctgggttgtcaggaagcttttgaaattttcaaaagagaccatgcggattctgtcacaattgacgataataagcagattctgaaacagcgcttttccgaggccaaggcactcggagaatcaattaacgaagcgaggtctaagatcggcatatctgaaaatatggccgtccccctgatgcctgatcagcaggaggagaaacttcgatcccagctggaagaggagaaacggcgttataaaaccatgtttacacgtctgaaggctctcaaagtcgagatcgagcacctccagctgcttatggataaggcaaaggtgaaactccagaaggagtttgaagtctggtgggcggaggaggctacgaacctccaggtgaactccccagccgtgaatagcttagaccacactaagccatttctgcagacaagcgacagccaacacgaatggtctcagctgctgagcaataaatcaagcggcggttgggaagtgcaggatcagggcaccggacgcttcgatgtgtgtgacgttaacgcgagaaaaatacttccctcaccttgtccatcccctcacagccaaaagcagtcaagcacctcgacacccttagaagactccatccctaaaaggccggtctcttccattcccttgaccggggacagtcagaccgactcggacatcatagcattcatcaaggccaggcagtcaatactgcaaaaacagtgcttgggctcaaactag

SEQ ID NO: 107506 - DNA, 2394 bp, Artificial Sequence
  derived and/or modified sequence
atggtgaagcagaccatccagatcttcgccagagtgaagccccccgtgagaaagcaccagcagggcatctacagcatcgacgaggacgagaagctgatccccagcctggagatcatcctgcccagagacctggccgacggcttcgtgaacaacaagagagagagctacaagttcaagttccagagaatcttcgaccaggacgccaaccaggagaccgtgttcgagaacatcgccaagcccgtggccggcagcgtgctggccggctacaacggcaccatcttcgcctacggccagaccggcagcggcaagaccttcaccatcaccggcggcgccgagagatacagcgacagaggcatcatccccagaaccctgagctacatcttcgagcagctgcagaaggacagcagcaagatctacaccacccacatcagctacctggagatctacaacgagtgcggctacgacctgctggaccccagacacgaggccagcagcctggaggacctgcccaaggtgaccatcctggaggaccccgaccagaacatccacctgaagaacctgaccctgcaccaggccaccaccgaggaggaggccctgaacctgctgttcctgggcgacaccaacagaatgatcgccgagacccccatgaaccaggccagcaccagaagccactgcatcttcaccatccacctgagcagcaaggagcccggcagcgccaccgtgagacacgccaagctgcacctggtggacctggccggcagcgagagagtggccaagaccggcgtgggcggccacctgctgaccgaggccaagtacatcaacctgagcctgcactacctggagcaggtgatcatcgccctgagcgagaagcacagaagccacatcccctacagaaacagcatgatgaccagcgtgctgagagacagcctgggcggcaactgcatgaccaccatgatcgccaccctgagcctggagaagagaaacctggacgagagcatcagcacctgcagattcgcccagagagtggccctgatcaagaacgaggccgtgctgaacgaggagatcaaccccagactggtgatcaagagactgcagaaggagatccaggagctgaaggacgagctggccatggtgaccggcgagcagagaaccgaggccctgaccgaggccgagctgctgcagctggagaagctgatcaccagcttcctggaggaccaggacagcgacagcagactggaggtgggcgccgacatgagaaaggtgcaccactgcttccaccacctgaagaagctgctgaacgacaagaagatcctggagaacaacaccgtgagcagcgagagcaaggaccaggactgccaggagcccctgaaggaggaggagtacagaaagctgagagacatcctgaagcagagagacaacgagatcaacatcctggtgaacatgctgaagaaggagaagaagaaggcccaggaggccctgcacctggccggcatggacagaagagagttcagacagagccagagcccccccttcagactgggcaaccccgaggagggccagagaatgagactgagcagcgcccccagccaggcccaggacttcagcatcctgggcaagagaagcagcctgctgcacaagaagatcggcatgagagaggagatgagcctgggctgccaggaggccttcgagatcttcaagagagaccacgccgacagcgtgaccatcgacgacaacaagcagatcctgaagcagagattcagcgaggccaaggccctgggcgagagcatcaacgaggccagaagcaagatcggcatcagcgagaacatggccgtgcccctgatgcccgaccagcaggaggagaagctgagaagccagctggaggaggagaagagaagatacaagaccatgttcaccagactgaaggccctgaaggtggagatcgagcacctgcagctgctgatggacaaggccaaggtgaagctgcagaaggagttcgaggtgtggtgggccgaggaggccaccaacctgcaggtgaacagccccgccgtgaacagcctggaccacaccaagcccttcctgcagaccagcgacagccagcacgagtggagccagctgctgagcaacaagagcagcggcggctgggaggtgcaggaccagggcaccggcagattcgacgtgtgcgacgtgaacgccagaaagatcctgcccagcccctgccccagcccccacagccagaagcagagcagcaccagcacccccctggaggacagcatccccaagagacccgtgagcagcatccccctgaccggcgacagccagaccgacagcgacatcatcgccttcatcaaggccagacagagcatcctgcagaagcagtgcctgggcagcaactag

SEQ ID NO: 107507 - protein, 758 aa, Artificial Sequence
  derived and/or modified sequence
MVKQTIQIFARVKPPVRKHQQGIYSIDEDEKLIPSLEIILPRDLADGFVNNKRESYKFKFQRIFDQDANQETVFENIAKPVAGSVLAGYNGTIFAYGQTGSGKTFTITGGAERYSDRGIIPRTLSYIFEQLQKDSSKIYTTHISYLEIYNECGYDLLDPRHEASSLEDLPKVTILEDPDQNIHLKNLTLHQATTEEEALNLLFLGDTNRMIAETPMNQASTRSHCIFTIHLSSKEPGSATVRHAKLHLVDLAGSERVAKTGVGGHLLTEAKYINLSLHYLEQVIIALSEKHRSHIPYRNSMMTSVLRDSLGGNCMTTMIATLSLEKRNLDESISTCRFAQRVALIKNEAVLNEEINPRLVIKRLQKEIQELKDELAMVTGEQRTEALTEAELLQLEKLITSFLEDQDSDSRLEVGADMRKVHHCFHHLKKLLNDKKILENNTVSSESKDQDCQEPLKEEEYRKLRDILKQRDNEISILSEVMKKLPLSWFERGMREEMSLGCQEAFEIFKRDHADSVTIDDNKQILKQRFSEAKALGESINEARSKIGHLKEEITQRHIQQVALGISENMAVPLMPDQQEEKLRSQLEEEKRRYKTMFTRLKALKVEIEHLQLLMDKAKVKLQKEFEVWWAEEATNLQVNSPAVNSLDHTKPFLQTSDSQHEWSQLLSNKSSGGWEVQDQGTGRFDVCDVNARKILPSPCPSPHSQKQSSTSTPLEDSIPKRPVSSIPLTGDSQTDSDIIAFIKARQSILQKQCLGSN

SEQ ID NO: 107508 - DNA, 2277 bp, Artificial Sequence
  derived and/or modified sequence
atggtgaagcagactattcaaatttttgctagggtaaaaccccctgtgcgtaagcaccaacaaggcatttactccatcgacgaagacgagaagctcatcccaagtctcgaaattatcctcccaagagacctcgcagacggcttcgtaaataacaagcgagaatcctataagtttaagttccagaggatatttgaccaagatgccaaccaggaaactgtgttcgaaaatatcgctaagcccgtggccggatcggtgttagcaggttacaatggaacaatcttcgcctacgggcagaccggtagtggaaagacttttacgattaccggcggtgctgaacggtattccgatcggggaatcatcccacgcaccctgagttatatctttgagcaactccagaaagacagcagcaagatctacaccacccacatttcatatcttgaaatctataacgaatgtggctacgatctgcttgatcccaggcacgaagctagcagtctggaggatctgcccaaggtcaccatcctcgaggatccagaccagaatatccacctgaagaatctgactctgcaccaggccacgaccgaggaagaagctttaaacctgctgttcctaggtgatacaaatagaatgatcgcagagactcctatgaaccaggcatccactcggtcccactgtatttttacaatacatctgtcttccaaggagcccgggtcagcaacagtcagacatgccaaattacacttggtggacctggctgggtcagagcgcgttgcgaagaccggagtgggcggtcacttgctcaccgaggccaagtatataaacctctccctccactacctggagcaggtaataattgctctgtctgagaaacaccgaagccacattccttataggaacagcatgatgaccagcgttctacgcgattcacttggtggcaattgtatgaccacaatgatcgccacgctgagcctggagaaaagaaacctcgatgaatctatcagcacctgtcgcttcgcccagcgcgtggctttgattaaaaacgaggcagtgctgaatgaagagatcaaccctaggctcgttataaaacggctacagaaagagattcaagaactaaaagacgaattggccatggtgactggcgaacagagaacagaagctttgacagaagccgaactcctccagctggagaaactgattaccagctttctggaggaccaggatagcgacagtagactcgaagtgggcgcagacatgcgaaaggtccaccattgcttccaccacttgaaaaagttgttgaatgacaagaagatcttggaaaataacaccgtgtcatctgagtcgaaagatcaggactgtcaggagccactaaaagaggaagaatacagaaaactgcgtgacatactgaagcagagagataatgaaattagcattcttagcgaggtgatgaaaaagctcccactctcctggttcgaacgcgggatgcgcgaagaaatgagcctgggctgccaggaagccttcgagatctttaaaagggaccacgccgattcggtgaccattgacgacaacaagcagatcctgaagcagagattctcagaggctaaagctttgggggaatctatcaacgaagctcgtagcaagatcggccacctcaaagaggagattactcagaggcatattcaacaggtggcgctgggtatcagtgagaatatggcggttcctctaatgcccgatcagcaagaggagaagctgcgctcccagctggaggaggaaaagcgaaggtataaaaccatgttcacccggctaaaggctctcaaagttgaaatagagcacctccaattgttgatggataaggccaaagttaagctgcagaaggagttcgaggtgtggtgggctgaggaggctaccaacctccaggttaactcacccgcggttaattccttagatcacactaagccctttttacagaccagtgatagtcagcacgagtggagccagcttctttccaataaatcatcaggtgggtgggaggtgcaggatcagggcaccggccgcttcgatgtttgtgatgtcaacgctcgaaagatccttccttccccttgcccttcaccccactcccaaaagcagtcttcgacttccacgccactggaagatagtatccccaaaagaccggtcagcagtatccctttgaccggagattcccagactgacagcgacatcatagccttcatcaaggcacgacagtccattttacagaaacagtgcctcggcagtaattag

SEQ ID NO: 107509 - DNA, 2361 bp, Artificial Sequence
  derived and/or modified sequence
gggtcattgcagagccagggaggagatggtgaagcagactatccagatattcgcgagggtgaagccccctgtccggaagcaccaacaagggatttattccatagatgaagatgaaaaattaatacctagcttggaaatcatcttaccacgtgatttggcagatgggtttgtgaataataagcgagaaagctacaaatttaaatttcaaagaatttttgatcaggatgcaaaccaagagaccgtttttgaaaacattgccaaaccagttgctgggagtgtcctggcaggttacaatggtaccatctttgcatatgggcaaacaggcagcgggaagacattcactatcacagggggtgcagagcgttacagtgacagaggcattatcccaaggacactgtcatacatttttgaacagttacaaaaggacagcagcaaaatatatacaacacacatttcctatttggaaatctacaatgaatgtggttatgatcttttggatccaagacatgaagcctccagtttggaagatttgccgaaagtgacaatactggaggatcctgatcagaacattcacctgaaaaacttgactctccatcaggcaaccacagaggaagaagctctgaatttgctttttttaggagacaccaaccgaatgattgcagagactcctatgaaccaagcttcaacccgttcccactgcattttcaccattcatttgtcaagcaaggaaccaggatctgcaactgtacgacatgccaaactccatctggttgacctggctggttcagagcgagttgcaaagactggagtagggggccatcttctaacagaggccaagtatatcaacttgtcactacattacttagaacaggttatcattgccctttcagaaaagcaccgttcgcacattccttatagaaactccatgatgaccagtgtcctaagagacagtttgggagggaactgcatgacaactatgattgcaacactctccttggagaaaaggaatcttgatgagtctatatcaacctgcagatttgcacagcgagtggcactcataaagaatgaagctgttcttaatgaagaaattaaccccagattagtgattaaacgcctacaaaaggaaatccaggaactgaaggatgaactggccatggtcactggggagcagaggacagaggcactcacagaagcagagctccttcagctggaaaaactaataacatcctttttggaagaccaggattcagacagtagattagaggttggcgcggatatgcgtaaagttcatcactgttttcatcatttaaagaaactattgaatgacaagaagatccttgaaaacaatacagtctcctctgaaagcaaagaccaagattgtcaagaaccattaaaagaagaagaatatagaaagctacgagatattctgaaacagagagataacgaaatcagtatcctttctgaagtgatgaagaaacttcctctatcctggtttgaaaggggaatgagagaggaaatgtcattaggatgccaggaggcttttgaaatcttcaagagggaccacgctgacagcgttaccatcgatgacaacaaacagattctgaaacagagattttctgaagccaaggccctgggagaaagtataaatgaagcaagaagtaaaattggtcacctgaaggaagaaatcacccagcggcatatacagcaagtagccctaggaatctcggaaaacatggccgtgcctctgatgccagaccagcaggaggagaagctgcgatcacaactggaggaagaaaagagaaggtataaaacaatgttcactcgcctgaaagccctgaaggtggagatcgagcacttgcagctgctcatggacaaagccaaggtgaagctacagaaagagtttgaagtctggtgggcagaggaggccaccaacctgcaggtaaattctccagcagtgaattcactcgatcacacgaagccatttctccagacatctgactcccagcatgaatggtcccaactcctctctaacaaaagttctggaggctgggaagtccaagatcaaggcactggcagattcgatgtctgtgatgtgaatgccaggaaaatcctgccctcgccttgccccagtccacacagccagaaacagagcagcaccagcaccccactggaagacagcatccccaagaggccagtgtcgtccatccctctcaccggagacagccagacggactcggacatcatcgccttcatcaaggccagacagagcattctgcagaagcaatgtttgggaagcaattgaatttccaggaaatatccatccatgaattatgccagcaagaatgaagcacagatgaaggc

SEQ ID NO: 107510 - DNA, 2277 bp, Artificial Sequence
  derived and/or modified sequence
atggtgaagcagaccatccagatctttgcccgggtgaagccccctgtgaggaagcaccagcagggcatctacagcattgatgaagatgagaagctgatccccagcctggagatcatcctgccccgggacctggctgatggctttgtgaacaacaagcgggagagctacaagttcaagttccagaggatctttgaccaggatgccaaccaggagaccgtgtttgaaaatattgccaagcctgtggccggctctgtgctggccggctacaacggcaccatctttgcctacggccagacaggcagcggcaagaccttcaccatcaccggcggcgctgagcgctacagcgaccggggcatcatccccaggaccctgagctacatctttgagcagctgcagaaggacagcagcaagatctacaccacccacatctcctacctggagatctacaatgaatgtggctatgacctgctggaccccaggcatgaggccagcagcctggaggacctgcccaaggtgaccatcctggaggaccctgaccagaacatccacctgaagaacctgaccctgcaccaggccaccacagaggaggaggccctgaacctgctcttcctgggggacaccaacaggatgattgctgagacccccatgaaccaggccagcaccaggagccactgcatcttcaccatccacctgagcagcaaggagcccggcagcgccaccgtgagacatgccaagctgcacctggtggacctggccggcagcgagcgggtggccaagacaggagtgggcggccacctgctgacagaggccaagtacatcaacctgagcctgcactacctggagcaggtgatcatcgccctgtctgagaagcacaggagccacatcccctacagaaacagcatgatgacctctgtgctgcgggacagcctgggcggcaactgcatgaccaccatgattgccaccctgagcctggagaagaggaacctggatgagagcatcagcacctgccgctttgcccagagggtggccctgatcaagaatgaagctgtgctgaatgaggagatcaacccccggctggtgatcaagaggctgcagaaggagatccaggagctgaaggatgagctggccatggtgactggagagcagaggacagaggccctgacagaggccgagctgctgcagctggagaagctgatcaccagcttcctggaggaccaggacagcgacagccggctggaggtgggcgctgacatgaggaaggtgcaccactgcttccaccacctgaagaagctgctgaatgacaagaagatcctggagaacaacacagtgtcctctgagagcaaggaccaggactgccaggagcccctgaaggaggaggagtacaggaagctgcgggacatcctgaagcagagggacaatgagatcagcatcctgtctgaggtgatgaagaagctgcccctgtcctggtttgagcggggcatgagggaggagatgagcctgggctgccaggaggcctttgagatcttcaagagggaccacgccgacagcgtgaccattgatgacaacaagcagatcctgaagcagcgcttcagcgaggccaaggccctgggggagagcatcaatgaggcccggagcaagattggccacctgaaggaggagatcacccagaggcacatccagcaggtggccctgggcatcagcgagaacatggctgtgcccctgatgccagaccagcaggaggagaagctgcggagccagctggaggaggagaagaggcgctacaagaccatgttcacccggctgaaggccctgaaggtggagattgagcacctgcagctgctgatggacaaggccaaggtgaagctgcagaaggagtttgaggtgtggtgggccgaggaggccaccaacctgcaggtgaacagccctgctgtgaacagcctggaccacaccaagcccttcctgcagaccagtgacagccagcacgagtggagccagctgctgagcaacaagagcagcggcggctgggaggtgcaggaccagggcaccggccgctttgatgtgtgtgatgtgaatgccaggaagatcctgcccagcccctgccccagcccccacagccagaagcagagcagcaccagcacccccctggaggacagcatccccaagaggcctgtgagcagcatccccctgaccggggacagccagacagacagcgacatcatcgccttcatcaaggcccggcagagcatcctgcagaagcagtgcctgggcagcaactag

SEQ ID NO: 107511 - DNA, 2277 bp, Artificial Sequence
  derived and/or modified sequence
atggtgaagcagaccatccagatcttcgcccgggtgaagccccccgtcaggaagcaccaacagggaatttattcgatagacgaggacgaaaagttaatcccctcactggagattatcttaccccgagacctcgccgatggatttgtaaacaacaagcgggagagttacaagttcaagttccagcggatcttcgatcaagatgcaaatcaggaaaccgtgtttgaaaatatcgccaaacccgtggcggggtcggtgcttgcagggtacaatggcacaatcttcgcgtacggtcaaaccggcagcggcaagacattcacaataaccggcggggcagagaggtactccgatcgaggaataattccgagaaccctgtcttacattttcgaacagctacagaaagacagttctaagatctatactacccacattagctatctggagatctacaatgagtgcgggtatgatctgctggatcctaggcatgaggctagcagtctcgaggacttgcccaaggtaaccattctggaagatcccgatcagaatattcacttaaagaatctgacattgcatcaggctacgaccgaggaagaggccttaaaccttctctttctgggggatactaacaggatgattgccgaaaccccgatgaaccaggccagcactcgctcccattgcatctttaccattcatctgtcgtctaaagagccgggctcagccaccgtcagacacgccaagttacatctggttgatctagctggcagcgagagggtcgccaagacaggtgtcggaggccacctgctgacagaagctaaatatatcaatctgtccctccactacctggagcaggtcataattgcccttagtgaaaaacatcggtcacacatcccctatcgcaacagcatgatgacttcggtgctccgagattctttgggcggtaactgtatgacaacaatgatagccaccttatccctggagaaacgaaatctggacgagagcatctcaacttgcagattcgcacaaagggtcgccctgatcaagaatgaagcagttctcaatgaagaaattaatccacggctggtaatcaaacgtctacaaaaggaaattcaggagctaaaagacgagttggccatggtaaccggtgaacagcgcaccgaagctctcaccgaggccgaactgctgcagcttgagaagctaattacgagctttcttgaagatcaggactctgattcaagactggaggtgggtgctgatatgcgcaaggtgcaccactgctttcatcacctcaagaagctgcttaacgacaagaagatcctcgagaacaataccgtttcttcggaaagcaaagaccaggactgccaagagccactcaaggaagaggagtatcgaaagctcagagatatcctgaagcagagggataatgagatatcaattctctcggaagtgatgaagaagttgccactgagttggtttgagaggggaatgcgcgaggaaatgtctctcggctgtcaggaagccttcgagatcttcaaaagagaccacgcggactcagtgactattgacgataacaagcagattctgaaacagagattttctgaagccaaagccttaggcgagagtattaacgaagcaagatctaagatcgggcacttgaaagaagaaataacacaaaggcacatccagcaggtggcccttggcatctccgagaacatggcggttccattgatgccagaccagcaggaggagaagctccggtcgcagctggaggaggaaaaaagacgttacaagactatgtttacacggttaaaggcattgaaggttgagattgaacacctgcaactgcttatggacaaagctaaagtgaagctccaaaaggagttcgaggtctggtgggcagaagaggctaccaatctgcaggtgaactctcctgcagtgaactctttggaccataccaagccattcctgcagaccagcgacagccagcatgagtggtcacagcttttaagtaataaatcaagcggaggctgggaggtccaggatcaaggcacggggcggtttgatgtttgcgatgtgaatgcgcgcaaaatccttccctccccttgcccctctccccactctcaaaaacagagtagcacctccacacctctggaggatagtattcctaaacgacctgtgagttccattccgctcactggcgattctcagactgatagtgacatcattgcttttatcaaggcccggcaaagcattcttcagaaacagtgtctgggaagcaattag

SEQ ID NO: 107512 - DNA, 2277 bp, Artificial Sequence
  derived and/or modified sequence
atggtgaaacagaccattcagatctttgccagggtcaagccacccgtgaggaaacatcagcagggaatatatagtatagacgaagacgaaaaattgattccatctttagaaatcatccttcccagggacttggctgacgggtttgttaacaataaaagggaatcatacaaattcaagtttcagcgcattttcgaccaagacgcgaaccaagaaaccgtgtttgagaacattgcaaagcctgtggcgggttctgtgcttgctggatataatggaaccattttcgcatatggtcagactgggagtggtaaaacttttactataactggcggtgctgagagatacagtgatagaggcatcattccgcgtaccctgtcatatattttcgaacagctgcagaaggattcatcgaagatctacaccacccacatttcttatctcgagatctacaacgaatgtggatatgatctgctggatccccgtcatgaggccagctcattggaagacctgcctaaagtgacgatattggaggaccctgatcagaacattcacctgaagaatctgacattgcatcaagccacaactgaggaggaggcgctcaacctgctcttcctgggtgatactaaccggatgatcgcagagactcccatgaatcaggcatccacacgaagccactgcatcttcaccatccatttaagcagtaaggagccgggttccgccacggtgaggcacgctaagttacacctggtagatctagctgggtccgagagggtggccaagactggggtaggcggacatctccttactgaggccaagtatatcaacttgtcactgcactacctcgagcaagtgattatcgctttaagtgagaagcacaggagtcacattccatacagaaactccatgatgacctcagtgttgcgagactcactcggagggaattgcatgaccaccatgatcgctaccctgtccctggaaaagaggaatctggacgagagcatcagcacttgtcgattcgcccaaagagtagcgctgattaagaacgaggccgtgcttaatgaagaaattaatccgaggcttgtcataaaaaggctgcaaaaagaaatccaggagctgaaagacgagctcgcaatggtgactggcgagcaacggacggaagccctgaccgaagctgagctgctgcagcttgagaagctgattacctcctttctggaggatcaggatagcgatagtcggctggaggttggggctgatatgcgtaaagtccaccattgttttcaccacttgaaaaagcttttaaacgataagaagatcctggaaaacaacaccgtaagttccgagtccaaggaccaggactgccaagagcctctgaaggaggaagagtaccgaaagctccgcgatatcctgaaacagcgtgacaatgaaatctcgatcctgagcgaagtcatgaagaagctgccactgagttggttcgaaagaggtatgagagaggagatgtctctggggtgccaagaagccttcgagatttttaagcgggaccatgctgatagcgtgacaatagatgacaataaacagatccttaagcagcgcttctcggaagcaaaagccttaggggagtctattaatgaggccagaagcaagatcggacacctgaaggaggagatcacccaacgacatatacagcaagtcgctctgggcatatccgagaacatggccgtgcccttgatgcccgaccaacaggaggagaaacttcgctcccagttggaagaggaaaagagaaggtacaaaacgatgtttacacggcttaaagcactcaaggttgaaatcgagcaccttcagttgttaatggacaaagccaaggtgaaacttcaaaaggagtttgaggtgtggtgggccgaggaggctacaaatctgcaggtaaatagccccgctgtgaactcactcgatcacaccaagccctttctccaaacatccgattcccaacatgagtggagccagcttctgtcaaacaagagttcaggcggatgggaggtccaggaccaaggcaccgggagattcgacgtgtgtgacgtgaacgcgagaaaaatcctccctagcccgtgcccctcaccacatagccaaaagcagtccagcacttctacccccctggaggactccatcccgaaacgcccagtcagttccattccactgacaggagactcacagacagacagcgatatcattgcttttataaaggccagacagtcgatcctgcagaaacagtgcctgggttctaactag

SEQ ID NO: 107513 - DNA, 2277 bp, Artificial Sequence
  derived and/or modified sequence
atggtgaagcagaccatccagatcttcgccagagtgaagccccccgtgagaaagcaccagcagggcatctacagcatcgacgaggacgagaagctgatccccagcctggagatcatcctgcccagagacctggccgacggcttcgtgaacaacaagagagagagctacaagttcaagttccagagaatcttcgaccaggacgccaaccaggagaccgtgttcgagaacatcgccaagcccgtggccggcagcgtgctggccggctacaacggcaccatcttcgcctacggccagaccggcagcggcaagaccttcaccatcaccggcggcgccgagagatacagcgacagaggcatcatccccagaaccctgagctacatcttcgagcagctgcagaaggacagcagcaagatctacaccacccacatcagctacctggagatctacaacgagtgcggctacgacctgctggaccccagacacgaggccagcagcctggaggacctgcccaaggtgaccatcctggaggaccccgaccagaacatccacctgaagaacctgaccctgcaccaggccaccaccgaggaggaggccctgaacctgctgttcctgggcgacaccaacagaatgatcgccgagacccccatgaaccaggccagcaccagaagccactgcatcttcaccatccacctgagcagcaaggagcccggcagcgccaccgtgagacacgccaagctgcacctggtggacctggccggcagcgagagagtggccaagaccggcgtgggcggccacctgctgaccgaggccaagtacatcaacctgagcctgcactacctggagcaggtgatcatcgccctgagcgagaagcacagaagccacatcccctacagaaacagcatgatgaccagcgtgctgagagacagcctgggcggcaactgcatgaccaccatgatcgccaccctgagcctggagaagagaaacctggacgagagcatcagcacctgcagattcgcccagagagtggccctgatcaagaacgaggccgtgctgaacgaggagatcaaccccagactggtgatcaagagactgcagaaggagatccaggagctgaaggacgagctggccatggtgaccggcgagcagagaaccgaggccctgaccgaggccgagctgctgcagctggagaagctgatcaccagcttcctggaggaccaggacagcgacagcagactggaggtgggcgccgacatgagaaaggtgcaccactgcttccaccacctgaagaagctgctgaacgacaagaagatcctggagaacaacaccgtgagcagcgagagcaaggaccaggactgccaggagcccctgaaggaggaggagtacagaaagctgagagacatcctgaagcagagagacaacgagatcagcatcctgagcgaggtgatgaagaagctgcccctgagctggttcgagagaggcatgagagaggagatgagcctgggctgccaggaggccttcgagatcttcaagagagaccacgccgacagcgtgaccatcgacgacaacaagcagatcctgaagcagagattcagcgaggccaaggccctgggcgagagcatcaacgaggccagaagcaagatcggccacctgaaggaggagatcacccagagacacatccagcaggtggccctgggcatcagcgagaacatggccgtgcccctgatgcccgaccagcaggaggagaagctgagaagccagctggaggaggagaagagaagatacaagaccatgttcaccagactgaaggccctgaaggtggagatcgagcacctgcagctgctgatggacaaggccaaggtgaagctgcagaaggagttcgaggtgtggtgggccgaggaggccaccaacctgcaggtgaacagccccgccgtgaacagcctggaccacaccaagcccttcctgcagaccagcgacagccagcacgagtggagccagctgctgagcaacaagagcagcggcggctgggaggtgcaggaccagggcaccggcagattcgacgtgtgcgacgtgaacgccagaaagatcctgcccagcccctgccccagcccccacagccagaagcagagcagcaccagcacccccctggaggacagcatccccaagagacccgtgagcagcatccccctgaccggcgacagccagaccgacagcgacatcatcgccttcatcaaggccagacagagcatcctgcagaagcagtgcctgggcagcaactag

SEQ ID NO: 107514 - DNA, 798 bp, Artificial Sequence
  derived and/or modified sequence
atgagggaggagatgtccctagggtgtcaggaggcattcgagatattcaagcgggaccacgctgatagcgtaaccattgatgacaacaagcagatcctgaagcaaaggttctccgaggccaaagcactgggagagtctatcaatgaagcgcgttctaagatcggccatttaaaggaggaaataacccaacgtcacatacagcaggtcgccctgggtatctcggaaaatatggccgtccccctgatgcctgaccagcaggaggaaaaacttagatcccaactagaagaggaaaagcggcgctacaaaactatgtttacaaggctgaaggccttgaaggtcgagattgaacaccttcagctgttgatggacaaagctaaggttaaacttcagaaggagtttgaggtgtggtgggccgaggaagcgaccaacttacaagttaacagtcctgcagtgaatagtctggaccataccaagccatttctacagacaagcgattctcagcacgagtggtctcagcttctgagcaataagtccagcggcggatgggaggtgcaagaccagggtacaggacgtttcgatgtttgtgatgtgaatgcacgaaagatcttgcctagtccttgcccgtccccccatagccagaagcagtcctccacctctacgcccttagaggattctatccctaaacggcccgttagcagtattcctttgacaggggattctcaaacagattctgatatcatcgcctttatcaaggctagacagagcatcctgcagaagcaatgcctgggttccaactag

SEQ ID NO: 107515 - DNA, 747 bp, Artificial Sequence
  derived and/or modified sequence
atgagagaggaaatgagcctcggctgtcaggaggccttcgagatctttaagagggatcatgccgactcggttaccatcgacgataataagcaaattttgaagcaaagattctcagaagctaaagccctgggggaatctatcaacgaggcacggagtaagatcggccatcttaaggaagaaataacacagcgtcacatacagcaggtggccctcggaatttccgagaacatggctgtcccccttatgcctgatcagcaggaagagaaactgcgcagccagcttgaggaggaaaaaaggaggtacaaaacgatgtttacacggttaaaggctctgaaagtggagatagagcacctccaattactgatggataaagcgaaggtgaagctgcagaaggaatttgaggtttggtgggccgaggaggctaccaacttacaagtgaactcccctgccgttaattcactggaccacactaagcccttcctacagacctccgacagccaacacgagtggtctcagctgttgtcgaataaatcggacgtaaacgctaggaagatcttgccttccccatgtcctagcccacacagccagaaacagtcttcaacctctacacctttagaggattctattccgaagcgacccgtttcaagcatacctcttacaggtgattctcagacagacagcgacattatagcttttattaaagccagacagtcgatactccagaaacagtgtttaggctcaaactag

SEQ ID NO: 107516 - DNA, 516 bp, Artificial Sequence
  derived and/or modified sequence
atgcgagaggaaatgagcctaggctgccaggaggccttcgagatttttaagcgagatcatgctgattcggtcaccatcgatgataacaagcagatactcaagcagagattttctgaagctaaagccctgggggaatcgatcaacgaggcccgaagcaagatcggccatttgaaagaggaaatcacacagcggcacattcagcaggttgctcttggcatttccgagaacatggccgtgccgctgatgcctgaccagcaggaggagaaattaaggagccaacttgaagaagaaaagcgcagatacaagacaatgtttacccgcctcaaggctcttaaggtggaaatagagcacctccaacttcttatggacaaagccaaggtcaagctacagaaagaatttgaggtgtggtgggccgaggaggccaccaatcttcaggtaaatagtcctgccgtgaatagtctcgatcacaccaaaagcaaaatcaaagcactggccgacagcatgtccgggttatag

SEQ ID NO: 107517 - DNA, 798 bp, Artificial Sequence
  derived and/or modified sequence
atgagggaggagatgagcctgggctgccaggaggcctttgagatcttcaagagggaccatgctgacagcgtgaccattgatgacaacaagcagatcctgaagcagcgcttcagcgaggccaaggccctgggggagagcatcaatgaggcccggagcaagattggccacctgaaggaggagatcacccagaggcacatccagcaggtggccctgggcatcagcgagaacatggctgtgcccctgatgccagaccagcaggaggagaagctgcggagccagctggaggaggagaagaggcgctacaagaccatgttcacccggctgaaggccctgaaggtggagattgagcacctgcagctgctgatggacaaggccaaggtgaagctgcagaaggagtttgaggtgtggtgggccgaggaggccaccaacctgcaggtgaacagccctgctgtgaacagcctggaccacaccaagcccttcctgcagaccagtgacagccagcacgagtggagccagctgctgagcaacaagagcagcggcggctgggaggtgcaggaccagggcaccggccgctttgatgtgtgtgatgtgaatgccaggaagatcctgcccagcccctgccccagcccccacagccagaagcagagcagcaccagcacccccctggaggacagcatccccaagaggcctgtgagcagcatccccctgactggagacagccagacagacagcgacatcatcgccttcatcaaggcccggcagagcatcctgcagaagcagtgcctgggcagcaactag

SEQ ID NO: 107518 - DNA, 1330 bp, Artificial Sequence
  derived and/or modified sequence
ctggaagagcctggggccacctgtctggtcagagtctctctgctgtgggcctcttggagccagggctggttttgtggtctgactgaagtgacaatgaaattaataggatcctgatgctgtgactgaggccatttccctgtgtctccaaacaggaatgagagaggaaatgtcattaggatgccaggaggcttttgaaatcttcaagagggaccacgctgacagcgttaccatcgatgacaacaaacagattctgaaacagagattttctgaagccaaggccctgggagaaagtataaatgaagcaagaagtaaaattggtcacctgaaggaagaaatcacccagcggcatatacagcaagtagccctaggaatctcggaaaacatggccgtgcctctgatgccagaccagcaggaggagaagctgcgatcacaactggaggaagaaaagagaaggtataaaacaatgttcactcgcctgaaagccctgaaggtggagatcgagcacttgcagctgctcatggacaaagccaaggtgaagctacagaaagagtttgaagtctggtgggcagaggaggccaccaacctgcaggtaaattctccagcagtgaattcactcgatcacacgaagccatttctccagacatctgactcccagcatgaatggtcccaactcctctctaacaaaagttctggaggctgggaagtccaagatcaaggcactggcagattcgatgtctgtgatgtgaatgccaggaaaatcctgccctcgccttgccccagtccacacagccagaaacagagcagcaccagcaccccactggaagacagcatccccaagaggccagtgtcgtccatccctctcaccggagacagccagacggactcggacatcatcgccttcatcaaggccagacagagcattctgcagaagcaatgtttgggaagcaattgaatttccaggaaatatccatccatgaattatgccagcaagaatgaagcacagatgaaggcagcgcccctcacttgctctggcttcagaagtgaactatgggctgctgggagcaactagtgactttgattcccatggaggggactgtgtttctttaaggatgctgacctggaggccaccgagaggctggggctggggctgaccacaacatccttcctgtggttgctggagctgctggcagggccaggcaaggccagagtgctaggggcagggtgaaggcttcagctcactgttgtagtgacgttttgtgtagatctttataagcttttgagaatgtgaaatagcaccatcaaaatataatgtcagaggatgctcacacca

SEQ ID NO: 107519 - DNA, 2394 bp, Artificial Sequence
  derived and/or modified sequence
acagtcctgaggggtgcagcgggtggcactggaagggcctcctcagcaggttgtcagccagctggaagagcctggggccacctgtctggtcagagtctctctgctgtgggcctcttggagccagggctggttttgtggtctgactgaagtgacaatgaaattaataggatcctgatgctgtgactgaggccatttccctgtgtctccaaacaggaatgagagaggaaatgtcattaggatgccaggaggcttttgaaatcttcaagagggaccacgctgacagcgttaccatcgatgacaacaaacagattctgaaacagagattttctgaagccaaggccctgggagaaagtataaatgaagcaagaagtaaaattggtcacctgaaggaagaaatcacccagcggcatatacagcaagtagccctaggaatctcggaaaacatggccgtgcctctgatgccagaccagcaggaggagaagctgcgatcacaactggaggaagaaaagagaaggtataaaacaatgttcactcgcctgaaagccctgaaggtggagatcgagcacttgcagctgctcatggacaaagccaaggtgaagctacagaaagagtttgaagtctggtgggcagaggaggccaccaacctgcaggtaaattctccagcagtgaattcactcgatcacacgaagccatttctccagacatctgactcccagcatgaatggtcccaactcctctctaacaaaagtgatgtgaatgccaggaaaatcctgccctcgccttgccccagtccacacagccagaaacagagcagcaccagcaccccactggaagacagcatccccaagaggccagtgtcgtccatccctctcaccggagacagccagacggactcggacatcatcgccttcatcaaggccagacagagcattctgcagaagcaatgtttgggaagcaattgaatttccaggaaatatccatccatgaattatgccagcaagaatgaagcacagatgaaggcagcgcccctcacttgctctggcttcagaagtgaactatgggctgctgggagcaactagtgactttgattcccatggaggggactgtgtttctttaaggatgctgacctggaggccaccgagaggctggggctggggctgaccacaacatccttcctgtggttgctggagctgctggcagggccaggcaaggccagagtgctaggggcagggtgaaggcttcagctcactgttgtagtgacgttttgtgtagatctttataagcttttgagaatgtgaaatagcaccatcaaaatataatgtcagaggatgctcacaccagtggaatgtggggggaatatttttatttttaacgatttgccagctctctcccttggcccgtgctctggtttggaagcccagaaatggccatgacaggtccaggcaggatgtcccagccacaggcaaggcagtggaatgcagggcatcctgaaggccaatcctgatctcccagaccacatctttcaccatcagcctcttggccaggatgacctggaggcagtgcctgaacagctgtgtctccagggagccatctgccctgcagggtctaaggacatcatagcacccagagaacagtgggcagctcccaggggctctgctgagagcttgagagagggcagtgtgggtaccttgggcctcacaaccttcacccagccacttgggaggatttgggctgacactccccacttccacagggaaaaacatagctgcctgggggtcttgtctccatgggccctctccatgacagatccaagggaaggtgggcagccctcaaggaggttcttgaagaactgccccctgggccagggggttccaacccagctgcagccagggaggggcagcggagggtgagcaggagtggcacctggaaatgaagctaactggataaaagtgctggtccactgctcctggtgtctctgtcctataaatacaggacctgatgaccctggaggggagcagagtggtaatatagtataattggcttgattttctttttcgttttttaggactgggtaacaggatcatgcaggagaagattaaaccattacatttctaagctaggcaggcccatcgagctcctctaatccacacccctattttatataattagaaggccagagtgaaggggagattcagcttgctgttctatgccactgacaaatgtcccctcttcagggggcttcccctgaccactccatctcgagtcaccccctagttatcccctatcccattaccattttttctgcatcactatctgacatgttatccttccgaacttgcctatttttgaaatacctgcaaccccccataatactaagagctccaatgcaacagg

SEQ ID NO: 107520 - DNA, 747 bp, Artificial Sequence
  derived and/or modified sequence
atgagggaggagatgagcctgggctgccaggaggcctttgagatcttcaagagggaccatgctgacagcgtgaccattgatgacaacaagcagatcctgaagcagcgcttcagcgaggccaaggccctgggggagagcatcaatgaggcccggagcaagattggccacctgaaggaggagatcacccagaggcacatccagcaggtggccctgggcatcagcgagaacatggctgtgcccctgatgccagaccagcaggaggagaagctgcggagccagctggaggaggagaagaggcgctacaagaccatgttcacccggctgaaggccctgaaggtggagattgagcacctgcagctgctgatggacaaggccaaggtgaagctgcagaaggagtttgaggtgtggtgggccgaggaggccaccaacctgcaggtgaacagccctgctgtgaacagcctggaccacaccaagcccttcctgcagaccagtgacagccagcacgagtggagccagctgctgagcaacaagagtgatgtgaatgccaggaagatcctgcccagcccctgccccagcccccacagccagaagcagagcagcaccagcacccccctggaggacagcatccccaagaggcctgtgagcagcatccccctgaccggggacagccagacagacagcgacatcatcgccttcatcaaggcccggcagagcatcctgcagaagcagtgcctgggcagcaactag

SEQ ID NO: 107521 - DNA, 516 bp, Artificial Sequence
  derived and/or modified sequence
atgagggaggagatgagcctgggctgccaggaggcctttgagatcttcaagagggaccatgctgacagcgtgaccattgatgacaacaagcagatcctgaagcagcgcttcagcgaggccaaggccctgggggagagcatcaatgaggcccggagcaagattggccacctgaaggaggagatcacccagaggcacatccagcaggtggccctgggcatcagcgagaacatggctgtgcccctgatgccagaccagcaggaggagaagctgcggagccagctggaggaggagaagaggcgctacaagaccatgttcacccggctgaaggccctgaaggtggagattgagcacctgcagctgctgatggacaaggccaaggtgaagctgcagaaggagtttgaggtgtggtgggccgaggaggccaccaacctgcaggtgaacagccctgctgtgaacagcctggaccacaccaagagcaagatcaaggccctggccgacagcatgagcggcctgtag

SEQ ID NO: 107522 - DNA, 798 bp, Artificial Sequence
  derived and/or modified sequence
atgcgggaggagatgagcctgggctgccaggaggccttcgagatctttaagcgcgaccacgcagacagcgtaacaatagacgataataaacagatccttaagcagaggttctccgaagcaaaagccctgggcgaatcaataaatgaggcaaggagtaaaatcggtcacctgaaggaggagattactcagcgccatatccaacaggtagccctaggcatatccgaaaatatggccgtgcctctgatgcctgatcagcaggaggagaagttgcgaagccagctggaggaagaaaaacgtcgatacaagaccatgtttactcgactaaaagctttgaaagtcgaaatcgagcacctacaactcctgatggacaaggcaaaggtcaagctgcagaaagagtttgaagtatggtgggctgaagaagcgacgaacctccaagtgaattctcctgccgtgaattcattagaccacacaaagccttttcttcagaccagcgattcacagcacgaatggtcccaactgctgagtaataagagctctggaggttgggaagtgcaagaccaaggcaccgggcgcttcgacgtgtgcgatgttaacgctaggaagattctgccttccccctgtccgagcccccattcccaaaagcagtcgtccactagtacacccttagaggactctatccctaagcgacccgtttcctccatcccactaaccggggactctcagacggattcggatatcattgcctttattaaagcccgacagagtattctccagaaacagtgtctagggagcaactag

SEQ ID NO: 107523 - DNA, 747 bp, Artificial Sequence
  derived and/or modified sequence
atgcgggaggagatgagcctgggctgccaggaggccttcgagatcttcaagcgggaccatgcggattctgttaccatcgacgataacaagcagattctgaagcagaggttttcagaggctaaggctctaggagaatctatcaatgaggcgagatcgaaaatcggacacttaaaggaggagatcacacaaaggcacatacagcaggtggctttagggatttcagagaatatggcagttccattgatgcccgaccagcaggaggaaaagctgaggagtcagttggaggaagagaaacgtcgttataaaacaatgttcactcgattaaaagcactgaaagtggaaattgagcatctgcagcttctcatggacaaggccaaagttaagctgcaaaaggaatttgaggtttggtgggctgaagaagcaaccaaccttcaagtaaacagtcctgcggttaactcccttgatcataccaagccctttcttcagacatccgactcccagcacgaatggtcccagttactgagtaacaaaagcgacgttaacgcgcgcaaaatcctcccatctccttgcccatcaccacattcccagaaacagagctctacgtcaactcccctggaggatagcattccaaagcgccccgtgtcctccatcccactcacaggtgacagccagactgacagcgacatcatcgcgtttattaaagctcgtcagagtattctgcagaaacaatgtctcgggagcaattag

SEQ ID NO: 107524 - DNA, 516 bp, Artificial Sequence
  derived and/or modified sequence
atgcgggaggagatgagcctgggctgccaggaggccttcgagatcttcaagagggaccacgccgacagtgtgacaatcgatgataacaagcagatactgaaacagcgattctccgaggcgaaggcgcttggtgagtctatcaatgaggcaaggagtaaaattggtcatctgaaggaagagataacccaacggcatattcagcaggtagccctggggatttcagaaaatatggctgttccgctcatgcctgatcagcaggaggagaaactccggtctcaactcgaagaggagaagagacgctataaaactatgttcacaagactgaaagcgcttaaggtggaaatcgagcacctgcaactcttgatggacaaagccaaagtgaaacttcagaaggagtttgaggtgtggtgggccgaggaggccacaaacctccaggtgaattctccagcagtcaactcgttagatcacaccaagagcaagattaaggctttagccgactccatgtctggtctgtag

SEQ ID NO: 107525 - DNA, 798 bp, Artificial Sequence
  derived and/or modified sequence
atgcgcgaagaaatgtccctgggctgccaggaggcttttgagatctttaagcgggatcatgcagactccgttaccatcgatgacaacaaacagatcctgaaacagaggttcagcgaagcaaaggcacttggagagtctataaacgaggctcgcagcaaaataggacacctcaaggaggagattacccagcgtcatatccaacaggtagcactcggcatttctgaaaacatggcagttccactcatgcctgaccagcaagaggagaaactgcgaagtcaactggaagaagaaaaacgtaggtacaagacaatgttcacacggctcaaagccctgaaggttgagatagaacaccttcagctcctcatggataaggccaaagtcaaattgcagaaagaattcgaggtctggtgggccgaggaggcaacgaatctgcaggtgaatagtccggctgtaaactccctggaccacaccaagccctttctgcagacaagtgactctcagcatgagtggtctcagctgctgagtaacaagtcttctggtgggtgggaggttcaggatcagggcacaggcaggttcgacgtatgtgacgtgaatgcgagaaagatcttgccaagtccctgcccttccccgcatagccaaaagcagtccagtacctccacgccattagaggatagtattcccaagcggcctgtgtctagcattccactaactggagattcacagaccgactctgatattatagcgtttattaaagccagacagtcgatccttcagaagcaatgcctggggtcgaactag

SEQ ID NO: 107526 - DNA, 368 bp, Artificial Sequence
  derived and/or modified sequence
gggccgtggacgcggcggccccgcggcgggggcagcgggcggcgggggcggaggcggccgctagcgccctgcccggcgccgcctccttcggcgttcgccccacggaccggcaggcggcggaccgcggcccaggctgaagctcagggccctgtctgctctgtggactcaacagtttgtggcaagacaagctcagaactgagaagctgtcaccacagttctggaggctgggaagttcaagatcaaagtgccagcagattcagtgtcatgtgaggacgtgcttcctgcttcatagataagagtagcttggagctcggcggcacaaccagcaccatctggtcgcgatggtggacacggaaagcccactctgc

SEQ ID NO: 107527 - DNA, 747 bp, Artificial Sequence
  derived and/or modified sequence
atgcgcgaggagatgagcctagggtgtcaggaggcctttgaaatctttaagcgggatcacgccgactccgtcactattgacgacaataagcagatcctaaaacaaagattcagtgaggcgaaagccttaggggagtccatcaacgaggcgaggtcgaagatcgggcatctgaaggaggaaatcacccaaagacacatacagcaggtcgccctcggaatatccgaaaatatggccgtccccctaatgcctgatcagcaggaggagaagctgcgcagccaactggaggaggagaaaagaaggtataagactatgttcaccaggttgaaggcactcaaagtggagatcgagcacctgcagctcctgatggacaaagcgaaggtgaagctccaaaaggaattcgaggtgtggtgggctgaagaagcaacaaatctgcaagtcaactcccctgcggtaaatagtcttgatcatactaagccattcctccagaccagtgattctcagcacgaatggagccaactactgtctaacaagagcgacgtgaacgcgcgaaagattctgccaagcccatgtccatccccacactcgcagaaacaatcgtctacctcgacccccctggaagactctattcctaagcggccagtgtcgtctattccgcttaccggggatagtcagacagattccgacatcatagcctttatcaaagctagacagagcattctgcaaaagcagtgcctgggttctaactag

SEQ ID NO: 107528 - DNA, 516 bp, Artificial Sequence
  derived and/or modified sequence
atgcgcgaagaaatgagtctcggctgccaggaggccttcgagatcttcaagagggaccacgccgactctgtcacaatcgacgataataagcagattttgaaacagcgattcagcgaagcaaaggcactgggcgagtccatcaacgaagcgaggtccaagatcggccacttgaaagaggagataactcagagacacattcagcaggtggcactcggcatttctgagaacatggccgtcccactcatgcccgatcagcaagaggaaaaactgagatcccagctggaagaggaaaaaaggaggtataagactatgtttacacgcttgaaggcattgaaggtggagatcgagcatctccagcttttgatggacaaggcaaaggtcaagctccaaaaagagtttgaggtgtggtgggctgaggaagccaccaacctacaggtgaactcaccagccgtgaatagtctcgaccacactaaatcgaagatcaaggctctggccgattccatgagcggcctgtag

SEQ ID NO: 107529 - DNA, 798 bp, Artificial Sequence
  derived and/or modified sequence
atgagagaggagatgagcctgggctgccaggaggccttcgagatcttcaagagagaccacgccgacagcgtgaccatcgacgacaacaagcagatcctgaagcagagattcagcgaggccaaggccctgggcgagagcatcaacgaggccagaagcaagatcggccacctgaaggaggagatcacccagagacacatccagcaggtggccctgggcatcagcgagaacatggccgtgcccctgatgcccgaccagcaggaggagaagctgagaagccagctggaggaggagaagagaagatacaagaccatgttcaccagactgaaggccctgaaggtggagatcgagcacctgcagctgctgatggacaaggccaaggtgaagctgcagaaggagttcgaggtgtggtgggccgaggaggccaccaacctgcaggtgaacagccccgccgtgaacagcctggaccacaccaagcccttcctgcagaccagcgacagccagcacgagtggagccagctgctgagcaacaagagcagcggcggctgggaggtgcaggaccagggcaccggcagattcgacgtgtgcgacgtgaacgccagaaagatcctgcccagcccctgccccagcccccacagccagaagcagagcagcaccagcacccccctggaggacagcatccccaagagacccgtgagcagcatccccctgaccggcgacagccagaccgacagcgacatcatcgccttcatcaaggccagacagagcatcctgcagaagcagtgcctgggcagcaactag

SEQ ID NO: 107530 - DNA, 747 bp, Artificial Sequence
  derived and/or modified sequence
atgagagaggagatgagcctgggctgccaggaggccttcgagatcttcaagagagaccacgccgacagcgtgaccatcgacgacaacaagcagatcctgaagcagagattcagcgaggccaaggccctgggcgagagcatcaacgaggccagaagcaagatcggccacctgaaggaggagatcacccagagacacatccagcaggtggccctgggcatcagcgagaacatggccgtgcccctgatgcccgaccagcaggaggagaagctgagaagccagctggaggaggagaagagaagatacaagaccatgttcaccagactgaaggccctgaaggtggagatcgagcacctgcagctgctgatggacaaggccaaggtgaagctgcagaaggagttcgaggtgtggtgggccgaggaggccaccaacctgcaggtgaacagccccgccgtgaacagcctggaccacaccaagcccttcctgcagaccagcgacagccagcacgagtggagccagctgctgagcaacaagagcgacgtgaacgccagaaagatcctgcccagcccctgccccagcccccacagccagaagcagagcagcaccagcacccccctggaggacagcatccccaagagacccgtgagcagcatccccctgaccggcgacagccagaccgacagcgacatcatcgccttcatcaaggccagacagagcatcctgcagaagcagtgcctgggcagcaactag

SEQ ID NO: 107531 - DNA, 516 bp, Artificial Sequence
  derived and/or modified sequence
atgagagaggagatgagcctgggctgccaggaggccttcgagatcttcaagagagaccacgccgacagcgtgaccatcgacgacaacaagcagatcctgaagcagagattcagcgaggccaaggccctgggcgagagcatcaacgaggccagaagcaagatcggccacctgaaggaggagatcacccagagacacatccagcaggtggccctgggcatcagcgagaacatggccgtgcccctgatgcccgaccagcaggaggagaagctgagaagccagctggaggaggagaagagaagatacaagaccatgttcaccagactgaaggccctgaaggtggagatcgagcacctgcagctgctgatggacaaggccaaggtgaagctgcagaaggagttcgaggtgtggtgggccgaggaggccaccaacctgcaggtgaacagccccgccgtgaacagcctggaccacaccaagagcaagatcaaggccctggccgacagcatgagcggcctgtag

SEQ ID NO: 107532 - protein, 280 aa, Artificial Sequence
  derived and/or modified sequence
MEREMVLCLAQTIHTQEDLPRPSISAEPGTVIPLGSHVTFVCRGPVGVQTFRLERESRSTYNDTEDVSQASPSESEARFRIDSVSEGNAGPYRCIYYKPPKWSEQSDYLELLVKETSGGPDSPDTEPGSSAGPTQRPSDNSHNEHAPASQGLKAEHLYILIGVSVVFLFCLLLLVLFCLHRQNQIKQGPPRSKDEEQKPQQRPDLAVDVLERTADKATVNGLPEKDRETDTSALAAGSSQEVTYAQLDHWALTQRTARAVSPQSTKPMAESITYAAVARH

SEQ ID NO: 107533 - DNA, 1305 bp, Artificial Sequence
  derived and/or modified sequence
atgttcaattctaagttcggaagtatccccaaattctacgtgagggcacctggccgggtgaacataataggcgaacacatagactactgtggttactccgttctgccgatggccgtggagcaggatgtgctgatcgcggtggagcccgtcaagacctatgccctgcagttggctaatacaaatcctctttaccctgactttagtacatctgctaataacattcagatcgacaagacaaagccactgtggcataattactttctttgcggcctgaagggaatacaggaacacttcggactgtctaatctgactggcatgaactgtctcgtagatggaaatattccccctagtagcggcctttcttcttcatcagcccttgtgtgttgtgctggactggtaaccctgaccgtactcggccgcaacctgtctaaagtggagctcgccgaaatttgcgcgaagtctgagcgttatataggaacagagggaggcggcatggaccagagcattagcttcttagccgaggagggaacggcaaagctcatagagttctctcccctgagggctaccgacgtgaagttgccttccggggctgtgttcgttatcgcaaactcctgcgtggagatgaataaagctgctaccagccattttaatattcgcgtgatggagtgccgtctggcagcaaagctgctggcaaagtataagagtctgcagtgggacaaagtactcaggctggaggaggtccaagctaaactgggaatctctctggaagaaatgttgcttgtcaccgaggatgcactccacccggaaccgtacaatcccgaggaaatctgtaggtgcctgggcatatccctggaagagctccggacacagattctgtcacccaatactcaagatgtcctaatcttcaagctttaccaacgggctaagcacgtgtactcagaagcggccagggtgctgcagttcaagaagatctgcgaagaggcccccgaaaacatggtccagctgctgggcgagctgatgaaccaaagccacatgtcgtgcagggacatgtacgaatgtagctgtccggaactggaccagctggtagatatctgtagaaagtttggcgcacaggggagcagactgacaggggcaggttgggggggatgcacagtgtcaatggtgcctgccgacaagcttccttctttcttggccaacgtgcacaaggcttattaccagaggtctgacggctccttggcacccgagaagcaatctctgtttgcgaccaagcctggtggaggtgccctggttctcttggaagcttag

SEQ ID NO: 107534 - DNA, 1305 bp, Artificial Sequence
  derived and/or modified sequence
atgttcaatagcaaatttggctcgataccaaagttctacgtccgggcgccgggccgcgtaaacattatcggggagcatatcgattactgtggctattccgtgttgcctatggctgtcgagcaggacgtgctgatcgccgtagaacctgtcaaaacatatgctctgcaattggctaacaccaatcctctttatccggacttctccacatccgccaataatatccagatcgacaaaaccaagcctctgtggcacaactactttctttgtgggttgaaaggaatccaagagcactttggcttatcaaatctgaccggcatgaattgtctggtagatggtaatattcccccaagctccggcctgtccagctcttcggccctggtatgttgtgctgggctggtgacactcaccgtgctgggacggaatttgtcaaaggtggaactggccgagatctgtgcgaaatcggagcgatatatagggacagaagggggcggcatggatcagagcatctcctttctggcagaggagggcactgcaaagctcattgagttcagtccactgcgggcgactgacgtgaagcttccgagcggcgcggtgtttgttattgctaacagttgtgtcgagatgaataaggctgctacttcccactttaatattcgagtcatggagtgtagattggcggcgaaactgctcgccaaatataagagcctgcagtgggacaaggtgttaagattagaagaggtgcaagctaagctcgggatttccctagaagaaatgctgttggttaccgaggacgctctgcacccagagccttacaaccctgaagagatttgccggtgcctcggcatctcacttgaggaattgaggacgcagatacttagcccgaacacccaggatgtccttatctttaagctctatcagcgggcgaagcacgtgtacagcgaggcagcacgagtgttgcagtttaagaaaatctgcgaggaagcccccgagaacatggttcagctgctgggggaactgatgaaccagtctcacatgtcctgtcgggatatgtatgaatgctcatgtcccgagctggaccagctcgtggatatttgccgcaagttcggcgcccaggggtctagactaactggcgcggggtggggcggctgtacagtatccatggtccctgcagataagctgccgtcattcctcgctaacgtgcacaaagcctactaccaacgatcagatggctctcttgcacctgaaaagcaatcgttgttcgcaactaaacccggtgggggtgcactcgttctcctagaggcctag

SEQ ID NO: 107535 - DNA, 1305 bp, Artificial Sequence
  derived and/or modified sequence
atgttcaactcaaagtttggctctattccaaagttttacgttcgagcccctggtagagtgaacatcattggagaacacattgattactgcggctatagcgttctcccgatggccgtggaacaagacgtactcatcgccgtggaaccagttaagacatacgcgctgcaactcgcaaacactaacccactgtatcccgacttcagtacgtctgcaaataacatccagattgataagaccaaaccactttggcataactacttcctgtgcggacttaaaggaatccaggaacacttcggactgtcgaacctgacaggaatgaactgtctcgttgacggaaatattcccccaagcagcgggctgtccagctcatccgcgctggtgtgctgcgcgggtcttgtgactctgactgtactgggacgaaacctctccaaggtcgagctggccgaaatctgcgccaaaagcgaacgttatatcgggactgagggcggtggtatggatcaaagtatctcctttctcgcggaggagggtactgccaagcttatagagttcagcccattgagggccaccgacgtgaaactcccttcaggggcagtgttcgtcatcgctaacagctgtgtcgaaatgaataaggccgctacttcacacttcaacatccgggtgatggaatgtaggctggccgcgaagttgctggctaaatacaagagtctgcagtgggacaaagtgcttaggttagaagaagtacaggccaagctggggatttctctggaggaaatgcttcttgtaaccgaggacgcgttgcatcctgagccgtacaatccagaagagatatgccggtgtttgggtatcagcctggaagaactgagaacacagatattatctcccaacacccaggacgtcctgatctttaaactgtatcagcgggctaagcacgtatactcagaggccgccagagtactccagtttaagaaaatctgcgaagaagccccggaaaacatggtccagctattaggagaactgatgaatcagagtcatatgtcctgtcgcgacatgtacgagtgctcttgtcccgaactggaccaactggtggacatctgcagaaagttcggcgctcaggggagcaggctgaccggggccggttggggtggatgcactgtcagcatggtaccagcagataagctgccatcctttctggcgaatgtgcacaaggcctactatcagcgttccgatgggtccctcgcccctgaaaagcagtcattgttcgctacaaagccggggggaggcgctctggtgcttctggaggcctag

SEQ ID NO: 107536 - DNA, 1305 bp, Artificial Sequence
  derived and/or modified sequence
atgttcaacagcaagtttggcagcatccccaagttctacgtgcgggcccctggccgggtgaacatcattggagagcacatcgactactgcggctacagcgtgctgcccatggctgtggagcaggatgtgctgattgctgtggagcctgtgaagacctacgccctgcagctggccaacaccaaccccctgtacccagacttcagcaccagcgccaacaacatccagattgacaagaccaagcccctgtggcacaactacttcctgtgtggcctgaagggcatccaggagcacttcggcctgagcaacctgaccggcatgaactgcctggtggatggcaacatcccccccagcagcggcctgagcagcagcagcgccctggtgtgctgtgccggcctggtgaccctgactgtgctgggcaggaacctgagcaaggtggagctggccgagatctgtgccaagtctgagcgctacatcggcacagagggcggcggcatggaccagagcatctccttcctggccgaggagggcacagccaagctgattgagttcagccccctgcgggccacagatgtgaagctgcccagcggggctgtgtttgtgattgccaacagctgtgtggagatgaacaaggccgccaccagccacttcaacatccgggtgatggagtgccgcctggccgccaagctgctggccaagtacaagagcctgcagtgggacaaggtgctgcggctggaggaggtgcaggccaagctgggcatcagcctggaggagatgctgctggtgacagaagatgccctgcaccctgagccctacaaccctgaggagatctgccgctgcctgggcatcagcctggaggagctgcggacccagatcctgagccccaacacccaggatgtgctgatcttcaagctgtaccagagggccaagcacgtgtacagcgaggccgcccgggtgctgcagttcaagaagatctgtgaggaggcccctgagaacatggtgcagctgctgggggagctgatgaaccagagccacatgagctgccgggacatgtatgagtgcagctgcccagagctggaccagctggtggacatctgcaggaagtttggagcccagggcagccggctgaccggggccggctggggcggctgcaccgtgtccatggtgcctgctgacaagctgcccagcttcctggccaacgtgcacaaggcctactaccagaggagtgatggcagcctggcccctgagaagcagagcctgtttgccaccaagccaggcggcggggccctggtgctgctggaggcctag

SEQ ID NO: 107537 - DNA, 1305 bp, Artificial Sequence
  derived and/or modified sequence
atgttcaacagcaagttcggcagcatccccaagttctacgtgcgggcgccagggcgtgttaatattatcggtgaacatatcgattattgcgggtactcggtgctgcccatggctgtcgagcaggacgtgctaattgcagtagaacccgtcaaaacctatgcattgcagctcgccaacaccaacccgctgtatccggacttctctacctccgctaataacattcaaatcgacaagacgaagccgctttggcacaattattttctgtgtgggctgaagggtatccaggagcacttcggcctgtcaaatttaacagggatgaactgtctggtggatgggaacattccgcctagtagcggactgtcctcctccagcgccttagtttgttgtgcgggattggtgacgctcactgtgctcggccggaacctatcaaaggtagagctggctgaaatttgcgccaaaagcgagagatatattggcaccgaaggcggtggcatggaccagagtatctctttcctcgcggaggaggggaccgcgaagctgattgaattctcaccactgcgcgccaccgacgtcaagctgccttctggggccgtgttcgtgattgcgaacagttgcgtggaaatgaataaggccgcgaccagtcactttaacattcgagtgatggagtgtcgcctggctgccaaactccttgcgaagtacaaatctttgcagtgggacaaagtactgagactggaggaagtccaagccaaacttggtattagcctcgaggagatgcttcttgtgaccgaagacgcactgcaccctgaaccatacaaccccgaggagatttgtcggtgtctaggtatcagcctggaggagctccggactcagatactgagcccgaatacacaggacgtcctgatcttcaagctgtaccagagagctaagcacgtctactcagaagctgccagggtactgcagtttaaaaaaatttgtgaagaagccccagaaaatatggtgcagcttctgggagaactgatgaaccagtcacacatgtcctgtcgggacatgtatgagtgcagctgccctgagttggaccagctcgtggatatttgccgcaagtttggcgctcagggttctcgcctcaccggagccgggtggggcggatgcaccgtgagtatggttcctgcagacaaattgccatctttcctggctaacgtgcacaaggcctattaccagcggtcagatgggagccttgccccggagaagcaatctttattcgccacaaaacccggcggcggcgctttggtgctcctcgaggcctag

SEQ ID NO: 107538 - DNA, 1305 bp, Artificial Sequence
  derived and/or modified sequence
atgttcaacagcaagttcggcagcatccccaagttctacgtgcgggctcccgggagagttaatatcattggtgaacacattgactattgtggctacagtgtccttccaatggcagttgaacaggacgtcttgattgcagtggaacccgtaaaaacttacgcattgcaactcgctaacaccaatcctctgtaccccgactttagcactagtgcgaacaatattcagattgacaagactaagcctctatggcataactatttcttgtgtggcctaaagggcatacaagagcacttcggtttgagcaatcttaccggaatgaactgcctcgtggacggaaacatcccaccctctagcgggctttcctctagtagcgccctggtgtgctgcgccggtcttgtgacacttacagtgctcggacgcaacctaagtaaggttgaacttgctgagatctgcgccaaaagcgagcgttatatcggaactgaggggggaggcatggatcagagcatctcttttctggccgaagaggggaccgccaaactaatagaattttcacctctgcgcgcaaccgatgtcaaactccccagcggagccgtcttcgttatcgccaattcctgcgtggaaatgaataaagccgctacatcacattttaacatccgggtcatggaatgtcgactggctgccaagttactggcgaagtataaaagtctccagtgggataaggtactacggctcgaagaggtccaggccaaattgggaatctccttggaggaaatgctgctcgtgaccgaggacgcattgcatccagagccatacaacccagaggagatttgtagatgtttggggatctctctagaggagctgagaacccagatattgtccccgaatacccaggacgtattgatttttaagctgtaccagcgcgccaagcacgtgtactctgaggctgccagggttcttcagttcaagaaaatctgcgaggaagctcctgaaaacatggtacagctacttggggaactgatgaaccagagccatatgtcgtgtagggatatgtacgagtgcagctgtccagagctggatcagttggtcgacatctgcagaaagtttggagcacagggtagtcggctgaccggtgctggctggggagggtgtaccgtgtctatggtcccagccgacaagctgccctcattcctagccaatgtgcacaaagcatattaccaacggtccgacgggtcattagctcctgagaagcagagcctgttcgcaaccaaaccaggcggcggggcactggtcttgcttgaagcctag

SEQ ID NO: 107539 - DNA, 1305 bp, Artificial Sequence
  derived and/or modified sequence
atgttcaacagcaagttcggcagcatccccaagttctacgtgcgggcacctggacgcgtcaatatcattggggaacatatagactattgtgggtactctgtcctgccaatggccgtcgaacaagacgtgttgatcgcagtggaacctgtgaagacgtatgctctacaacttgcgaatacaaaccctttgtatcctgatttctcgaccagcgccaataatatccagatagacaaaaccaagcccctgtggcataattactttctatgcggacttaaaggtatccaggaacattttggacttagcaatctgactggaatgaattgcctggtcgacgggaacatcccacccagcagcgggctgagcagcagttctgccctcgtgtgctgcgctggcctcgtcacgctaactgtgcttggacgcaacctttcgaaggtggagctagctgagatttgtgctaaatcagagcgttatatcggaacggagggaggcggtatggaccaatctatcagttttctagctgaagaggggactgctaagctcatcgagttcagcccgctaagggctaccgacgtgaagctgccctccggagctgtttttgtgatcgccaacagctgcgtggaaatgaataaggccgctacatcacattttaatatcagagttatggaatgtcgcttggccgccaagctgttagctaagtacaagagtttgcagtgggacaaagtgcttcgcctcgaagaagtgcaggcaaagctgggaatctcacttgaggagatgctgcttgtcaccgaggacgctcttcacccagagccctataacccagaagagatatgtcgatgcctcggcattagtttagaggaactgcgaacgcaaatactatcccccaatactcaggacgtcttaatctttaagctgtatcagagagccaagcacgtttactctgaagctgctagggtgctccagttcaagaagatctgtgaagaggccccagagaacatggtgcagctgctcggcgaactgatgaaccaatcccacatgtcctgcagggatatgtatgagtgtagttgcccggaactcgaccaacttgtggacatttgccgtaaatttggcgcacaaggctccagactaactggcgcgggatggggaggctgtaccgttagtatggtccccgccgacaagctgcccagcttccttgcaaacgtgcataaagcctattatcaaagaagcgacggatcactggctcccgaaaagcagagcctatttgccactaagcccggcggaggagctctagtgctgctcgaggcctag

SEQ ID NO: 107540 - DNA, 1305 bp, Artificial Sequence
  derived and/or modified sequence
atgttcaatagcaaattcggatctatccccaagttttacgtgcgcgcacctgggagggtcaatattattggtgagcacatagattactgcggatatagcgtgctgcccatggccgtcgaacaagacgtgctgatcgctgtggagcccgtgaagacgtacgccctccagctggccaacacaaatcccctttatcccgacttcagcacgtcagccaacaatatacaaattgacaagacaaagccactgtggcacaattattttctctgtggcctgaaaggcatccaagaacattttggcctgtccaatcttacaggcatgaactgcctcgtggacggaaacatcccaccgagtagtggattgagttccagtagcgccctagtgtgctgtgcaggattggttaccttaactgtcctggggagaaacttgtcaaaagtagaacttgcagaaatctgtgccaaatcggaaaggtacatagggactgaaggtgggggaatggatcagtcaatctctttcctggccgaggagggcacagctaagctgatcgagttcagtccgctgagagccactgatgtgaaactgcccagcggagcagtgttcgtgattgctaactcatgtgtggagatgaataaagctgctactagtcattttaatatacgggtgatggagtgcagactggccgcaaagctgctggccaagtacaagtccctccagtgggacaaggtcctgagattagaggaggtccaggcaaagctgggaatttctctagaagagatgctgctagtaaccgaagacgctttgcacccggaaccctacaatcctgaggagatctgtcgatgcttgggcatttccctggaggaactaagaacccagatcctctccccaaacacacaggatgtcctgattttcaaattatatcagcgtgccaaacacgtttacagcgaggctgcgagagttcttcagttcaaaaaaatttgtgaagaggcccctgagaatatggtacaactcctgggagagctgatgaaccaaagccacatgagctgtagagacatgtatgaatgcagttgtcctgaactcgaccaactcgtggacatttgtcgtaaattcggagcgcagggctcacggcttaccggtgccggttggggcggatgtaccgtcagcatggtccccgctgataaactgccgtccttccttgccaacgtgcacaaagcctactatcagagatctgatgggtctcttgcaccagaaaaacaatcactgttcgccacaaaacccggagggggtgccctggtgttgctcgaggcctag

SEQ ID NO: 107541 - DNA, 1305 bp, Artificial Sequence
  derived and/or modified sequence
atgtttaactccaaatttggatccatccctaagttttatgtgcgggctccagggagagtgaacatcataggcgagcacatcgactactgtgggtattccgtactcccaatggcggtggaacaggacgttttaatagccgtcgagcccgttaaaacctatgccctgcaactggccaatacaaaccccctttatcctgacttttccaccagcgcgaacaacatacagatcgacaaaacaaaacctttatggcataattatttcctttgtggcctaaagggtattcaggaacactttggactgtccaacctgacagggatgaattgtcttgtcgacggtaatataccaccatcatcaggtctgtcatcttccagcgcacttgtgtgctgtgcaggtctagtgactctcaccgtgctgggacgcaacttgtctaaagtcgagctggcggaaatctgcgctaagtcagagcgttatataggcacagaggggggtggaatggatcagtccatcagcttccttgcagaggaaggaacagctaagttgatcgagttctctcctctacgggctacagatgttaagctcccatccggagctgtctttgtaattgccaattcatgcgtcgaaatgaataaagccgctacatcgcactttaacataagagtgatggaatgccgcctggcagccaagttgctcgcaaagtacaaatccctgcagtgggataaggtgcttagacttgaagaggtgcaggctaaactaggcatcagcctggaagagatgctactggtcaccgaagacgcactccaccccgagccatacaatccagaagagatctgtcggtgcctaggcatcagtctggaagaactccgaacgcagatcctgagccccaatacacaggacgtcttgatcttcaagctgtaccaacgggcaaagcatgtatactccgaagcagcgcgtgtgcttcagtttaaaaaaatttgtgaagaggccccagaaaacatggtgcagctgttgggagaactgatgaaccaatcccatatgtcgtgtagggatatgtatgagtgcagctgcccagaactggatcagctggtggatatctgcagaaagttcggagcccagggatctaggctgactggcgcaggttggggcggatgcactgtgagcatggtccccgcagataaactcccgtctttcttggcaaacgttcacaaggcttattatcagaggtccgacggttcactcgcacctgagaagcagtccttattcgcaacaaaaccgggagggggtgcactggtgctgctggaagcttag

SEQ ID NO: 107542 - DNA, 1305 bp, Artificial Sequence
  derived and/or modified sequence
atgtttaattcaaaattcggatccatccccaaattctacgtcagagctccaggaagggtcaacatcataggtgagcacattgactattgcggctattcagtgttgcctatggcggtggagcaggatgtgcttatcgccgtcgagcccgtgaagacttacgccctgcaactcgcgaataccaatcctctatatcctgactttagcacatctgccaacaatatccagatcgataaaacaaaacctttatggcacaattatttcttgtgtggcctgaagggcatccaggaacacttcggactctccaaccttacaggaatgaattgcttggtggatggtaatattccaccgagctccggtctgtcatcttcaagcgcattagtgtgctgcgccggactggtgacgctgaccgttctaggcagaaacttgtctaaggtggagctcgccgaaatatgtgctaaatccgaacgttacattggaaccgaagggggagggatggatcagtctatttctttccttgcggaagagggcaccgccaagctgattgaattctcccctctgcgcgctacagacgtcaagttaccatccggcgctgtgtttgttatcgccaactcctgcgtagagatgaacaaggcagctacttcccacttcaacattagggtgatggaatgtcgcttagcagctaagttgctcgccaagtacaagagcctgcaatgggataaagtgctgaggcttgaggaagttcaggcaaaactggggatttccttagaggaaatgttgcttgtgaccgaagacgctctgcacccagaaccatataaccccgaagagatctgccgttgcctggggatctcgttagaagaacttcgcacacagatcctgtcaccaaacacacaagatgtgttgatctttaaactgtaccagagagcgaagcacgtctacagcgaagccgctagagtgctgcagttcaagaaaatttgtgaagaagcccctgagaacatggtccagcttctgggtgagctcatgaaccagagccacatgtcttgcagggacatgtatgaatgttcgtgcccggagttggatcagttggtggatatttgtcgaaaattcggcgcacaaggcagtagactgacgggtgcaggctggggaggctgtacagtaagtatggtccccgctgacaaattgccctcattcctggcgaacgtgcacaaggcatactatcaacgaagtgacggtagcctggccccagagaaacagtcactgttcgccaccaagcctggcggaggggctttagtgttgctggaggcatag

SEQ ID NO: 107543 - DNA, 1305 bp, Artificial Sequence
  derived and/or modified sequence
atgttcaacagcaagttcggcagcatccccaagttctacgtgagagcccccggcagagtgaacatcatcggcgagcacatcgactactgcggctacagcgtgctgcccatggccgtggagcaggacgtgctgatcgccgtggagcccgtgaagacctacgccctgcagctggccaacaccaaccccctgtaccccgacttcagcaccagcgccaacaacatccagatcgacaagaccaagcccctgtggcacaactacttcctgtgcggcctgaagggcatccaggagcacttcggcctgagcaacctgaccggcatgaactgcctggtggacggcaacatcccccccagcagcggcctgagcagcagcagcgccctggtgtgctgcgccggcctggtgaccctgaccgtgctgggcagaaacctgagcaaggtggagctggccgagatctgcgccaagagcgagagatacatcggcaccgagggcggcggcatggaccagagcatcagcttcctggccgaggagggcaccgccaagctgatcgagttcagccccctgagagccaccgacgtgaagctgcccagcggcgccgtgttcgtgatcgccaacagctgcgtggagatgaacaaggccgccaccagccacttcaacatcagagtgatggagtgcagactggccgccaagctgctggccaagtacaagagcctgcagtgggacaaggtgctgagactggaggaggtgcaggccaagctgggcatcagcctggaggagatgctgctggtgaccgaggacgccctgcaccccgagccctacaaccccgaggagatctgcagatgcctgggcatcagcctggaggagctgagaacccagatcctgagccccaacacccaggacgtgctgatcttcaagctgtaccagagagccaagcacgtgtacagcgaggccgccagagtgctgcagttcaagaagatctgcgaggaggcccccgagaacatggtgcagctgctgggcgagctgatgaaccagagccacatgagctgcagagacatgtacgagtgcagctgccccgagctggaccagctggtggacatctgcagaaagttcggcgcccagggcagcagactgaccggcgccggctggggcggctgcaccgtgagcatggtgcccgccgacaagctgcccagcttcctggccaacgtgcacaaggcctactaccagagaagcgacggcagcctggcccccgagaagcagagcctgttcgccaccaagcccggcggcggcgccctggtgctgctggaggcctag

SEQ ID NO: 107544 - DNA, 1784 bp, Artificial Sequence
  derived and/or modified sequence
agagctgagacagccacccagggggtccactccaggacagactgtgccgtgagtaaccccctgagacaatggagacgagagactctagagggagggtgaccaactgttccactttgcccaagactgataattcttctgggatatattttcagtgctaaaaccaggaaagtcccaggcaagctgggacactttgtcactcttgctagaggcctgagagtgcagaggatgcatcttatcgactacctgctcctcctgctggttggactactggccctttctcatggccagctgcacgttgagcatgatggtgagagttgcagtaacagctcccaccagcagattctggagacaggtgagggctcccccagcctcaagatagcccctgccaatgctgactttgccttccgcttctactacctgatcgcttcggagaccccggggaagaacatctttttctccccgctgagcatctcggcggcctacgccatgctttccctgggggcctgctcacacagccgcagccagatccttgagggcctgggcttcaacctcaccgagctgtctgagtccgatgtccataggggcttccagcacctcctgcacactctcaacctccccggccatgggctggaaacacgcgtgggcagtgctctgttcctgagccacaacctgaagttccttgcaaaattcctgaatgacaccatggccgtctatgaggctaaactcttccacaccaacttctacgacactgtgggcacaatccagcttatcaacgaccacgtcaagaaggaaactcgagggaagattgtggatttggtcagtgagctcaagaaggacgtcttgatggtgctggtgaattacatttacttcaaagccctgtgggagaaaccattcatttcctcaaggaccactcccaaagacttctatgttgatgagaacacaacagtccgggtgcccatgatgctgcaggaccaggagcatcactggtatcttcatgacagatacttgccctgctcggtgctacggatggattacaaaggagacgcaaccgtgtttttcattctccctaaccaaggcaaaatgagggagattgaagaggttctgactccagagatgctaatgaggtggaacaacttgttgcggaagaggaatttttacaagaagctagagttgcatcttcccaagttctccatttctggctcctatgtattagatcagattttgcccaggctgggcttcacggatctgttctccaagtgggctgacttatccggcatcaccaaacagcaaaaactggaggcatccaaaagtttccacaaggccaccttggacgtggatgaggctggcaccgaggctgcagcagccaccagcttcgcgatcaaattcttctctgcccagaccaatcgccacatcctgcgattcaaccggcccttccttgtggtgatcttttccaccagcacccagagtgtcctctttctgggcaaggtcgtcgaccccacgaaaccatagccctcccagggctgctcatctgttccaagcaggaggatgtggcaggggagggctgggagtgagtagctctgtgtttagagttggggacaaggatgacaccgaaggtccaggagtccaggacagcaggtgctggccggtggggagcggggaggggcactgagatgggcagggcctggacattccacaccctggtgctgtgcagcctctggcagagcatccgacctcttggagcaagtttctgcctctggaaagggggcgggcccttttcacaacag

SEQ ID NO: 107545 - DNA, 1987 bp, Artificial Sequence
  derived and/or modified sequence
aagacagagctgagacagccacccagggggtccactccaggacagactgtgccgtgagtaaccccctgagacaatggagacgagagactctagagggagggtgaccaactgttccactttgcccaagactgataattcttctgggatatattttcagtgctaaaaccaggaaagtcccaggcaagctgggacactttgtcactcttgctagaggtgagaaatactcaggctagaaaggccccgacttagggtccatgggcactggtgggtgactatgcccggagacccagaaaagcctcccccagggacacacagctggtacagggcggcactgactgagggccaaggtcttctggctgccaatccaggcctgagagtgcagaggatgcatcttatcgactacctgctcctcctgctggttggactactggccctttctcatggccagctgcacgttgagcatgatggtgagagttgcagtaacagctcccaccagcagattctggagacaggtgagggctcccccagcctcaagatagcccctgccaatgctgactttgccttccgcttctactacctgatcgcttcggagaccccggggaagaacatctttttctccccgctgagcatctcggcggcctacgccatgctttccctgggggcctgctcacacagccgcagccagatccttgagggcctgggcttcaacctcaccgagctgtctgagtccgatgtccataggggcttccagcacctcctgcacactctcaacctccccggccatgggctggaaacacgcgtgggcagtgctctgttcctgagccacaacctgaagttccttgcaaaattcctgaatgacaccatggccgtctatgaggctaaactcttccacaccaacttctacgacactgtgggcacaatccagcttatcaacgaccacgtcaagaaggaaactcgagggaagattgtggatttggtcagtgagctcaagaaggacgtcttgatggtgctggtgaattacatttacttcaaagccctgtgggagaaaccattcatttcctcaaggaccactcccaaagacttctatgttgatgagaacacaacagtccgggtgcccatgatgctgcaggaccaggagcatcactggtatcttcatgacagatacttgccctgctcggtgctacggatggattacaaaggagacgcaaccgtgtttttcattctccctaaccaaggcaaaatgagggagattgaagaggttctgactccagagatgctaatgaggtggaacaacttgttgcggaagaggaatttttacaagaagctagagttgcatcttcccaagttctccatttctggctcctatgtattagatcagattttgcccaggctgggcttcacggatctgttctccaagtgggctgacttatccggcatcaccaaacagcaaaaactggaggcatccaaaagtttccacaaggccaccttggacgtggatgaggctggcaccgaggctgcagcagccaccagcttcgcgatcaaattcttctctgcccagaccaatcgccacatcctgcgattcaaccggcccttccttgtggtgatcttttccaccagcacccagagtgtcctctttctgggcaaggtcgtcgaccccacgaaaccatagccctcccagggctgctcatctgttccaagcaggaggatgtggcaggggagggctgggagtgagtagctctgtgtttagagttggggacaaggatgacaccgaaggtccaggagtccaggacagcaggtgctggccggtggggagcggggaggggcactgagatgggcagggcctggacattccacaccctggtgctgtgcagcctctggcagagcatccgacctcttggagcaagtttctgcctctggaaagggggcgggcccttttcacaacaggctggttgtaccgagtaaacaacacgatgccatgaagaccctg

SEQ ID NO: 107546 - DNA, 2012 bp, Artificial Sequence
  derived and/or modified sequence
ggagggaggtgggcgactgaagctcagagagggagtaaatgagctcaacttcacacagctagtgaggggctggttggagaccagattttccaagtggttccccgggccctcggggagcagcaagggccaggcgaacctccatgcactgcacaaacatgaagaagtgaaccctcttggggttccccaggtgggaagtggggtgtcttcttgggagggggtgaaccaacttctggtgagttttccttgttgaggcaatgctgcacccgtagcctgtttgttaataattacctggtcgggagagagtgggtggtactgagaaggcctggtttgaccagtcctcctgggcttgataagacagagctgagacagccacccagggggtccactccaggacagactgtgccgcctgagagtgcagaggatgcatcttatcgactacctgctcctcctgctggttggactactggccctttctcatggccagctgcacgttgagcatgatggtgagagttgcagtaacagctcccaccagcagattctggagacaggtgagggctcccccagcctcaagatagcccctgccaatgctgactttgccttccgcttctactacctgatcgcttcggagaccccggggaagaacatctttttctccccgctgagcatctcggcggcctacgccatgctttccctgggggcctgctcacacagccgcagccagatccttgagggcctgggcttcaacctcaccgagctgtctgagtccgatgtccataggggcttccagcacctcctgcacactctcaacctccccggccatgggctggaaacacgcgtgggcagtgctctgttcctgagccacaacctgaagttccttgcaaaattcctgaatgacaccatggccgtctatgaggctaaactcttccacaccaacttctacgacactgtgggcacaatccagcttatcaacgaccacgtcaagaaggaaactcgagggaagattgtggatttggtcagtgagctcaagaaggacgtcttgatggtgctggtgaattacatttacttcaaagccctgtgggagaaaccattcatttcctcaaggaccactcccaaagacttctatgttgatgagaacacaacagtccgggtgcccatgatgctgcaggaccaggagcatcactggtatcttcatgacagatacttgccctgctcggtgctacggatggattacaaaggagacgcaaccgtgtttttcattctccctaaccaaggcaaaatgagggagattgaagaggttctgactccagagatgctaatgaggtggaacaacttgttgcggaagaggaatttttacaagaagctagagttgcatcttcccaagttctccatttctggctcctatgtattagatcagattttgcccaggctgggcttcacggatctgttctccaagtgggctgacttatccggcatcaccaaacagcaaaaactggaggcatccaaaagtttccacaaggccaccttggacgtggatgaggctggcaccgaggctgcagcagccaccagcttcgcgatcaaattcttctctgcccagaccaatcgccacatcctgcgattcaaccggcccttccttgtggtgatcttttccaccagcacccagagtgtcctctttctgggcaaggtcgtcgaccccacgaaaccatagccctcccagggctgctcatctgttccaagcaggaggatgtggcaggggagggctgggagtgagtagctctgtgtttagagttggggacaaggatgacaccgaaggtccaggagtccaggacagcaggtgctggccggtggggagcggggaggggcactgagatgggcagggcctggacattccacaccctggtgctgtgcagcctctggcagagcatccgacctcttggagcaagtttctgcctctggaaagggggcgggcccttttcacaacaggctggttgtaccgagtaaacaacacgatgcca

SEQ ID NO: 107547 - protein, 518 aa, Artificial Sequence
  derived and/or modified sequence
MRTWDYRWSLALVAQTGVHCCNLSSLQPLPPRFKRFSCLSLSSGWDYSNSGNMKPPLLVFIVCLLWLKDSHCAPTWKDKTAISENLKSFSEVGEIDADEEVKKALTGIKQMKIMMERKEKEHTNLMSTLKKCREEKQEALKLLNEVQEHLEEEERLCRESLADSWGECRSCLENNCMRIYTTCQPSWSSVKNKIERFFRKIYQFLFPFHEDNEKDLPISEKLIEEDAQLTQMEDVFSQLTVDVNSLFNRSFNVFRQMQQEFDQTFQSHFISDTDLTEPYFFPAFSKEPMTKADLEQCWDIPNFFQLFCNFSVSIYESVSETITKMLKAIEDLPKQDKAPDHGGLISKMLPGQDRGLCGELDQNLSRCFKFHEKCQKCQAHLSEDCPDVPALHTELDEAIRLVNVSNQQYGQILQMTRKHLEDTAYLVEKMRGQFGWVSELANQAPETEIIFNSIQVVPRIHEGNISKQDETMMTDLSILPSSNFTLKIPLEESAESSNFIGYVVAKALQHFKEHFKTW

SEQ ID NO: 107548 - DNA, 1557 bp, Artificial Sequence
  derived and/or modified sequence
atgcggacctgggactaccggtggagcctggccctggtggcccagaccggcgttcactgctgtaacctttcctccctgcagcctcttccgccgaggttcaaacggtttagttgcctgagcctaagcagtggttgggattattccaatagtggcaatatgaaacctccactgcttgttttcatagtctgtttattatggctcaaggatagtcactgcgccccgacctggaaggataagactgcaatatcagagaacttgaagtctttctccgaggtcggcgaaatagatgcagatgaggaggtaaaaaaggccctgactggcatcaagcagatgaaaatcatgatggagagaaaggagaaggagcacaccaacctgatgagcacactgaagaaatgtcgggaagagaagcaagaggcgctaaagctcttgaatgaagtccaagagcacctcgaagaggaggaacggctttgccgcgagtcacttgccgactcctggggcgaatgtaggtcatgtctcgagaataattgtatgcgcatctacacgacgtgccagcctagttggtcatctgttaagaacaaaattgaacgctttttcagaaagatataccaatttcttttcccctttcacgaggacaatgagaaggaccttccgatttctgaaaaactcattgaagaggatgctcagttgacccagatggaagatgtgttctcccagcttacagtggacgttaatagcttgttcaaccgatcctttaatgtttttcgacagatgcagcaggagttcgaccagacctttcagagtcattttatatccgacacagacctcaccgaaccctatttcttccctgccttcagtaaggaaccaatgacaaaagcagacttggaacagtgctgggacattcccaacttctttcagctcttttgtaatttcagtgtgagcatttacgagtctgtctccgagactatcacaaaaatgctaaaggccatcgaggatttgccaaaacaagataaagctccagatcacggcggactcattagcaagatgctcccaggccaggataggggcctctgcggcgaattggaccagaatttatctcggtgctttaagttccacgaaaagtgtcaaaagtgtcaggcgcatctttccgaggattgtccagatgtgcctgctttgcacacggaactggatgaggctatccgactggtcaatgttagtaaccaacaatacgggcaaatcctgcaaatgacaagaaagcacctggaggacactgcgtatttggtagagaagatgagaggccaattcgggtgggtctccgaactcgccaatcaggcccccgaaaccgaaattatcttcaactctattcaagttgtaccccgaattcacgaaggcaatataagtaagcaagatgagaccatgatgactgatctatccatactacccagctctaattttacgctgaagatccccttggaagagtccgctgaatccagtaacttcataggttacgtcgtggcaaaagcgctacagcactttaaggagcactttaagacctggtag

SEQ ID NO: 107549 - DNA, 1401 bp, Artificial Sequence
  derived and/or modified sequence
atgaagcccccacttttagtgtttatcgtctgtctgctgtggctgaaggattcccactgtgctccaacttggaaggacaagactgccatttctgaaaatctaaagtccttttcggaggttggtgaaatagatgccgacgaagaagtgaagaaggctctgacaggcatcaagcaaatgaagataatgatggagcgcaaggagaaagagcacaccaatcttatgtcaacattgaagaagtgcagggaggagaagcaagaggccctgaaactcctaaacgaggtgcaggaacatctagaagaggaggagaggctatgccgcgagagtctggccgactcatggggggaatgtcggagctgtctcgaaaacaattgtatgcgcatatacactacatgccagccgagctggagctctgtcaagaacaaaattgaacgcttttttcgcaaaatctatcagtttctcttccctttccatgaagacaatgagaaggacctcccaatctccgaaaagttaatcgaagaggatgctcagctcacgcaaatggaggacgtcttcagccagctgactgtggatgtgaacagcctgtttaatcggtctttcaatgtgtttcgccagatgcaacaggagttcgaccagactttccagtctcattttatatcagatactgatttaacagaaccttatttcttccctgctttctctaaagaacccatgaccaaagccgacttagagcaatgttgggatatccctaacttttttcagctgttctgcaactttagtgtcagcatttatgaaagcgtttccgagactattaccaagatgcttaaagccatcgaggatctcccaaaacaggataaagccccagatcacggcggactgatcagcaaaatgctccctggccaagatagaggactctgcggcgaactcgaccagaatttgtccagatgcttcaaattccatgaaaagtgccagaagtgccaggctcacctctctgaggattgtccagacgttcctgcactgcacacagagctggacgaggcgattcggttggtcaatgtgagcaaccagcaatatggacaaatactccagatgacaaggaaacatctggaggatactgcatacctcgtagagaagatgcgtggccagttcggttgggtatccgaactcgccaaccaggcaccagaaacggagatcatattcaatagcattcaggtagtgcctaggattcatgaggggaacatatctaagcaggatgaaaccatgatgactgatctctcaatccttccatccagtaacttcacattaaaaatccccctggaggagtccgcggagtcttcaaatttcattggctacgtcgtggcaaaagcgttgcagcacttcaaagagcattttaaaacttggtag

SEQ ID NO: 107550 - DNA, 1936 bp, Artificial Sequence
  derived and/or modified sequence
acctgcaggcccgggccgcggggttggtttccaccctggaggttgctgacaccctgtgccctcggctgacttccagccggtggcacagacgcctccagggggcagcactcaagcgcatcttaggaatgacagtaacagcgggaacatgaagccgccactcttggtgtttattgtgtgtctgctgtggttgaaagacagtcactgcgcacccacttggaaggacaaaactgctatcagtgaaaacctgaagagtttttctgaggtgggggagatagatgcagatgaagaggtgaagaaggctttgactggtattaagcaaatgaaaatcatgatggaaagaaaagagaaggaacacaccaatctaatgagcaccctgaagaaatgcagagaagaaaagcaggaggccctgaaacttctgaatgaagttcaagaacatctggaggaagaagaaaggctatgccgggagtctttggcagattcctggggtgaatgcaggtcttgcctggaaaataactgcatgagaatttatacaacctgccaacctagctggtcctctgtgaaaaataagattgaacggtttttcaggaagatatatcaatttctatttcctttccatgaagataatgaaaaagatctccccatcagtgaaaagctcattgaggaagatgcacaattgacccaaatggaggatgtgttcagccagttgactgtggatgtgaattctctctttaacaggagttttaacgtcttcagacagatgcagcaagagtttgaccagacttttcaatcacatttcatatcagatacagacctaactgagccttacttttttccagctttctctaaagagccgatgacaaaagcagatcttgagcaatgttgggacattcccaacttcttccagctgttttgtaatttcagtgtctctatttatgaaagtgtcagtgaaacaattactaagatgctgaaggcaatagaagatttaccaaaacaagacaaagctcctgaccacggaggcctgatttcaaagatgttacctgggcaggacagaggactgtgtggggaacttgaccagaatttgtcaagatgtttcaaatttcatgaaaaatgccaaaaatgtcaggctcacctatctgaagactgtcctgatgtacctgctctgcacacagaattagacgaggcgatcaggttggtcaatgtatccaatcagcagtatggccagattctccagatgacccggaagcacttggaggacaccgcctatctggtggagaagatgagagggcaatttggctgggtgtctgaactggcaaaccaggccccagaaacagagatcatctttaattcaatacaggtagttccaaggattcatgaaggaaatatttccaaacaagatgaaacaatgatgacagacttaagcattctgccttcctctaatttcacactcaagatccctcttgaagaaagtgctgagagttctaacttcattggctacgtagtggcaaaagctctacagcattttaaggaacattttaaaacctggtaagaagatctaatgcatcctatatccagtaagtagaattatctcttcatctgggacctggaaatcctgaaataaaaaaggataatgcaataaacacagttgcaggaaagtatgttagctatatactatgaagtactcttagtttacttatgttgaatggcttagctattaatactcaaattgagttaaaatgaaaattcctccttaaaaaatcaaacgtaatatgtattacatttcatggtacattagtagttctttgtatattgaataaatactaaatcacctaggtgtctatgttctatcacatctacaaacatgtcacttcctaattaacaaaatgttcttcctttagtttgcttttgcacttaaaatatatataattgacttttttgg

SEQ ID NO: 107551 - DNA, 1401 bp, Artificial Sequence
  derived and/or modified sequence
atgaaaccaccactgctggtgttcatagtgtgtctcttatggctcaaagactcacattgtgcccctacttggaaggacaagaccgccatcagcgagaatctgaaaagcttcagtgaggtgggagagatcgatgccgatgaggaggtgaaaaaagccttaactgggatcaagcaaatgaaaatcatgatggagcggaaagaaaaagaacatacaaatctgatgtctacgctgaaaaaatgtcgcgaggaaaaacaggaagcactgaagctgctcaacgaagtgcaggagcatctcgaggaggaggaacggctttgtagagagagcctggccgactcctggggcgagtgtcgatcttgtctcgaaaataattgtatgcgtatatatacaacttgtcagccctcctggtcctccgtgaagaataaaattgagaggttcttccgtaaaatctatcaattcctgttcccttttcacgaggataacgaaaaggacctcccaatctcagaaaaattaattgaggaagatgcccagctgacccagatggaggacgtattcagtcaactgaccgtggacgtgaattcactttttaaccggtcatttaacgtatttcgccaaatgcagcaggagttcgaccagacttttcagtcacacttcattagtgacactgacctgaccgaaccatatttctttcctgcgttcagtaaggagcccatgacaaaggccgacctcgaacagtgttgggatattcctaacttttttcaactgttctgtaatttctccgtgagtatttatgagtcagtgagtgaaaccattacaaagatgttaaaagcaatcgaagacttaccgaagcaggacaaagcccctgatcatggcggtctcatatcaaagatgctcccaggacaggaccggggtctgtgcggcgaactcgaccagaacttgtcccgttgcttcaaattccatgagaaatgtcagaagtgccaagcccacctgtcagaggactgtcccgacgtacctgccctgcacacagagctagatgaggccattcggctggtaaatgtcagcaatcagcaatatggccagatcctgcagatgacccgcaagcatctggaggacacggcgtatctggtggagaaaatgagaggccaattcggctgggtttccgaactagctaaccaggccccagaaactgaaatcatcttcaactctattcaggttgtacccaggattcacgagggtaacatttccaagcaggatgagaccatgatgaccgatctgagcatcctgccctccagcaactttacgcttaaaatcccactggaggaaagtgccgaatccagtaacttcatcggctacgtggtggcgaaagcattacagcatttcaaggaacattttaagacatggtag

SEQ ID NO: 107552 - DNA, 1557 bp, Artificial Sequence
  derived and/or modified sequence
atgcgtacatgggattaccggtggtccctggctcttgtcgctcagaccggcgtacactgctgcaacctcagctcacttcagcccttacccccacgctttaaaagattttcctgtcttagcctttcgtcaggatgggactatagcaactctgggaatatgaaaccgccactccttgtgtttatcgtgtgcctcctatggctgaaggactcccattgtgcgccaacttggaaagataaaaccgccatttcagagaatctgaagagcttcagtgaagtcggcgaaattgacgctgacgaagaggtaaagaaagctctaactggaatcaagcagatgaagattatgatggaaaggaaggaaaaggagcatacaaatttgatgtccacactaaagaagtgtcgtgaggaaaaacaggaggccctgaaactgcttaatgaagtgcaggagcatctggaggaggaggagcggctctgtagggagtctctggccgactcctggggcgaatgcaggagttgtttggaaaacaactgtatgcgtatttatactacgtgccagccctcttggtcttcagttaagaacaagatcgaaaggttcttccgcaagatctatcagttcctgttcccttttcacgaagataatgagaaggatttgcccatcagcgagaaactgatcgaggaagatgcccagctaacccagatggaggacgtgttctctcagcttaccgtggatgttaattcactgttcaatcgctcctttaacgtgtttagacaaatgcagcaggagttcgaccagacttttcagagccatttcattagcgacactgacctgaccgagccttatttttttcccgctttctctaaagagccaatgacaaaggcggacctcgagcagtgctgggacatccccaacttttttcaactattctgcaatttttccgtgtccatatacgaatctgtctcggagacaattaccaagatgctcaaagccatagaggacttaccaaaacaggacaaagccccagaccacggcggattgatctcaaagatgctgcccggtcaggatcgaggcctgtgtggggaacttgaccaaaacttgagtagatgttttaagttccatgagaagtgtcagaaatgtcaggcccatctttctgaagattgtcccgacgtgcctgctcttcacacagagttggacgaggccatcaggctggttaacgtgtctaatcaacagtacggtcagatattacagatgaccagaaagcacctagaagacacggcttatctggtggaaaagatgcggggtcaattcgggtgggtcagcgaattggccaatcaggctcctgagactgagattatatttaactctattcaggtggttcctcgtatccatgaaggcaacatttcaaaacaggacgagacaatgatgacggatctttcgatcctgccctcatccaactttacactgaagatacccctggaggagagtgcagagtccagcaactttatcggatatgtggttgccaaggctctccagcacttcaaagagcatttcaagacctggtag

SEQ ID NO: 107553 - DNA, 1401 bp, Artificial Sequence
  derived and/or modified sequence
atgaaacccccactgctggtctttattgtctgtctgctatggctaaaggatagtcattgtgcgcctacgtggaaagacaagacagcgatatcagaaaatctcaagagcttctccgaagtgggagagattgacgcagatgaggaagtcaaaaaagctcttaccggaattaaacagatgaagattatgatggaaagaaaagaaaaggagcataccaacttaatgagtacactgaagaaatgcagagaggagaaacaggaggcactgaaactgctcaacgaagtgcaggagcatctggaggaggaagagcggctctgtagagagtccctagccgattcctggggcgagtgccgctcttgtctggagaataactgcatgcgaatttatactacttgccagccaagttggtcgtctgtcaagaacaaaatcgaacgtttctttagaaaaatctatcagttcctttttccctttcacgaagacaacgagaaagaccttccgatcagcgagaagcttatcgaagaagacgcacagcttacccagatggaggacgtctttagccagttgactgtggacgtaaatagccttttcaatcggtcattcaacgtttttaggcaaatgcaacaggagttcgaccaaaccttccagagtcactttatcagcgatacggatctgactgagccatacttctttcccgctttctccaaggagcccatgactaaggcagatcttgaacagtgttgggatatccccaactttttccaactcttctgcaacttttcagtgagtatttacgagagtgtctctgaaaccatcactaagatgctgaaagcaattgaggacctccccaaacaagacaaagcccctgatcacgggggactgatcagtaaaatgctgccagggcaggatagaggtctttgcggagagctggaccaaaatctctcacggtgttttaagttccacgaaaaatgtcagaagtgccaggcccatctgtcagaggattgtccagatgttccagcactccacactgaacttgatgaagccatcagactggtaaacgtttcaaaccagcagtatggtcagatcttgcagatgactcgcaaacacctggaagacacggcttatctggtagagaagatgagagggcaatttgggtgggtgtccgaattggcaaatcaggctcccgagactgaaatcattttcaactctattcaagtagttccaagaattcacgaaggcaacatttctaagcaggacgaaacaatgatgaccgatctcagtatcttaccgagcagcaactttaccctgaaaatcccgctggaggagtcagccgagagcagtaatttcattggttatgtcgtggcgaaggctctgcaacatttcaaggaacacttcaaaacctggtag

SEQ ID NO: 107554 - DNA, 1401 bp, Artificial Sequence
  derived and/or modified sequence
atgaagcccccactgctcgtcttcatcgtgtgcctgctctggttaaaggactctcattgcgcacccacatggaaagacaagacagcgatttcagagaaccttaaatctttctcagaggtaggagagatagacgccgatgaggaggtaaagaaggccttaaccgggatcaagcagatgaaaattatgatggagaggaaagaaaaagaacacactaacctaatgtcaacacttaagaagtgtcgcgaggagaagcaggaagccctaaagttgttgaatgaagtgcaggagcaccttgaggaagaggaaagactgtgccgagaaagcctggccgatagttggggcgagtgtcgctcatgcctcgaaaacaattgcatgcgcatttacaccacgtgtcagccaagctggtctagcgtgaagaataaaatcgagaggttctttcggaaaatttaccaatttctgttccctttccacgaagacaacgagaaggacctgcctatttcggaaaagctcatcgaagaggatgctcaacttactcaaatggaagatgttttttcccagttgacagtggacgtgaacagcctttttaacagatcgtttaacgtttttagacaaatgcagcaggagttcgatcagaccttccagtcccactttatctcagacacggatctcacagaaccatacttcttcccagctttctccaaagagccaatgaccaaggccgacctggagcagtgttgggatatccccaatttctttcagctcttctgcaatttctccgtgagtatatatgagtccgtgtccgaaacaatcaccaaaatgttgaaggctatcgaggatttacccaaacaagataaggcccctgatcatggggggctgatttcgaagatgcttcctggccaggacaggggtctgtgcggcgaactggaccaaaacttgagccggtgtttcaaattccatgaaaagtgtcaaaagtgccaggcccacctatcggaggattgcccagacgtgcctgctctgcatacggaactggatgaagctattagacttgtgaacgtcagcaaccaacaatacggacagatactgcagatgaccagaaagcatttagaggacaccgcctacctcgttgaaaagatgcgtggccagttcggttgggtaagtgaactcgccaaccaggcacccgagactgagatcattttcaactctattcaggtggtcccgagaatccatgaagggaatatttctaaacaagacgagacaatgatgaccgacctgtctattttgccgtcgtctaatttcaccctcaaaattcccttagaggagagtgccgagagctccaacttcattggctatgttgtcgcaaaggcgttgcagcacttcaaggagcattttaaaacatggtag

SEQ ID NO: 107555 - DNA, 1557 bp, Artificial Sequence
  derived and/or modified sequence
atgaggacttgggactacagatggagcctggccttggtggctcaaaccggtgtccactgctgtaacttgtcgtctctgcaaccccttccacctaggttcaaaaggttttcatgtctgtccctttcatccgggtgggactacagtaactcaggtaatatgaagccacctttgttggtttttatcgtgtgcttgctctggttgaaggactcgcactgcgctcctacgtggaaagacaagaccgccatctccgagaacctaaagagcttcagcgaggtgggcgagattgatgctgatgaggaggttaaaaaggccctcaccggtataaaacagatgaagataatgatggagcgaaaagagaaagaacacaccaacctcatgagcactctgaagaagtgccgcgaggaaaaacaggaggcccttaagctgctgaacgaagtccaggaacatcttgaggaggaggaaagactgtgccgggaatccctcgcggactcttggggcgagtgcaggtcatgcctagaaaataattgcatgcggatttacaccacctgccaaccatcctggtcatccgtcaaaaacaagattgaaagattctttcgcaagatttaccagtttttgttcccatttcacgaggacaatgagaaggatttacccatatcagagaagctgatcgaagaagatgcccagttaactcagatggaagacgtgttctcacaactgactgtcgacgtgaacagcctgttcaatagaagttttaatgtgttccgccagatgcagcaggaattcgaccagacatttcaatctcacttcatttctgacacagatctcacggaaccttacttctttcccgcgttctccaaggaaccgatgaccaaggctgatctcgaacagtgttgggatattccaaactttttccagctgttttgtaacttttcagtgagtatttatgagtcagtctcagagactattactaaaatgcttaaggccatagaagatctgcccaaacaggacaaagccccggaccatggaggactcatctcaaagatgcttcccggacaggatagaggactgtgcggtgaactcgatcagaacctgtcaagatgttttaagtttcatgagaaatgccagaagtgtcaggcccacctcagcgaagattgccccgacgttcccgcactccacaccgagctcgatgaggctattagactggttaacgtctcaaatcagcagtacggacagatcctgcagatgacaaggaagcacctagaagataccgcgtatctcgtagaaaagatgagagggcagttcggttgggtctccgaactggcgaaccaggcccccgaaaccgagattatctttaactccattcaagtggtgccacgcatccacgaagggaacatctctaagcaagatgagaccatgatgacagacctgtctatcttgccatcatctaacttcactctgaaaatacctctcgaagagtctgccgaaagcagcaattttatcggctacgtggttgctaaagctctccaacactttaaggagcatttcaaaacatggtag

SEQ ID NO: 107556 - DNA, 1401 bp, Artificial Sequence
  derived and/or modified sequence
atgaagccccctctgctcgtattcattgtgtgcctgctgtggctgaaagactcccattgtgcccccacatggaaagataagactgcaatcagtgagaacctgaaatccttcagtgaagttggagagatcgacgccgatgaagaggttaaaaaagccctaaccggaataaaacagatgaagatcatgatggagcgaaaagagaaagagcataccaatctgatgagtactctgaaaaagtgccgggaggaaaaacaggaagctctgaagctgctgaacgaggtccaggaacatttggaagaagaagagagactgtgtagagaatcgttggcagattcttggggagaatgccgtagctgcctggaaaataactgtatgagaatttacacaacgtgtcagccatcgtggtcatcggtgaaaaacaaaattgagagattttttcgcaagatttaccagttcttgtttcccttccacgaagataatgaaaaagaccttcctatatccgagaaacttattgaggaagatgcccagcttacccaaatggaagacgtattcagtcagttgactgtagatgtgaattccctgtttaaccgcagctttaacgtcttcagacaaatgcagcaggaatttgaccagaccttccaaagccattttattagcgacactgatcttacagagccgtattttttccctgcattctccaaagaaccaatgactaaagccgatcttgagcagtgctgggatatcccaaattttttccagctcttttgtaacttctccgtgagtatctatgagtcagtatctgagaccatcaccaaaatgctgaaagctatcgaggacctccccaagcaggataaagcacctgatcatggaggactgatttctaagatgttacccggacaggatagagggctgtgtggtgagttagatcaaaatctgagcaggtgcttcaaattccacgaaaaatgccagaagtgccaggcacatctctctgaagactgtcctgacgtacccgcgctgcacaccgagcttgacgaagctattcgactggtcaatgtctcaaatcaacagtacggacagatactgcaaatgactagaaaacatctggaggacacagcttatctcgttgagaagatgagagggcaatttggttgggtatcagagcttgccaatcaagcgccagagaccgaaataatcttcaatagcatacaagtcgtgccaagaatccatgaaggtaacatttccaaacaggatgaaaccatgatgaccgacttgtccatcctcccaagctccaatttcacactcaagattcctctggaagagtcagcagagagcagcaactttattggctacgttgtcgctaaagccctccagcactttaaagaacatttcaagacatggtag

SEQ ID NO: 107557 - DNA, 1401 bp, Artificial Sequence
  derived and/or modified sequence
atgaagcctccactgctagtattcattgtctgcctgctgtggctgaaagactcccactgcgccccaacgtggaaagataaaacagcaatctctgaaaatttgaaaagcttctcagaggtgggcgagattgacgctgacgaggaggtgaagaaggcactcacaggcattaaacaaatgaaaataatgatggaaagaaaagaaaaggagcataccaacctgatgtccacccttaaaaaatgcagagaagaaaaacaagaagcgcttaagttacttaacgaagtacaggaacatcttgaggaagaagaacggctttgccgcgagtcgttggccgattcctggggagaatgccggtcctgcttggagaataattgtatgaggatctacacgacctgccagccatcatggtcctccgttaaaaataaaatagaaaggtttttccggaagatttaccagtttctgttccctttccatgaagataatgaaaaggatctacccatttccgaaaaattgattgaagaagacgcccagcttacacagatggaagacgtatttagccagcttacagtagacgtcaatagtctgttcaaccgttcattcaatgtatttagacaaatgcaacaagagtttgatcagactttccaatcacacttcatctccgacacagatcttactgaaccttatttctttcccgccttctctaaggagcctatgacaaaagcagatctcgagcagtgctgggatattccaaacttctttcagttgttctgcaacttttcagtgtctatttatgagtcagtatccgaaaccataacaaaaatgctgaaagccattgaggatctgcccaagcaggacaaagcccccgaccatggtggcttgattagcaaaatgctgccaggccaggacaggggtctgtgcggcgaactggaccaaaacttgagccggtgtttcaaattccatgaaaagtgtcaaaagtgccaggcccacctatcggaggattgcccagacgtgcctgctctgcatacggaactggatgaagctattagacttgtgaacgtcagcaaccaacaatacggacagatactgcagatgaccagaaagcatttagaggacaccgcctacctcgttgaaaagatgcgtggccagttcggttgggtaagtgaactcgccaaccaggcacccgagactgagatcattttcaactcaattcaggtagttcctaggatccacgaaggtaacataagcaaacaggatgaaactatgatgactgatctatcaatactaccttcatccaactttacacttaaaatccctctcgaggaaagcgccgagtcttcgaacttcatcggctacgtagtcgccaaagcccttcagcattttaaagaacacttcaaaacttggtag

SEQ ID NO: 107558 - DNA, 1557 bp, Artificial Sequence
  derived and/or modified sequence
atgagaacctgggactacagatggtctttagctctggtggcacagacaggcgtgcattgttgcaatctctctagcttgcagccccttcctccccggtttaagcgcttcagttgtctctctctttccagtggctgggactactccaattcagggaacatgaaaccaccccttttagtattcattgtatgcttgctctggctgaaagatagccactgcgccccgacatggaaggataaaacagcaatttcagagaacctcaagtctttcagtgaagtgggagagatcgacgcagacgaagaggttaagaaggccctgacagggatcaagcagatgaaaatcatgatggaacgaaaagaaaaagaacacacaaatttgatgagcaccctaaaaaaatgcagagaggagaaacaagaggccttaaaactgctcaacgaggtacaggagcatttggaagaagaggagagactttgcagagaatctctggccgactcctggggagaatgtaggtcctgtttagagaataactgtatgcgaatatacaccacatgccagccttcttggtcaagcgtcaagaacaagattgagcggttcttccgaaagatttatcagtttctctttccttttcacgaagacaacgaaaaagacctgcccatttcagagaaattaattgaagaagacgcccagctaacacaaatggaagacgtgttctcccaactgacagtagatgtgaactcactgttcaatagatcttttaatgtatttaggcagatgcagcaagaattcgatcagacttttcagtcacatttcattagtgacaccgacctcacagagccctacttctttccagcctttagcaaagaacccatgaccaaagccgacctcgagcagtgctgggacatcccaaactttttccaacttttctgcaatttttccgtttctatttatgaatctgtctccgaaactatcactaagatgctgaaagccatcgaggatctccctaagcaagacaaagcacccgaccatggcgggttaatatccaaaatgctgcccggacaggataggggactgtgcggagagttagaccagaacttatccagatgctttaaattccacgagaagtgtcagaaatgccaggcccacctctcagaggattgtcccgatgtgcccgcacttcatactgagttggacgaagcgatcaggttggtcaatgtgtcgaaccagcaatatggccagattctgcaaatgacccgcaagcacttagaggataccgcatatttagtagagaagatgcggggccaattcggatgggtatctgagctcgctaaccaagcacccgaaactgagattattttcaatagcatccaggtggtgccacgaatccacgaaggcaatattagtaagcaggacgaaaccatgatgactgatctctctatactgccctcctcaaattttacattgaaaattcccttagaggaatcagccgagtcatccaacttcattggctacgtcgtcgcaaaagcccttcagcacttcaaagagcatttcaaaacctggtag

SEQ ID NO: 107559 - DNA, 2199 bp, Artificial Sequence
  derived and/or modified sequence
ggtttccaccctggaggttgctgacaccctgtgccctcggctgacttccagccggtggcacagacgcctccagggggcagcactcaagcgcatcttaggaatgacagagttgcgtccctctcggttgccaggctggagttcagtggcatgttcatagctcactgaagcctcaaattcctgggttcaagtgaccctcctacctcagccccatgaggacctgggactacagatggagtcttgctctcgttgcccagactggagtgcactgctgcaatctcagctcactgcaacctctacctcccaggttcaagcgattctcctgcctcagcctctcgagtggctgggactatagtaacagcgggaacatgaagccgccactcttggtgtttattgtgtgtctgctgtggttgaaagacagtcactgcgcacccacttggaaggacaaaactgctatcagtgaaaacctgaagagtttttctgaggtgggggagatagatgcagatgaagaggtgaagaaggctttgactggtattaagcaaatgaaaatcatgatggaaagaaaagagaaggaacacaccaatctaatgagcaccctgaagaaatgcagagaagaaaagcaggaggccctgaaacttctgaatgaagttcaagaacatctggaggaagaagaaaggctatgccgggagtctttggcagattcctggggtgaatgcaggtcttgcctggaaaataactgcatgagaatttatacaacctgccaacctagctggtcctctgtgaaaaataagattgaacggtttttcaggaagatatatcaatttctatttcctttccatgaagataatgaaaaagatctccccatcagtgaaaagctcattgaggaagatgcacaattgacccaaatggaggatgtgttcagccagttgactgtggatgtgaattctctctttaacaggagttttaacgtcttcagacagatgcagcaagagtttgaccagacttttcaatcacatttcatatcagatacagacctaactgagccttacttttttccagctttctctaaagagccgatgacaaaagcagatcttgagcaatgttgggacattcccaacttcttccagctgttttgtaatttcagtgtctctatttatgaaagtgtcagtgaaacaattactaagatgctgaaggcaatagaagatttaccaaaacaagacaaagctcctgaccacggaggcctgatttcaaagatgttacctgggcaggacagaggactgtgtggggaacttgaccagaatttgtcaagatgtttcaaatttcatgaaaaatgccaaaaatgtcaggctcacctatctgaagactgtcctgatgtacctgctctgcacacagaattagacgaggcgatcaggttggtcaatgtatccaatcagcagtatggccagattctccagatgacccggaagcacttggaggacaccgcctatctggtggagaagatgagagggcaatttggctgggtgtctgaactggcaaaccaggccccagaaacagagatcatctttaattcaatacaggtagttccaaggattcatgaaggaaatatttccaaacaagatgaaacaatgatgacagacttaagcattctgccttcctctaatttcacactcaagatccctcttgaagaaagtgctgagagttctaacttcattggctacgtagtggcaaaagctctacagcattttaaggaacattttaaaacctggtaagaagatctaatgcatcctatatccagtaagtagaattatctcttcatctgggacctggaaatcctgaaataaaaaaggataatgcaataaacacagttgcaggaaagtatgttagctatatactatgaagtactcttagtttacttatgttgaatggcttagctattaatactcaaattgagttaaaatgaaaattcctccttaaaaaatcaaacgtaatatgtattacatttcatggtacattagtagttctttgtatattgaataaatactaaatcacctaggtgtctatgttctatcacatctacaaacatgtcacttcctaattaacaaaatgttcttcctttagtttgcttttgcacttaaaatatatataattgacttttttggaaaaaaatctaagattcattgctttgttttgtaaagaccaata

SEQ ID NO: 107560 - DNA, 1401 bp, Artificial Sequence
  derived and/or modified sequence
atgaagccccccctgctggtgttcatcgtgtgcctgctgtggctgaaggacagccactgcgcccccacctggaaggacaagaccgccatcagcgagaacctgaagagcttcagcgaggtgggcgagatcgacgccgacgaggaggtgaagaaggccctgaccggcatcaagcagatgaagatcatgatggagagaaaggagaaggagcacaccaacctgatgagcaccctgaagaagtgcagagaggagaagcaggaggccctgaagctgctgaacgaggtgcaggagcacctggaggaggaggagagactgtgcagagagagcctggccgacagctggggcgagtgcagaagctgcctggagaacaactgcatgagaatctacaccacctgccagcccagctggagcagcgtgaagaacaagatcgagagattcttcagaaagatctaccagttcctgttccccttccacgaggacaacgagaaggacctgcccatcagcgagaagctgatcgaggaggacgcccagctgacccagatggaggacgtgttcagccagctgaccgtggacgtgaacagcctgttcaacagaagcttcaacgtgttcagacagatgcagcaggagttcgaccagaccttccagagccacttcatcagcgacaccgacctgaccgagccctacttcttccccgccttcagcaaggagcccatgaccaaggccgacctggagcagtgctgggacatccccaacttcttccagctgttctgcaacttcagcgtgagcatctacgagagcgtgagcgagaccatcaccaagatgctgaaggccatcgaggacctgcccaagcaggacaaggcccccgaccacggcggcctgatcagcaagatgctgcccggccaggacagaggcctgtgcggcgagctggaccagaacctgagcagatgcttcaagttccacgagaagtgccagaagtgccaggcccacctgagcgaggactgccccgacgtgcccgccctgcacaccgagctggacgaggccatcagactggtgaacgtgagcaaccagcagtacggccagatcctgcagatgaccagaaagcacctggaggacaccgcctacctggtggagaagatgagaggccagttcggctgggtgagcgagctggccaaccaggcccccgagaccgagatcatcttcaacagcatccaggtggtgcccagaatccacgagggcaacatcagcaagcaggacgagaccatgatgaccgacctgagcatcctgcccagcagcaacttcaccctgaagatccccctggaggagagcgccgagagcagcaacttcatcggctacgtggtggccaaggccctgcagcacttcaaggagcacttcaagacctggtag

SEQ ID NO: 107561 - DNA, 1557 bp, Artificial Sequence
  derived and/or modified sequence
atgagaacctgggactacagatggagcctggccctggtggcccagaccggcgtgcactgctgcaacctgagcagcctgcagcccctgccccccagattcaagagattcagctgcctgagcctgagcagcggctgggactacagcaacagcggcaacatgaagccccccctgctggtgttcatcgtgtgcctgctgtggctgaaggacagccactgcgcccccacctggaaggacaagaccgccatcagcgagaacctgaagagcttcagcgaggtgggcgagatcgacgccgacgaggaggtgaagaaggccctgaccggcatcaagcagatgaagatcatgatggagagaaaggagaaggagcacaccaacctgatgagcaccctgaagaagtgcagagaggagaagcaggaggccctgaagctgctgaacgaggtgcaggagcacctggaggaggaggagagactgtgcagagagagcctggccgacagctggggcgagtgcagaagctgcctggagaacaactgcatgagaatctacaccacctgccagcccagctggagcagcgtgaagaacaagatcgagagattcttcagaaagatctaccagttcctgttccccttccacgaggacaacgagaaggacctgcccatcagcgagaagctgatcgaggaggacgcccagctgacccagatggaggacgtgttcagccagctgaccgtggacgtgaacagcctgttcaacagaagcttcaacgtgttcagacagatgcagcaggagttcgaccagaccttccagagccacttcatcagcgacaccgacctgaccgagccctacttcttccccgccttcagcaaggagcccatgaccaaggccgacctggagcagtgctgggacatccccaacttcttccagctgttctgcaacttcagcgtgagcatctacgagagcgtgagcgagaccatcaccaagatgctgaaggccatcgaggacctgcccaagcaggacaaggcccccgaccacggcggcctgatcagcaagatgctgcccggccaggacagaggcctgtgcggcgagctggaccagaacctgagcagatgcttcaagttccacgagaagtgccagaagtgccaggcccacctgagcgaggactgccccgacgtgcccgccctgcacaccgagctggacgaggccatcagactggtgaacgtgagcaaccagcagtacggccagatcctgcagatgaccagaaagcacctggaggacaccgcctacctggtggagaagatgagaggccagttcggctgggtgagcgagctggccaaccaggcccccgagaccgagatcatcttcaacagcatccaggtggtgcccagaatccacgagggcaacatcagcaagcaggacgagaccatgatgaccgacctgagcatcctgcccagcagcaacttcaccctgaagatccccctggaggagagcgccgagagcagcaacttcatcggctacgtggtggccaaggccctgcagcacttcaaggagcacttcaagacctggtag

SEQ ID NO: 107562 - DNA, 1401 bp, Artificial Sequence
  derived and/or modified sequence
atgaaaccaccactgcttgtattcatcgtctgtttgttgtggcttaaggactcacactgcgctccaacctggaaagacaagactgcaatttcggagaacttgaaaagtttctctgaagtgggtgagatcgacgcggacgaggaggtcaagaaagccctgaccggtatcaagcagatgaaaataatgatggagagaaaagagaaagaacacaccaatctgatgtccactctgaagaagtgtagggaagaaaagcaggaggcgcttaagttactgaacgaggttcaggagcatctggaagaagaagagcgcctgtgcagagagtctctggccgacagctggggggaatgtaggagttgcctcgagaataattgcatgagaatctacaccacctgccagccttcgtggtctagcgtgaaaaataagattgagaggttcttcaggaaaatttatcagtttctttttccatttcatgaagataacgaaaaggatctgcccatcagcgagaagctgatcgaggaggacgcgcaacttacccaaatggaggacgttttctcccaattgaccgtggacgtcaactcgctgttcaatcgatcctttaatgtgttcagacagatgcaacaggagttcgaccagaccttccagtcacatttcatcagcgacacagatctgacagagccttactttttcccagcattcagcaaagaaccaatgactaaagctgatcttgaacaatgttgggatatccccaattttttccagctcttttgcaatttcagcgtcagcatctacgagtcagtctcagagacgataactaaaatgttgaaggccatcgaagaccttcccaagcaagacaaggcacccgatcacgggggccttattagcaaaatgcttccaggacaggataggggtttatgtggggagctcgatcagaacctaagtcgctgcttcaagttccacgagaagtgtcagaaatgccaagctcacctcagcgaggactgccccgatgtgcccgcactgcatactgagctggacgaggcaatccgtctagtcaacgtctcaaaccaacagtatgggcagattctacagatgacccgcaaacacttggaagatacagcctacctcgtcgagaaaatgagagggcaattcggatgggtgagcgaactggctaaccaggcccccgaaacagagattatttttaacagcattcaggtcgtccctagaattcatgaaggcaacatctctaagcaggatgagaccatgatgacggacctttctatattgcctagcagcaactttacattgaagattcctctggaggagtcagccgaaagttcgaattttatcggttacgttgtggctaaggctctccagcactttaaggaacatttcaagacgtggtag

SEQ ID NO: 107563 - DNA, 1401 bp, Artificial Sequence
  derived and/or modified sequence
atgaaaccaccactgctggtgttcattgtttgtcttctgtggttgaaagattctcattgcgcccctacatggaaagataagacggcaatcagtgaaaatctcaagtccttctctgaggtgggggagattgatgctgacgaggaggtgaagaaggctcttacgggtataaagcagatgaaaattatgatggaaaggaaagagaaggagcatactaatttgatgtccaccctgaaaaagtgcagggaagagaagcaggaggcactgaagctgctcaatgaagtgcaggagcacctggaggaagaagaaaggttatgtcgggaaagtctggcggatagctggggagagtgcaggtcatgtttggagaataattgcatgcggatatatactacctgtcaaccctcttggagctccgttaaaaacaagattgagaggttcttcagaaaaatctaccagtttctattcccttttcacgaggataacgagaaagacctgccaatcagcgagaaacttattgaagaggacgcacaactgacacaaatggaggatgtgttcagccaactaaccgtggacgttaacagtctgttcaacaggtcctttaacgtgtttaggcaaatgcagcaagaattcgatcagacttttcaatctcattttatctctgatactgacctcaccgagccctattttttcccagcattctctaaggaaccaatgacgaaagccgatctggagcagtgctgggacatacccaatttctttcagcttttctgtaatttttcagtgagtatttatgagtctgtctctgaaactattacaaagatgctgaaggctatagaggatctgccaaagcaggacaaggcccccgaccatggtgggctgatatctaagatgctcccaggacaggatagagggctgtgcggagaactcgatcaaaatctatcgaggtgctttaagttccacgagaagtgtcagaagtgtcaagctcacctttcagaggattgcccagacgtccccgccctgcacaccgagctggacgaggccatccggctggtaaatgtgtccaatcagcaatatggccaaatcctgcagatgacaaggaagcacctggaggacactgcttacctagtcgagaaaatgcgtggtcagtttggttgggtgtccgagttagccaaccaggcccctgagactgagatcattttcaactctatccaggtggttccacggatccacgaggggaacatctccaaacaggacgaaacgatgatgacagatctgagcattttgccgtcgagcaactttaccctgaagatcccgcttgaggagagcgccgaaagctctaactttataggctatgtcgtggccaaagcacttcagcactttaaagaacattttaaaacatggtag

SEQ ID NO: 107564 - DNA, 1557 bp, Artificial Sequence
  derived and/or modified sequence
atgcgcacatgggactaccgatggtctctggccttggtcgcccagacaggggtgcattgttgcaacctctcatcgcttcagcctctgccccccaggtttaagcgtttctcctgtctgtccctgtcctccggttgggactacagcaacagtggaaacatgaagcctccccttctcgtcttcattgtttgcctgttgtggttaaaagactcccattgcgcccccacatggaaagacaaaacagctatctcagagaatctgaagtccttctctgaagtgggcgaaatagatgccgacgaggaggtcaagaaggcactaactggcatcaagcaaatgaagatcatgatggagcgaaaagaaaaggagcacactaacttgatgagtaccctgaagaagtgccgagaagagaaacaggaggctcttaagctgttaaacgaggtccaagagcacctagaggaagaagaacgcctgtgcagagagagtctcgccgacagctggggtgagtgtcgctcctgtctggaaaataactgtatgaggatttataccacctgccagccctcttggtcaagcgtaaaaaataagatcgagagattcttcagaaaaatttaccagtttctgtttcccttccacgaggacaatgaaaaggatctgcccatatccgaaaagttgatcgaagaagacgcccagctgactcagatggaggacgttttttcgcagctcaccgtcgacgtcaattctctattcaaccggtccttcaatgtgtttcgccagatgcagcaggaattcgaccagacatttcaaagccattttatctcagatacagacctcacagagccgtacttctttcctgcattttccaaagagccaatgaccaaggccgatctggaacagtgctgggacatccccaactttttccagcttttttgcaactttagcgtgtccatctatgaaagcgtgtccgagaccatcacaaaaatgcttaaagccatcgaggatctgcctaagcaagataaagcaccagatcatggaggtctgatctcgaagatgctgcccggccaggaccgcgggctctgcggtgagctggatcagaatctaagcagatgcttcaaatttcatgagaagtgtcaaaagtgccaagcacacctcagtgaagattgccctgatgtacccgccctgcataccgagctggacgaagctatccgactggtgaatgttagtaatcaacagtatggacagattctgcagatgactcgcaaacatctggaggatacagcctatctagtagaaaagatgagggggcagtttggttgggtgtcggagctcgccaatcaggcccccgaaacggagatcatctttaactctatccaggttgttccacggatccacgaggggaatatttcgaagcaggacgagaccatgatgacagatctgtccattctgcctagttctaacttcacccttaaaatccccctggaagaatccgctgaatctagcaactttatcggttatgtggtcgcaaaggctctccagcattttaaggagcacttcaagacatggtag

SEQ ID NO: 107565 - DNA, 1401 bp, Artificial Sequence
  derived and/or modified sequence
atgaagccacccctgctggtgttcatcgtgtgcctgctgtggctgaaggacagccactgtgcccccacctggaaggacaagacagccatcagcgagaacctgaagagcttcagcgaggtgggggagattgatgctgatgaggaggtgaagaaggccctgaccggcatcaagcagatgaagatcatgatggagaggaaggagaaggagcacaccaacctgatgagcaccctgaagaagtgccgggaggagaagcaggaggccctgaagctgctgaatgaggtgcaggagcacctggaggaggaggagcggctgtgccgggagagcctggccgacagctggggagaatgtcgcagctgcctggagaacaactgcatgaggatctacaccacctgccagcccagctggagctctgtgaagaacaagattgagcgcttcttcaggaagatctaccagttcctgttccccttccacgaggacaatgagaaggacctgcccatcagcgagaagctgattgaagaagatgcccagctgacccagatggaggatgtgttcagccagctgactgtggatgtgaacagcctcttcaacagaagcttcaacgtgttccggcagatgcagcaggagtttgaccagaccttccagagccacttcatcagtgacacagacctgacagagccctacttcttccctgccttcagcaaggagcccatgaccaaggctgacctggagcagtgctgggacatccccaacttcttccagctgttctgcaacttctctgtgtccatctatgaatctgtgtctgagaccatcaccaagatgctgaaggccatcgaggacctgcccaagcaggacaaggccccagaccatggaggcctcatcagcaagatgctgcccggccaggaccggggcctgtgtggggagctggaccagaacctgagccgctgcttcaagttccacgagaagtgccagaagtgccaggcccacctgtctgaggactgcccagatgtgcctgccctgcacacagagctggatgaggccatccggctggtgaatgtgagcaaccagcagtatggccagatcctgcagatgaccaggaagcacctggaggacacagcctacctggtggagaagatgaggggccagtttggctgggtgtctgagctggccaaccaggcccctgagacagagatcatcttcaacagcatccaggtggtgccccgcatccacgagggcaacatcagcaagcaggatgagaccatgatgacagacctgagcatcctgcccagcagcaacttcaccctgaagatccccctggaggagagcgctgagagcagcaacttcatcggctacgtggtggccaaggccctgcagcacttcaaggagcacttcaagacctggtag

SEQ ID NO: 107566 - DNA, 1557 bp, Artificial Sequence
  derived and/or modified sequence
atgaggacctgggactaccgctggagcctggccctggtggcccagacaggagtgcactgctgcaacctgagcagcctgcagcccctgcccccacgcttcaagcgcttcagctgcctgagcctgagcagcggctgggactacagcaacagcggcaacatgaagccacccctgctggtgttcatcgtgtgcctgctgtggctgaaggacagccactgtgcccccacctggaaggacaagacagccatcagcgagaacctgaagagcttcagcgaggtgggggagattgatgctgatgaggaggtgaagaaggccctgaccggcatcaagcagatgaagatcatgatggagaggaaggagaaggagcacaccaacctgatgagcaccctgaagaagtgccgggaggagaagcaggaggccctgaagctgctgaatgaggtgcaggagcacctggaggaggaggagcggctgtgccgggagagcctggccgacagctggggagaatgtcgcagctgcctggagaacaactgcatgaggatctacaccacctgccagcccagctggagctctgtgaagaacaagattgagcgcttcttcaggaagatctaccagttcctgttccccttccacgaggacaatgagaaggacctgcccatcagcgagaagctgattgaagaagatgcccagctgacccagatggaggatgtgttcagccagctgactgtggatgtgaacagcctcttcaacagaagcttcaacgtgttccggcagatgcagcaggagtttgaccagaccttccagagccacttcatcagtgacacagacctgacagagccctacttcttccctgccttcagcaaggagcccatgaccaaggctgacctggagcagtgctgggacatccccaacttcttccagctgttctgcaacttctctgtgtccatctatgaatctgtgtctgagaccatcaccaagatgctgaaggccatcgaggacctgcccaagcaggacaaggccccagaccatggaggcctcatcagcaagatgctgcccggccaggaccggggcctgtgtggggagctggaccagaacctgagccgctgcttcaagttccacgagaagtgccagaagtgccaggcccacctgtctgaggactgcccagatgtgcctgccctgcacacagagctggatgaggccatccggctggtgaatgtgagcaaccagcagtatggccagatcctgcagatgaccaggaagcacctggaggacacagcctacctggtggagaagatgaggggccagtttggctgggtgtctgagctggccaaccaggcccctgagacagagatcatcttcaacagcatccaggtggtgccccgcatccacgagggcaacatcagcaagcaggatgagaccatgatgacagacctgagcatcctgcccagcagcaacttcaccctgaagatccccctggaggagagcgctgagagcagcaacttcatcggctacgtggtggccaaggccctgcagcacttcaaggagcacttcaagacctggtag

SEQ ID NO: 107567 - DNA, 1401 bp, Artificial Sequence
  derived and/or modified sequence
atgaagccccccctgctggtgttcatcgtgtgcctgctgtggctgaaagacagccactgcgctcccacatggaaggacaagaccgcaataagcgaaaacctaaagagcttttcagaggtcggcgagatcgatgccgacgaagaggttaaaaaagccctgaccggcataaaacaaatgaaaatcatgatggaaagaaaggagaaggaacataccaacctgatgagcaccttaaagaagtgtcgtgaagagaagcaagaagcccttaagctgcttaacgaggtgcaggagcatctcgaagaagaagagaggctctgtcgagaaagcctggcagattcctggggggagtgtcgctcttgtttagagaacaattgcatgagaatctacactacatgccagcctagctggagctccgtgaagaacaagattgagaggttttttagaaaaatctaccagtttttattcccatttcacgaagataacgagaaggatctccctatcagcgaaaaattaatcgaggaagacgctcaactgacacaaatggaagatgtcttcagccaactcaccgtggacgtaaactctttattcaaccggagttttaacgtcttccgtcaaatgcagcaagaattcgatcagacgtttcagagtcacttcatcagtgacaccgatctgacagagccctattttttcccagccttttctaaggagcctatgacaaaggccgatttggaacagtgctgggacatccccaactttttccaattattctgcaactttagtgtgtctatctatgagtcagtgtccgagaccatcacgaagatgctgaaggccatagaggacctgccaaagcaagataaagccccagatcacggagggctcatctccaaaatgctcccaggacaggaccgaggactgtgcggcgagttggatcagaacctctcccggtgttttaaattccacgagaagtgccagaaatgtcaggcccatctgagcgaggattgtccggatgtccccgccttgcatacagagctcgatgaggccatccggctggtgaacgtttccaaccaacagtacggtcagatactccagatgacacggaagcaccttgaagacacagcatatctcgtcgagaaaatgagaggacaattcggctgggtgagtgaactggccaaccaggcacctgaaaccgaaattattttcaacagtattcaagtggtgcctaggatccatgaagggaacatcagcaagcaggatgagactatgatgacagacctaagtatccttccctcatccaatttcactctcaaaatccccctggaagagagcgctgagagttcgaactttattggctacgtggtggccaaggcactccagcactttaaggaacactttaagacctggtag

SEQ ID NO: 107568 - DNA, 1401 bp, Artificial Sequence
  derived and/or modified sequence
atgaagccccccctgctggtgttcatcgtgtgcctgctgtggctgaaagatagccactgtgctcctacttggaaggacaagactgctatctccgagaacctaaagtccttcagcgaagtgggagaaatcgacgcagacgaggaagttaaaaaggcactgacaggcattaaacaaatgaagatcatgatggaaagaaaggagaaagagcatactaaccttatgtccacattaaagaaatgccgtgaagaaaagcaggaggccctcaaactgttaaacgaagtgcaggaacatctggaggaagaagagaggctgtgtcgcgagtccctagctgattcttggggcgagtgccgatcatgcctagagaacaattgcatgcgcatctatactacttgtcagccgagttggtcctccgttaagaacaaaattgaaaggttctttcggaagatctatcagtttctgttcccattccatgaggataatgagaaagacctgcctatctccgaaaaacttatcgaggaagacgctcaactgacccagatggaggacgtctttagtcagctcactgtggacgtgaatagcttgtttaataggagcttcaatgtgttccggcagatgcagcaggagttcgaccagactttccaaagtcactttatcagtgatacagacttaaccgagccttactttttccctgcctttagtaaggagccaatgaccaaagcggatcttgagcagtgctgggatattcctaatttcttccagcttttctgcaactttagtgtcagcatctacgaatctgtcagtgaaaccataacaaaaatgctcaaggcaattgaggacctgcccaagcaggataaggctccagaccacggtggactgatctccaagatgttgccaggtcaggatcgggggctgtgtggagaattggatcaaaatctctctcggtgctttaagtttcatgaaaagtgccagaaatgccaagctcacctcagtgaggattgccctgacgtaccagccctgcacaccgagttggacgaggccattcgactagtgaacgtgagtaatcagcagtacggacaaatactccagatgacaagaaaacacctcgaagacacagcatatctcgtggaaaaaatgcgtggccagttcggatgggtgtccgagctggctaatcaagcaccagaaaccgagatcatcttcaactctattcaggtggtcccccggatccatgagggaaatatttcaaagcaggacgagacaatgatgaccgatctaagcattcttcctagcagcaactttactctgaagattcctctggaggaaagcgccgagagcagtaatttcatcggatatgtcgtcgctaaggctttacagcattttaaagagcacttcaaaacatggtag

SEQ ID NO: 107569 - RNA, 1401 nt, Artificial Sequence
  derived and/or modified sequence
augaaacccccacugcuggucuuuauugucugucugcuauggcuaaaggauagucauugugcgccuacguggaaagacaagacagcgauaucagaaaaucucaagagcuucuccgaagugggagagauugacgcagaugaggaagucaaaaaagcucuuaccggaauuaaacagaugaagauuaugauggaaagaaaagaaaaggagcauaccaacuuaaugaguacacugaagaaaugcagagaggagaaacaggaggcacugaaacugcucaacgaagugcaggagcaucuggaggaggaagagcggcucuguagagagucccuagccgauuccuggggcgagugccgcucuugucuggagaauaacugcaugcgaauuuauacuacuugccagccaaguuggucgucugucaagaacaaaaucgaacguuucuuuagaaaaaucuaucaguuccuuuuucccuuucacgaagacaacgagaaagaccuuccgaucagcgagaagcuuaucgaagaagacgcacagcuuacccagauggaggacgucuuuagccaguugacuguggacguaaauagccuuuucaaucggucauucaacguuuuuaggcaaaugcaacaggaguucgaccaaaccuuccagagucacuuuaucagcgauacggaucugacugagccauacuucuuucccgcuuucuccaaggagcccaugacuaaggcagaucuugaacaguguugggauauccccaacuuuuuccaacucuucugcaacuuuucagugaguauuuacgagagugucucugaaaccaucacuaagaugcugaaagcaauugaggaccuccccaaacaagacaaagccccugaucacgggggacugaucaguaaaaugcugccagggcaggauagaggucuuugcggagagcuggaccaaaaucucucacgguguuuuaaguuccacgaaaaaugucagaagugccaggcccaucugucagaggauuguccagauguuccagcacuccacacugaacuugaugaagccaucagacugguaaacguuucaaaccagcaguauggucagaucuugcagaugacucgcaaacaccuggaagacacggcuuaucugguagagaagaugagagggcaauuuggguggguguccgaauuggcaaaucaggcucccgagacugaaaucauuuucaacucuauucaaguaguuccaagaauucacgaaggcaacauuucuaagcaggacgaaacaaugaugaccgaucucaguaucuuaccgagcagcaacuuuacccugaaaaucccgcuggaggagucagccgagagcaguaauuucauugguuaugucguggcgaaggcucugcaacauuucaaggaacacuucaaaaccugguag

SEQ ID NO: 107570 - RNA, 1401 nt, Artificial Sequence
  derived and/or modified sequence
augaagcccccacugcucgucuucaucgugugccugcucugguuaaaggacucucauugcgcacccacauggaaagacaagacagcgauuucagagaaccuuaaaucuuucucagagguaggagagauagacgccgaugaggagguaaagaaggccuuaaccgggaucaagcagaugaaaauuaugauggagaggaaagaaaaagaacacacuaaccuaaugucaacacuuaagaagugucgcgaggagaagcaggaagcccuaaaguuguugaaugaagugcaggagcaccuugaggaagaggaaagacugugccgagaaagccuggccgauaguuggggcgagugucgcucaugccucgaaaacaauugcaugcgcauuuacaccacgugucagccaagcuggucuagcgugaagaauaaaaucgagagguucuuucggaaaauuuaccaauuucuguucccuuuccacgaagacaacgagaaggaccugccuauuucggaaaagcucaucgaagaggaugcucaacuuacucaaauggaagauguuuuuucccaguugacaguggacgugaacagccuuuuuaacagaucguuuaacguuuuuagacaaaugcagcaggaguucgaucagaccuuccagucccacuuuaucucagacacggaucucacagaaccauacuucuucccagcuuucuccaaagagccaaugaccaaggccgaccuggagcaguguugggauauccccaauuucuuucagcucuucugcaauuucuccgugaguauauaugaguccguguccgaaacaaucaccaaaauguugaaggcuaucgaggauuuacccaaacaagauaaggccccugaucauggggggcugauuucgaagaugcuuccuggccaggacaggggucugugcggcgaacuggaccaaaacuugagccgguguuucaaauuccaugaaaagugucaaaagugccaggcccaccuaucggaggauugcccagacgugccugcucugcauacggaacuggaugaagcuauuagacuugugaacgucagcaaccaacaauacggacagauacugcagaugaccagaaagcauuuagaggacaccgccuaccucguugaaaagaugcguggccaguucgguuggguaagugaacucgccaaccaggcacccgagacugagaucauuuucaacucuauucagguggucccgagaauccaugaagggaauauuucuaaacaagacgagacaaugaugaccgaccugucuauuuugccgucgucuaauuucacccucaaaauucccuuagaggagagugccgagagcuccaacuucauuggcuauguugucgcaaaggcguugcagcacuucaaggagcauuuuaaaacaugguag

SEQ ID NO: 107571 - RNA, 1557 nt, Artificial Sequence
  derived and/or modified sequence
augaggacuugggacuacagauggagccuggccuugguggcucaaaccgguguccacugcuguaacuugucgucucugcaaccccuuccaccuagguucaaaagguuuucaugucugucccuuucauccgggugggacuacaguaacucagguaauaugaagccaccuuuguugguuuuuaucgugugcuugcucugguugaaggacucgcacugcgcuccuacguggaaagacaagaccgccaucuccgagaaccuaaagagcuucagcgaggugggcgagauugaugcugaugaggagguuaaaaaggcccucaccgguauaaaacagaugaagauaaugauggagcgaaaagagaaagaacacaccaaccucaugagcacucugaagaagugccgcgaggaaaaacaggaggcccuuaagcugcugaacgaaguccaggaacaucuugaggaggaggaaagacugugccgggaaucccucgcggacucuuggggcgagugcaggucaugccuagaaaauaauugcaugcggauuuacaccaccugccaaccauccuggucauccgucaaaaacaagauugaaagauucuuucgcaagauuuaccaguuuuuguucccauuucacgaggacaaugagaaggauuuacccauaucagagaagcugaucgaagaagaugcccaguuaacucagauggaagacguguucucacaacugacugucgacgugaacagccuguucaauagaaguuuuaauguguuccgccagaugcagcaggaauucgaccagacauuucaaucucacuucauuucugacacagaucucacggaaccuuacuucuuucccgcguucuccaaggaaccgaugaccaaggcugaucucgaacaguguugggauauuccaaacuuuuuccagcuguuuuguaacuuuucagugaguauuuaugagucagucucagagacuauuacuaaaaugcuuaaggccauagaagaucugcccaaacaggacaaagccccggaccauggaggacucaucucaaagaugcuucccggacaggauagaggacugugcggugaacucgaucagaaccugucaagauguuuuaaguuucaugagaaaugccagaagugucaggcccaccucagcgaagauugccccgacguucccgcacuccacaccgagcucgaugaggcuauuagacugguuaacgucucaaaucagcaguacggacagauccugcagaugacaaggaagcaccuagaagauaccgcguaucucguagaaaagaugagagggcaguucgguugggucuccgaacuggcgaaccaggcccccgaaaccgagauuaucuuuaacuccauucaaguggugccacgcauccacgaagggaacaucucuaagcaagaugagaccaugaugacagaccugucuaucuugccaucaucuaacuucacucugaaaauaccucucgaagagucugccgaaagcagcaauuuuaucggcuacgugguugcuaaagcucuccaacacuuuaaggagcauuucaaaacaugguag

SEQ ID NO: 107572 - RNA, 1401 nt, Artificial Sequence
  derived and/or modified sequence
augaagcccccucugcucguauucauugugugccugcuguggcugaaagacucccauugugcccccacauggaaagauaagacugcaaucagugagaaccugaaauccuucagugaaguuggagagaucgacgccgaugaagagguuaaaaaagcccuaaccggaauaaaacagaugaagaucaugauggagcgaaaagagaaagagcauaccaaucugaugaguacucugaaaaagugccgggaggaaaaacaggaagcucugaagcugcugaacgagguccaggaacauuuggaagaagaagagagacuguguagagaaucguuggcagauucuuggggagaaugccguagcugccuggaaaauaacuguaugagaauuuacacaacgugucagccaucguggucaucggugaaaaacaaaauugagagauuuuuucgcaagauuuaccaguucuuguuucccuuccacgaagauaaugaaaaagaccuuccuauauccgagaaacuuauugaggaagaugcccagcuuacccaaauggaagacguauucagucaguugacuguagaugugaauucccuguuuaaccgcagcuuuaacgucuucagacaaaugcagcaggaauuugaccagaccuuccaaagccauuuuauuagcgacacugaucuuacagagccguauuuuuucccugcauucuccaaagaaccaaugacuaaagccgaucuugagcagugcugggauaucccaaauuuuuuccagcucuuuuguaacuucuccgugaguaucuaugagucaguaucugagaccaucaccaaaaugcugaaagcuaucgaggaccuccccaagcaggauaaagcaccugaucauggaggacugauuucuaagauguuacccggacaggauagagggcuguguggugaguuagaucaaaaucugagcaggugcuucaaauuccacgaaaaaugccagaagugccaggcacaucucucugaagacuguccugacguacccgcgcugcacaccgagcuugacgaagcuauucgacuggucaaugucucaaaucaacaguacggacagauacugcaaaugacuagaaaacaucuggaggacacagcuuaucucguugagaagaugagagggcaauuugguuggguaucagagcuugccaaucaagcgccagagaccgaaauaaucuucaauagcauacaagucgugccaagaauccaugaagguaacauuuccaaacaggaugaaaccaugaugaccgacuuguccauccucccaagcuccaauuucacacucaagauuccucuggaagagucagcagagagcagcaacuuuauuggcuacguugucgcuaaagcccuccagcacuuuaaagaacauuucaagacaugguag

SEQ ID NO: 107573 - RNA, 1401 nt, Artificial Sequence
  derived and/or modified sequence
augaagccuccacugcuaguauucauugucugccugcuguggcugaaagacucccacugcgccccaacguggaaagauaaaacagcaaucucugaaaauuugaaaagcuucucagaggugggcgagauugacgcugacgaggaggugaagaaggcacucacaggcauuaaacaaaugaaaauaaugauggaaagaaaagaaaaggagcauaccaaccugauguccacccuuaaaaaaugcagagaagaaaaacaagaagcgcuuaaguuacuuaacgaaguacaggaacaucuugaggaagaagaacggcuuugccgcgagucguuggccgauuccuggggagaaugccgguccugcuuggagaauaauuguaugaggaucuacacgaccugccagccaucaugguccuccguuaaaaauaaaauagaaagguuuuuccggaagauuuaccaguuucuguucccuuuccaugaagauaaugaaaaggaucuacccauuuccgaaaaauugauugaagaagacgcccagcuuacacagauggaagacguauuuagccagcuuacaguagacgucaauagucuguucaaccguucauucaauguauuuagacaaaugcaacaagaguuugaucagacuuuccaaucacacuucaucuccgacacagaucuuacugaaccuuauuucuuucccgccuucucuaaggagccuaugacaaaagcagaucucgagcagugcugggauauuccaaacuucuuucaguuguucugcaacuuuucagugucuauuuaugagucaguauccgaaaccauaacaaaaaugcugaaagccauugaggaucugcccaagcaggacaaagcccccgaccaugguggcuugauuagcaaaaugcugccaggccaggacaggggucugugcggcgaacuggaccaaaacuugagccgguguuucaaauuccaugaaaagugucaaaagugccaggcccaccuaucggaggauugcccagacgugccugcucugcauacggaacuggaugaagcuauuagacuugugaacgucagcaaccaacaauacggacagauacugcagaugaccagaaagcauuuagaggacaccgccuaccucguugaaaagaugcguggccaguucgguuggguaagugaacucgccaaccaggcacccgagacugagaucauuuucaacucaauucagguaguuccuaggauccacgaagguaacauaagcaaacaggaugaaacuaugaugacugaucuaucaauacuaccuucauccaacuuuacacuuaaaaucccucucgaggaaagcgccgagucuucgaacuucaucggcuacguagucgccaaagcccuucagcauuuuaaagaacacuucaaaacuugguag

SEQ ID NO: 107574 - RNA, 1557 nt, Artificial Sequence
  derived and/or modified sequence
augagaaccugggacuacagauggucuuuagcucugguggcacagacaggcgugcauuguugcaaucucucuagcuugcagccccuuccuccccgguuuaagcgcuucaguugucucucucuuuccaguggcugggacuacuccaauucagggaacaugaaaccaccccuuuuaguauucauuguaugcuugcucuggcugaaagauagccacugcgccccgacauggaaggauaaaacagcaauuucagagaaccucaagucuuucagugaagugggagagaucgacgcagacgaagagguuaagaaggcccugacagggaucaagcagaugaaaaucaugauggaacgaaaagaaaaagaacacacaaauuugaugagcacccuaaaaaaaugcagagaggagaaacaagaggccuuaaaacugcucaacgagguacaggagcauuuggaagaagaggagagacuuugcagagaaucucuggccgacuccuggggagaauguagguccuguuuagagaauaacuguaugcgaauauacaccacaugccagccuucuuggucaagcgucaagaacaagauugagcgguucuuccgaaagauuuaucaguuucucuuuccuuuucacgaagacaacgaaaaagaccugcccauuucagagaaauuaauugaagaagacgcccagcuaacacaaauggaagacguguucucccaacugacaguagaugugaacucacuguucaauagaucuuuuaauguauuuaggcagaugcagcaagaauucgaucagacuuuucagucacauuucauuagugacaccgaccucacagagcccuacuucuuuccagccuuuagcaaagaacccaugaccaaagccgaccucgagcagugcugggacaucccaaacuuuuuccaacuuuucugcaauuuuuccguuucuauuuaugaaucugucuccgaaacuaucacuaagaugcugaaagccaucgaggaucucccuaagcaagacaaagcacccgaccauggcggguuaauauccaaaaugcugcccggacaggauaggggacugugcggagaguuagaccagaacuuauccagaugcuuuaaauuccacgagaagugucagaaaugccaggcccaccucucagaggauugucccgaugugcccgcacuucauacugaguuggacgaagcgaucagguuggucaaugugucgaaccagcaauauggccagauucugcaaaugacccgcaagcacuuagaggauaccgcauauuuaguagagaagaugcggggccaauucggauggguaucugagcucgcuaaccaagcacccgaaacugagauuauuuucaauagcauccagguggugccacgaauccacgaaggcaauauuaguaagcaggacgaaaccaugaugacugaucucucuauacugcccuccucaaauuuuacauugaaaauucccuuagaggaaucagccgagucauccaacuucauuggcuacgucgucgcaaaagcccuucagcacuucaaagagcauuucaaaaccugguag

SEQ ID NO: 107575 - protein, 411 aa, Artificial Sequence
  derived and/or modified sequence
MATHSPQKSHQCAHCEKTFNRKDHLKNHLQTHDPNKMAFGCEECGKKYNTMLGYKRHLALHAASSGDLTCGVCALELGSTEVLLDHLKAHAEEKPPSGTKEKKHQCDHCERCFYTRKDVRRHLVVHTGCKDFLCQFCAQRFGRKDHLTRHTKKTHSQELMKESLQTGDLLSTFHTISPSFQLKAAALPPFPLGASAQNGLASSLPAEVHSLTLSPPEQAAQPMQPLPESLASLHPSVSPGSPPPPLPNHKYNTTSTSYSPLASLPLKADTKGFCNISLFEDLPLQEPQSPQKLNPGFDLAKGNAGKVNLPKELPADAVNLTIPASLDLSPLLGFWQLPPPATQNTFGNSTLALGPGESLPHRLSCLGQQQQEPPLAMGTVSLGQLPLPPIPHVFSAGTGSAILPHFHHAFR

SEQ ID NO: 107576 - protein, 176 aa, Artificial Sequence
  derived and/or modified sequence
MATHSPQKSHQCAHCEKTFNRKDHLKNHLQTHDPNKMAFGCEECGKKYNTMLGYKRHLALHAASSGDLTCGVCALELGSTEVLLDHLKAHAEEKPPSGTKEKKHQCDHCERCFYTRKDVRRHLVVHTGCKDFLCQFCAQRFGRKDHLTRHTKKTHSQELMKESLQTGDLLSTFHTI

SEQ ID NO: 107577 - DNA, 1236 bp, Artificial Sequence
  derived and/or modified sequence
atggccacacactccccccaaaaatcccatcaatgcgctcattgcgagaagacatttaaccgcaaggaccatttgaaaaaccatctccaaacacacgatcctaataaaatggccttcgggtgcgaggaatgcggcaagaagtacaacacaatgctcggctacaaacggcatctagcactccatgccgcttcctcaggggatctaacatgcggtgtatgcgcattagaactaggctctacggaggtgttactggaccacctcaaggcccacgctgaagagaagccacccagtggtacgaaggagaaaaaacatcagtgcgatcattgcgagcggtgtttctacacacgcaaggacgtcagacggcacctggtagtccataccggatgcaaggattttctgtgtcagttttgcgctcagcgattcggtcgcaaggaccacctaacacgtcacacgaaaaaaacacatagtcaggagctgatgaaagaaagtctccagaccggcgatctcctgagtaccttccatactatctcccccagttttcagctgaaggctgccgcgctgccccctttcccgctgggcgcctctgcgcagaatggattggcctcgtcactccccgccgaggtccacagtttgacactctcacctcccgagcaagccgcccaacccatgcagcctctgcctgaaagcctcgcatcactgcatccatctgtgtcacctggatccccgccaccacccttaccaaatcacaagtacaataccacatctacaagctacagcccacttgccagcctccctcttaaggctgacacgaagggcttctgcaacatcagtctctttgaagacctgccgctccaggaaccacaaagccctcaaaagctcaatcccgggtttgatttagcaaaaggaaatgccggcaaggttaacctgccaaaagaacttcctgctgatgccgttaatctgactattcctgcatccctggatctgtcacccctccttggattctggcagctgccaccaccagcaacccagaatacattcggaaacagcaccctggccctgggaccgggcgagtccctcccccatcgcctgtcatgtctgggccagcagcagcaggagccacccctggccatggggaccgtaagtcttggccagttaccactgcctcccatcccccatgtctttagcgccggaacaggctctgccatccttccgcacttccaccacgcgtttcgctag

SEQ ID NO: 107578 - DNA, 1236 bp, Artificial Sequence
  derived and/or modified sequence
atggccacccatagcccgcagaaatcacaccaatgtgcccactgcgagaagacattcaataggaaggaccacctcaaaaatcacctgcagacacatgacccaaataaaatggcttttgggtgtgaagaatgcgggaagaagtacaatactatgttgggctataaaagacatctggccctccatgcagctagctccggcgatctgacgtgcggcgtgtgcgccttggagctgggttccacagaggtcctcttggaccacctgaaggctcatgcagaggaaaaacctccatctggcaccaaagaaaagaaacaccagtgcgaccactgtgagcgctgtttttacactaggaaagacgttagaagacacttggttgtacataccggctgtaaggacttcctgtgccagttttgcgcccagagattcgggaggaaagaccacttaactcggcacacgaaaaaaacgcattctcaggagttaatgaaggagtccctccagaccggagatttgctgtcgaccttccacaccatcagcccaagctttcagcttaaggcagcagccttgccaccattccctttgggcgcctccgcccagaacggtctggcaagctcactccccgctgaagtgcatagcctgacactaagccctcctgagcaagcagctcaacccatgcagcctctcccggagagcctcgcatctctccacccttccgttagcccagggagtccgccaccgcctcttcccaaccacaagtacaacaccacaagcacctcttattcccctctggcgtccttgcccctgaaggccgataccaaaggcttttgcaacatctcactatttgaggatttgcctctccaggagccccaatctccgcagaaactgaaccctggctttgatttggccaagggtaacgccggaaaagtgaatctcccaaaagaactgcccgccgatgccgtaaacctcactatccctgcctcattagacctctctccacttcttgggttctggcagttgcccccacctgcaacccagaacacctttgggaactccacactggctctggggccaggtgagtcgctgccgcatcggctatcctgcctcggccagcagcaacaggaaccccctctggctatgggcactgtgtcattgggccagcttccactgcctcctatcccacacgtctttagcgctggaacgggttccgcaatactgccccattttcaccacgcctttagatag

SEQ ID NO: 107579 - DNA, 531 bp, Artificial Sequence
  derived and/or modified sequence
atggctactcacagtccacagaagagtcatcagtgcgctcattgcgaaaaaactttcaaccgcaaggatcaccttaaaaatcacctccagacacacgatcctaacaaaatggcattcggctgcgaggagtgcggcaagaagtacaacactatgctggggtacaagcgtcacctcgccttgcatgcagcgagctcaggagatcttacgtgcggagtgtgtgccctcgaactagggagcacagaggtgctgctggaccacttaaaagcacacgctgaggagaagcccccgagcggcaccaaggagaagaaacatcagtgcgaccattgcgagcgttgtttttacactcgaaaagacgtacggcgtcatctggtcgttcatactggctgtaaagatttcctttgccagttttgcgcccagcgattcggcaggaaggaccatctcacacgccacaccaaaaaaactcactcgcaggaattgatgaaggaatccctccagaccggcgatctcctgagcaccttccataccatctag

SEQ ID NO: 107580 - DNA, 1236 bp, Artificial Sequence
  derived and/or modified sequence
atggccacacattcccctcagaaaagtcaccagtgtgcccactgtgagaagacattcaaccgaaaagatcatttaaaaaaccacctgcagacacacgaccccaataaaatggccttcggttgcgaggagtgtgggaaaaagtataataccatgctaggctataagcggcaccttgcccttcacgccgcaagcagtggcgacctgacttgtggcgtgtgtgccctggaactcggcagcactgaggtactgttagatcacttgaaggcccatgccgaggagaaaccaccaagcggaacgaaagagaagaaacatcaatgcgatcactgcgagcgctgcttctatacaagaaaagacgtgcgccggcacctcgtggttcacactgggtgtaaggacttcctgtgccagttctgtgcacagaggttcggccgaaaagaccaccttacaagacacacaaaaaagacacacagtcaggaactcatgaaggaatccttacagaccggagatctcttgtctactttccatacgatttccccttctttccagctcaaggccgctgctctgccaccgtttcccctaggagcttccgcccaaaacggcctcgcctctagcctgcccgctgaggtgcatagcttgaccctgagcccgcctgagcaggcggcccagccgatgcagcccctcccagagagccttgcaagtctgcacccgtctgtatcacccggtagccctccacctccactgccgaatcacaagtataatacaaccagcaccagctattcccctctggcaagtttgcccctgaaggcggatacaaaaggcttctgtaacatttccttgtttgaggatctgccgttgcaggaaccccagagcccacagaaactcaatcctggctttgacttggctaaaggcaacgccggtaaggtcaatctcccgaaagaactgcccgccgacgccgtgaatttgacgatccccgcgagtctggatttatcacccctgctggggttttggcagctaccgccaccagctactcagaatacattcggcaatagtaccctggctttgggtcccggggagtctctgcctcacagattgagttgcctgggccagcagcagcaggagcctcccctagccatgggaacggtgtcattaggccagttgcctctcccccctatcccccatgtcttctcagcggggacgggcagcgctatacttcctcatttccatcacgcattcaggtag

SEQ ID NO: 107581 - DNA, 759 bp, Artificial Sequence
  derived and/or modified sequence
atgaaggaaagcctccagacgggagatcttctgagcaccttccacacaattagcccttcattccagctgaaggcggccgctctgccaccgtttccattgggagcctctgcccagaacgggcttgcctcctcactgcccgcagaggtacactccctgactctatcccctcctgagcaagccgctcaaccaatgcagcctctgccagaatctttggcatctcttcatccctctgtgtcccctgggtctcccccccccccactccccaaccataagtacaacacaacatcaacgtcctacagtccgctggcaagcttgcctctgaaggccgatacaaagggattttgtaatatctctctgttcgaggatcttccacttcaggaaccccagtcgcctcaaaagcttaaccctggattcgatctggccaaaggaaacgctggcaaggtgaacctgcctaaagaactccctgctgacgcggtgaatctcacaatccccgcctccctagatctctctcccctgctagggttctggcagcttccaccccccgcgacacaaaatacgttcggcaactccaccctggctttgggtcccggggaatccctgccccatagattgagctgtttgggacaacaacagcaggagcctcccctagcaatggggaccgtgagcttgggtcagctgcccctgcctcccattcctcacgtttttagtgccggaaccggttccgcaattctaccccatttccatcatgcattccggtag

SEQ ID NO: 107582 - DNA, 1236 bp, Artificial Sequence
  derived and/or modified sequence
atggccacccacagcccccagaagagccaccagtgtgcccactgtgagaagaccttcaacaggaaggaccacctgaagaaccacctgcagacccatgaccccaacaagatggccttcggctgtgaagaatgtgggaagaagtacaacaccatgctgggctacaagaggcacctggccctgcacgccgccagcagcggggacctgacctgtggggtgtgtgccctggagctgggcagcacagaggtgctgctggaccacctgaaggcccatgctgaggagaagcccccatctggcaccaaggagaagaagcaccagtgtgaccactgtgagcgctgcttctacaccaggaaggatgtgcggcggcacctggtggtgcacacaggctgcaaggacttcctgtgccagttctgtgcccagagatttggaaggaaggaccacctgaccaggcacaccaagaagacccacagccaggagctgatgaaggagagcctgcagacaggagacctgctgagcaccttccacaccatcagccccagcttccagctgaaggctgctgccctgccccccttccccctgggcgccagcgcccagaatggcctggccagcagcctgcctgctgaggtgcacagcctgaccctgagccccccagagcaggccgcccagcccatgcagcccctgcctgagagcctggccagcctgcaccccagcgtgtccccaggcagccccccaccacccctgcccaaccacaagtacaacaccaccagcaccagctacagccccctggccagcctgcccctgaaggctgacaccaagggcttctgcaacatcagcctgtttgaggacctgcccctgcaggagccccagagcccccagaagctgaaccctggctttgacctggccaagggaaatgctgggaaggtgaacctgcccaaggagctgcctgcagatgctgtgaacctgaccatcccagccagcctggacctgagccccctgctgggcttctggcagctgcccccaccagccacccagaacaccttcggcaacagcaccctggccctgggccctggagagagcctgccccaccggctgagctgcctgggccagcagcagcaggagccccccctggccatgggcaccgtgtccctgggccagctgcccctgccccccatcccccacgtgttttctgctggcaccggcagcgccatcctgccccacttccaccacgccttcagatag

SEQ ID NO: 107583 - DNA, 531 bp, Artificial Sequence
  derived and/or modified sequence
atggccacccacagcccccagaagagccaccagtgtgcccactgtgagaagaccttcaacaggaaggaccacctgaagaaccacctgcagacccatgaccccaacaagatggccttcggctgtgaagaatgtgggaagaagtacaacaccatgctgggctacaagaggcacctggccctgcacgccgccagcagcggggacctgacctgtggggtgtgtgccctggagctgggcagcacagaggtgctgctggaccacctgaaggcccatgctgaggagaagcccccatctggcaccaaggagaagaagcaccagtgtgaccactgtgagcgctgcttctacaccaggaaggatgtgcggcggcacctggtggtgcacacaggctgcaaggacttcctgtgccagttctgtgcccagagatttggaaggaaggaccacctgaccaggcacaccaagaagacccacagccaggagctgatgaaggagagcctgcagacaggagacctgctgagcaccttccacaccatctag

SEQ ID NO: 107584 - DNA, 759 bp, Artificial Sequence
  derived and/or modified sequence
atgaaggagagcctgcagacaggagacctgctgagcaccttccacaccatcagccccagcttccagctgaaggccgccgccctgccccccttccccctgggcgccagcgcccagaatggcctggccagcagcctgcctgctgaggtgcacagcctgaccctgagccccccagagcaggccgcccagcccatgcagcccctgcctgagagcctggccagcctgcaccccagcgtgtccccaggcagccccccaccacccctgcccaaccacaagtacaacaccaccagcaccagctacagccccctggccagcctgcccctgaaggctgacaccaagggcttctgcaacatcagcctgtttgaggacctgcccctgcaggagccccagagcccccagaagctgaaccctggctttgacctggccaagggaaatgccggcaaggtgaacctgcccaaggagctgcctgcagatgctgtgaacctgaccatcccagccagcctggacctgagccccctgctgggcttctggcagctgcccccaccagccacccagaacacctttggaaacagcaccctggccctgggccctggagagagcctgccccaccggctgagctgcctgggccagcagcagcaggagccccccctggccatgggcaccgtgtccctgggccagctgcccctgccccccatcccccacgtgttttctgctggcactggaagtgccatcctgccccacttccaccacgccttcagatag

SEQ ID NO: 107585 - DNA, 1236 bp, Artificial Sequence
  derived and/or modified sequence
atggccacccacagcccccagaagagccaccagtgcgcccactgcgagaagacctttaatcggaaagaccatttgaagaatcacctgcagacacacgatcctaacaagatggcattcgggtgcgaggaatgtggaaagaagtacaacactatgttaggctataaacgacatcttgccttgcatgccgccagctcgggcgatctcacatgtggggtttgcgcccttgaattgggatcaaccgaggtgttgcttgaccatctgaaagcccacgccgaagagaaacctccctccgggaccaaagaaaaaaagcaccagtgtgaccactgtgagcggtgtttttacacaagaaaggacgtgaggagacacctggtggtccacactggctgcaaggacttcttgtgtcagttttgtgcccagcgctttgggcgcaaagatcacctgacacgtcacaccaaaaagacacattcgcaagaattgatgaaggagagtctgcagacaggcgatctattaagcacgtttcatacaatttcaccatctttccagctgaaggcggcggctttaccaccattccccctcggcgcaagtgcccagaacggactggcatcctctttgcccgccgaagttcattcgttaaccctgagccccccagaacaggctgcccagcctatgcaacccctaccagagagcctagcctcccttcacccttccgtgagcccaggatcgccccctcctcctttgcccaaccacaagtataacaccacaagtacttcttatagtcctcttgccagccttcccctgaaagcagacacaaagggattttgcaacatctcattgtttgaagatctgccactgcaggagccgcaatcccctcagaaacttaatcccggtttcgacctggctaaaggaaacgctggcaaggtcaaccttcctaaagagctccccgccgacgcagttaaccttaccatccctgcaagcctggacctcagtcctctgctgggcttctggcagttacctcccccggctacacagaatacattcggcaactctaccctggcgctcgggcccggagagagtcttcctcatcgcctgtcatgtctgggacaacagcagcaggagcccccacttgcgatgggcactgttagcctcggtcagctgcccctcccaccaatccctcatgtcttttcggctggaacgggctctgccattttaccgcattttcatcacgcctttcgctag

SEQ ID NO: 107586 - DNA, 1236 bp, Artificial Sequence
  derived and/or modified sequence
atggccacccacagcccccagaagagccaccagtgcgcccactgcgaaaagacttttaaccggaaggaccacttgaaaaatcatctccagacccacgatcctaataaaatggcatttggttgcgaggaatgtgggaagaagtacaatacaatgctcggctacaaaaggcaccttgccctgcatgcagcttccagtggggacctcacctgtggtgtgtgcgcactggaattaggttccacagaagtcctgctagatcatctgaaggcccacgcagaagaaaaacccccctcaggcaccaaggagaagaagcaccagtgcgaccactgcgagcgatgcttttatacacgcaaggacgtccggcgccatttggtcgtgcacacaggttgcaaggatttcctttgccaattctgtgcccagagatttggccggaaggatcatctcacgcgacacaccaagaaaacccactctcaagagctgatgaaggagtccttacagaccggagatctgctcagcactttccataccatctccccctctttccagctcaaggcagctgctctgcctccattccccttgggcgcgagcgcccaaaacggactcgcctcctcactgcccgctgaggtccattctcttaccctcagtcctccagagcaggccgcccaacccatgcaacctctgcccgagtctctggcctccctccacccatcagtttcgccaggttctcctccccccccattgcccaatcacaagtataacaccaccagcacaagctatagtccgcttgcttcccttccactgaaagccgataccaagggtttttgtaatatcagtttgttcgaagacctgcccttgcaggagccacagtctccccagaaactgaatcctggtttcgacctggccaagggcaacgccggtaaggtgaatcttcccaaagaattgcccgcggacgcagtcaaccttaccatcccggcgagcctggatttgagccccttgctcgggttctggcaacttcctccacccgcaacccagaacaccttcggtaactcaacccttgctttaggacctggtgaatcactcccgcatcgtctgagttgcctgggacagcagcagcaggaaccccccctggcgatgggcacagtgagcctcggtcagctgcctctgcctcccatcccacacgtattctcggctggcacgggcagcgctattctgccacatttccaccacgcctttaggtag

SEQ ID NO: 107587 - DNA, 531 bp, Artificial Sequence
  derived and/or modified sequence
atggccacccacagcccccagaagagccaccagtgcgcccactgcgagaaaacctttaaccgtaaggaccacttaaagaatcaccttcagacccatgatccaaataaaatggctttcgggtgtgaggagtgtggcaaaaagtacaacacgatgctggggtacaagcggcatctggccttgcatgctgcttcatctggagacctcacctgtggggtttgtgctctagagctggggagcacggaggtgctactggatcatcttaaggcccacgctgaagagaagcccccgtctggcaccaaggagaaaaagcaccagtgcgaccactgtgagcgctgtttctatacacgcaaggacgtgcgaagacacctggtggtccacactggttgtaaagactttttgtgccagttctgtgcccaacgcttcggtaggaaagatcatttgacccgccacacaaagaaaacccacagtcaggaactgatgaaagaatcactccagacgggggatcttttgtctacattccacaccatctag

SEQ ID NO: 107588 - DNA, 1236 bp, Artificial Sequence
  derived and/or modified sequence
atggccacccacagcccccagaagagccaccagtgcgcccactgcgagaagacctttaaccgcaaagatcatttaaagaaccacctccagacccacgatcctaacaagatggcttttggctgtgaggaatgcggcaagaagtataataccatgttgggctacaaacgtcatctcgctctgcacgctgcctcttcgggagatcttacctgtggggtctgcgccctggagctgggtagcactgaggtgttgttggatcatctgaaagcccacgctgaggaaaaacctccgtccggcaccaaagaaaaaaagcaccagtgtgatcactgtgagcggtgtttctacactcgaaaggatgtgcgccgccacctggtggtccacacaggatgcaaagatttcctttgccagttttgtgcacaacggttcggacgtaaagatcatcttacccgtcacacaaagaagacccacagccaggagctcatgaaagaatccctccagactggcgacctcctgagcacattccatacaatctcaccgagtttccagttaaaagccgccgcactgccccctttccccctcggggcgtcggcacaaaacgggctggcttcttcacttccggcagaggtgcactcattaacattaagcccacccgagcaggcggcccagccaatgcaacccctgccagaatccctcgcttctcttcatccttctgtgagtcctggcagccccccccctcctttacccaaccataaatataacaccacaagcacgagctattcacctttagcctccctgcccctgaaggccgacactaagggcttctgcaatatcagcctatttgaggatttgccattgcaggagccacagtctcctcagaaacttaatcccggcttcgacttagcaaaaggcaatgcggggaaggtaaaccttccgaaggagctgccagcagatgctgtgaatctcaccatccccgcttcccttgatctttcaccactgctggggttctggcaattgcctccacctgccacccagaatacctttggcaatagcactctggctctagggcccggcgaatccctgccgcaccgcctttcctgtcttggtcaacagcagcaggagcctccactagcaatggggaccgtcagcctgggacaacttcctctccctcccataccgcacgtgttcagcgcaggtaccggcagtgcgatactgccacacttccatcacgcttttagatag

SEQ ID NO: 107589 - DNA, 759 bp, Artificial Sequence
  derived and/or modified sequence
atgaaggagagcctgcagaccggcgacctgctgagcaccttccacaccatttcccccagttttcagctgaaggcagctgccctcccccccttcccacttggtgcgtccgcacagaacggcctggcatctagtctccccgcggaagtgcactccctcaccctgagtcctcccgagcaagccgctcagcctatgcagcccctcccagaaagcctggcctccttgcacccctctgtgagtcctggctcaccgccccccccacttccaaaccataagtacaacacaaccagcaccagctactcccccctggcttctttgccacttaaagctgataccaagggcttctgcaacattagtctattcgaagacctgcccctccaggaacctcagtctccccaaaagcttaaccccggcttcgacctggccaagggcaacgctggtaaggtcaacctgcccaaggaactccctgcagacgcagttaacctgaccattcctgctagccttgatctcagccctctcctcgggttttggcagctgccacccccagccacacaaaatacatttggcaactccacgctggctcttggtcctggtgagtcactgcctcaccgtctgagttgcttagggcaacagcagcaggagccccccctggcgatggggaccgtcagccttgggcagctcccactgccaccaatcccacacgtttttagcgcaggaaccggttctgctatcctacctcactttcaccacgctttccgttag

SEQ ID NO: 107590 - DNA, 1236 bp, Artificial Sequence
  derived and/or modified sequence
atggccacccatagtccacagaagagccaccaatgtgcccactgtgagaagacattcaatcgaaaagaccatttgaaaaatcacctacagacacacgatcccaataaaatggccttcggctgcgaagaatgtggaaagaagtacaatacaatgctagggtataaaagacacctcgctctgcacgctgccagttcgggcgatctcacttgcggcgtttgtgcccttgagctgggctctacagaggtgctgttggaccacctgaaggctcatgctgaggagaagcccccaagtggaacaaaagagaaaaaacatcaatgcgatcactgcgaacggtgtttctatacccggaaagacgtgaggcggcacctggtggtgcatactgggtgtaaggatttcctgtgtcagttttgtgcgcagcggtttggcagaaaggaccacttaaccagacacaccaaaaagactcatagtcaggagctgatgaaagagtccctgcagacaggagatctgctgtccacatttcatacgatcagcccgagctttcagttgaaagcagccgctttgccgcctttcccccttggcgcatccgcgcagaacggcctcgcctcttccctccctgcggaagtacattcacttactctctctccccctgagcaggccgcacagccgatgcagcctctccctgagtcgctggccagtcttcacccttccgtaagcccgggttccccacctcctccactcccaaaccacaagtacaatactacttcaacttcttattctcctctcgcctccctgccccttaaagcagacactaaaggattctgcaatatctcactgtttgaggatttgcccctgcaggaacctcagagtccccagaaactgaatcctggtttcgatttggccaaaggcaacgccggtaaggtgaatctccctaaggaactccctgccgatgctgtgaatcttacaatccctgcttcactcgacctgagtccgctgctagggttctggcaactgccaccgcctgctacacagaacacctttggtaactccacgttggctctgggcccaggggagtctttaccccacagactcagctgccttggacaacaacaacaggagcctcctctggccatgggaacagttagtctggggcaactcccactccctcccattccacacgtgttctcagcaggaactggctctgccatccttccccattttcaccacgcattccggtag

SEQ ID NO: 107591 - DNA, 1236 bp, Artificial Sequence
  derived and/or modified sequence
atggcaactcattctccacagaaatcgcatcaatgtgctcactgtgaaaaaacatttaacaggaaagaccacctcaagaaccacctgcagactcacgatcctaataagatggcattcggatgtgaagagtgtgggaagaaatataacacaatgctgggatacaaaagacatctggccctccatgcggcttctagcggtgatctcacctgtggcgtgtgcgctctggagctcggatcaaccgaagttctccttgatcacctgaaagcccatgcagaggagaaacctccgtcagggaccaaggaaaagaagcaccagtgtgaccactgcgaaaggtgcttctatactagaaaagacgttagaaggcatctcgtggtccataccgggtgcaaagattttctgtgccaattctgcgctcagaggtttggtcgcaaggatcatctcactcggcacacaaaaaagacacacagccaggaactgatgaaggagtctcttcagactggagacctcctttccacatttcatacaatatccccgagtttccagcttaaggctgcggcattgccaccgtttccactgggcgcaagtgcccagaatggccttgcttctagcctgcccgcagaagtgcattcattaacactcagccctcctgaacaggcagcccagcccatgcagccgctgccagagagcttggcgtctttacatccttccgtgagccccggatcccctccacccccactgcccaatcacaagtacaacacaacgagcacctcttactcacccctggccagcttgcccctcaaggcagacactaaagggttctgtaatatttccttattcgaagacctgcccttacaggagccccagagccctcagaagttaaatcccggattcgacttggccaagggcaatgctggcaaagtgaatctccctaaagaactccccgctgatgccgtaaacctcactatccccgcttctcttgacctctctccccttcttggattttggcagttgcccccacctgccacacagaataccttcgggaactccacacttgcgttagggccaggggagtccctgccacaccgcctgtcttgcctcggacaacagcagcaggagccaccgctcgctatgggcactgtgtcccttgggcagctgcctctgccaccgattccccacgtttttagcgccggaactggcagtgccattctgccccacttccaccacgccttccgttag

SEQ ID NO: 107592 - DNA, 531 bp, Artificial Sequence
  derived and/or modified sequence
atggccactcactcacctcaaaagagtcaccaatgcgctcattgcgaaaaaacttttaaccgaaaagatcacctgaaaaaccatcttcagacccacgaccctaacaaaatggcctttggctgcgaggaatgcggcaaaaaatataacaccatgcttgggtataagagacacttggcactgcatgctgccagctccggggacttgacatgcggtgtatgcgcgctggagctggggtctactgaggtactgctagaccacctgaaggcgcacgcagaagagaagcccccatcggggaccaaagaaaaaaaacaccaatgcgaccactgcgagagatgtttctataccagaaaggacgtccggagacaccttgttgtgcacacaggatgcaaggactttctgtgtcagttttgtgcacaaaggtttggccgaaaggatcatcttaccaggcatactaagaagactcattctcaggagttaatgaaggagtcactgcagacaggcgaccttctgtctaccttccataccatctag

SEQ ID NO: 107593 - DNA, 1236 bp, Artificial Sequence
  derived and/or modified sequence
atggcgactcactctccacagaaaagtcaccagtgtgctcactgcgaaaaaacctttaaccggaaagatcatctcaaaaaccaccttcagacccatgatccaaacaaaatggccttcgggtgtgaggagtgcggtaagaaatacaatactatgctgggttataagcggcacctggcactgcatgccgcatcctccggagatctcacctgtggggtttgcgccctggaactggggtccacggaagtgctgcttgatcatctcaaggcacacgcagaggaaaaaccaccatcgggaacaaaagaaaagaagcaccagtgcgaccactgtgagcgctgcttctataccaggaaagatgttagaaggcacctcgtagtacacaccggctgcaaggactttttgtgccaattttgcgctcagaggtttggtcgcaaggatcatctgacacgtcataccaagaagacacactcgcaggaacttatgaaggaatccctgcagaccggagatctgctgtctacattccatactatctccccaagctttcagctcaaggccgctgccctcccccctttcccgttaggagcctcagcccagaatgggcttgcttcatctctgccagcagaggtccatagcctgaccctatcccctccagaacaggctgcccaaccaatgcaacctctgcctgagtccctcgcgtctttgcacccatctgtaagcccagggtcaccacctccccctctcccaaatcacaagtataacactaccagcacctcctattcccctcttgccagcttaccgttgaaggccgatacaaaaggcttttgcaacattagtctcttcgaggacttgcctctccaggagccacagagtccgcaaaagctgaaccccggatttgatctcgccaaggggaatgccggaaaagtcaacttgcctaaagagctccccgcagatgctgtcaatttgaccatccctgctagtcttgacctgtcaccgcttttgggcttttggcaactccccccacctgccactcaaaacactttcggaaattctacactcgcgctggggccaggagagtctttaccccaccggctttcctgcctgggccagcagcaacaggaaccgcctctggccatgggaaccgtgtccttggggcagctccccctgccccctataccacatgtcttcagcgctggcacagggtcagcaatcctgccccatttccaccacgctttccgctag

SEQ ID NO: 107594 - DNA, 759 bp, Artificial Sequence
  derived and/or modified sequence
atgaaggaatctctacagactggagacctgctgtccacctttcatacaatttcaccttcttttcagctcaaggccgctgctctgcctcctttccccctgggcgcatctgcccagaatgggctggctagctcattgcctgccgaggtccactcccttaccctaagtccccctgagcaggctgcccagccaatgcagccactccctgagagcttggcctccctgcaccctagcgtgagccctggctcaccccctcctccactgcctaaccataaatacaatactactagcacaagctactctcctcttgccagcctgccgctcaaggctgacactaagggattctgcaacatttctttgttcgaggacctacctctgcaggaaccgcagagtcctcaaaaactgaatcccggtttcgatcttgccaaagggaacgccggtaaagtgaacctgcctaaggaattacctgcggacgccgtgaatttaactatacccgcttctctggacctctctccactgctggggttctggcaacttccacctcctgcgacacagaacacttttggaaatagcacactggctttgggccctggagagtctcttccacacaggcttagttgcctcggccagcagcagcaagagccccctctggcaatgggaacagtttcactgggccaactgccactcccccctatcccccacgtcttctctgcagggactggatccgcaatcctgccacactttcaccatgccttccggtag

SEQ ID NO: 107595 - DNA, 1236 bp, Artificial Sequence
  derived and/or modified sequence
atggccacccacagcccccagaagagccaccagtgcgcccactgcgagaagaccttcaacagaaaggaccacctgaagaaccacctgcagacccacgaccccaacaagatggccttcggctgcgaggagtgcggcaagaagtacaacaccatgctgggctacaagagacacctggccctgcacgccgccagcagcggcgacctgacctgcggcgtgtgcgccctggagctgggcagcaccgaggtgctgctggaccacctgaaggcccacgccgaggagaagccccccagcggcaccaaggagaagaagcaccagtgcgaccactgcgagagatgcttctacaccagaaaggacgtgagaagacacctggtggtgcacaccggctgcaaggacttcctgtgccagttctgcgcccagagattcggcagaaaggaccacctgaccagacacaccaagaagacccacagccaggagctgatgaaggagagcctgcagaccggcgacctgctgagcaccttccacaccatcagccccagcttccagctgaaggccgccgccctgccccccttccccctgggcgccagcgcccagaacggcctggccagcagcctgcccgccgaggtgcacagcctgaccctgagcccccccgagcaggccgcccagcccatgcagcccctgcccgagagcctggccagcctgcaccccagcgtgagccccggcagcccccccccccccctgcccaaccacaagtacaacaccaccagcaccagctacagccccctggccagcctgcccctgaaggccgacaccaagggcttctgcaacatcagcctgttcgaggacctgcccctgcaggagccccagagcccccagaagctgaaccccggcttcgacctggccaagggcaacgccggcaaggtgaacctgcccaaggagctgcccgccgacgccgtgaacctgaccatccccgccagcctggacctgagccccctgctgggcttctggcagctgcccccccccgccacccagaacaccttcggcaacagcaccctggccctgggccccggcgagagcctgccccacagactgagctgcctgggccagcagcagcaggagccccccctggccatgggcaccgtgagcctgggccagctgcccctgccccccatcccccacgtgttcagcgccggcaccggcagcgccatcctgccccacttccaccacgccttcagatag

SEQ ID NO: 107596 - DNA, 531 bp, Artificial Sequence
  derived and/or modified sequence
atggccacccacagcccccagaagagccaccagtgcgcccactgcgagaagaccttcaacagaaaggaccacctgaagaaccacctgcagacccacgaccccaacaagatggccttcggctgcgaggagtgcggcaagaagtacaacaccatgctgggctacaagagacacctggccctgcacgccgccagcagcggcgacctgacctgcggcgtgtgcgccctggagctgggcagcaccgaggtgctgctggaccacctgaaggcccacgccgaggagaagccccccagcggcaccaaggagaagaagcaccagtgcgaccactgcgagagatgcttctacaccagaaaggacgtgagaagacacctggtggtgcacaccggctgcaaggacttcctgtgccagttctgcgcccagagattcggcagaaaggaccacctgaccagacacaccaagaagacccacagccaggagctgatgaaggagagcctgcagaccggcgacctgctgagcaccttccacaccatctag

SEQ ID NO: 107597 - DNA, 759 bp, Artificial Sequence
  derived and/or modified sequence
atgaaggagagcctgcagaccggcgacctgctgagcaccttccacaccatcagccccagcttccagctgaaggccgccgccctgccccccttccccctgggcgccagcgcccagaacggcctggccagcagcctgcccgccgaggtgcacagcctgaccctgagcccccccgagcaggccgcccagcccatgcagcccctgcccgagagcctggccagcctgcaccccagcgtgagccccggcagcccccccccccccctgcccaaccacaagtacaacaccaccagcaccagctacagccccctggccagcctgcccctgaaggccgacaccaagggcttctgcaacatcagcctgttcgaggacctgcccctgcaggagccccagagcccccagaagctgaaccccggcttcgacctggccaagggcaacgccggcaaggtgaacctgcccaaggagctgcccgccgacgccgtgaacctgaccatccccgccagcctggacctgagccccctgctgggcttctggcagctgcccccccccgccacccagaacaccttcggcaacagcaccctggccctgggccccggcgagagcctgccccacagactgagctgcctgggccagcagcagcaggagccccccctggccatgggcaccgtgagcctgggccagctgcccctgccccccatcccccacgtgttcagcgccggcaccggcagcgccatcctgccccacttccaccacgccttcagatag

SEQ ID NO: 107598 - protein, 463 aa, Artificial Sequence
  derived and/or modified sequence
MATFPCQLCGKTFLTLEKFTIHNYSHSRERPYKCVQPDCGKAFVSRYKLMRHMATHSPQKSHQCAHCEKTFNRKDHLKNHLQTHDPNKMAFGCEECGKKYNTMLGYKRHLALHAASSGDLTCGVCALELGSTEVLLDHLKAHAEEKPPSGTKEKKHQCDHCERCFYTRKDVRRHLVVHTGCKDFLCQFCAQRFGRKDHLTRHTKKTHSQELMKESLQTGDLLSTFHTISPSFQLKAAALPPFPLGASAQNGLASSLPAEVHSLTLSPPEQAAQPMQPLPESLASLHPSVSPGSPPPPLPNHKYNTTSTSYSPLASLPLKADTKGFCNISLFEDLPLQEPQSPQKLNPGFDLAKGNAGKVNLPKELPADAVNLTIPASLDLSPLLGFWQLPPPATQNTFGNSTLALGPGESLPHRLSCLGQQQQEPPLAMGTVSLGQLPLPPIPHVFSAGTGSAILPHFHHAFR

SEQ ID NO: 107599 - protein, 252 aa, Artificial Sequence
  derived and/or modified sequence
MKESLQTGDLLSTFHTISPSFQLKAAALPPFPLGASAQNGLASSLPAEVHSLTLSPPEQAAQPMQPLPESLASLHPSVSPGSPPPPLPNHKYNTTSTSYSPLASLPLKADTKGFCNISLFEDLPLQEPQSPQKLNPGFDLAKGNAGKVNLPKELPADAVNLTIPASLDLSPLLGFWQLPPPATQNTFGNSTLALGPGESLPHRLSCLGQQQQEPPLAMGTVSLGQLPLPPIPHVFSAGTGSAILPHFHHAFR

SEQ ID NO: 107600 - DNA, 2949 bp, Artificial Sequence
  derived and/or modified sequence
gagccccgcctgcgcgcggcctcctcggcgcagccatcctcttggctgccgcgggcggcaaagcccacggcatctgccatttgtcattcagcccgtcggtaccgccccgagccttgatttagacacggctggggcgtgctctggcctcactctccgggcgggtgctggacggacggacggacggggcagccgtgctcacagctcagcagcgcggggccttggcgcgcggggcgcttccccgggtcgccgtcatggccgcggaggtggcacgcccgagcggcctcgcctgagctccgggggtcgtcgccccgcagggattgctgtcacgtctaatgtggctgctgcctcgtgtcacatctgaaactcatctgtacctcacttagaaagtggttctgattagacaagacttttcgttgcagtcgacagaaacctaatgggaccattgaagaattccaaacaggtatttgcataggaatcagaggagttaatcttgtctcttctcacaggtttgaatcttcagacaaacttctgggaggactcggtccctgcctcgcagcagatgttccctgtcactcagtaggcatatggctacccattctccccagaaatctcaccagtgtgctcactgtgagaagacgttcaaccggaaagaccacctgaaaaaccacctccagacccacgaccccaacaaaatggcctttgggtgtgaggagtgtgggaagaagtacaacaccatgctgggctataagaggcacctggccctccatgcggccagcagtggggacctcacctgtggggtctgtgccctggagctagggagcaccgaggtgctactggaccacctcaaagcccatgcggaagagaagccccctagcggaaccaaggaaaagaagcaccagtgcgaccactgtgaaagatgcttctacacccggaaggatgtgcgacgccacctggtggtccacacaggatgcaaggacttcctgtgccagttctgtgcccagagatttgggcgcaaggatcacctcacccggcataccaagaagacccactcacaggagctgatgaaagagagcttgcagaccggagaccttctgagcaccttccacaccatctcgccttcattccaactgaaggctgctgccttgcctcctttccctttaggagcttctgcccagaacgggcttgcaagtagcttgccagctgaggtccatagcctcaccctcagtcccccagaacaagccgcccagcctatgcagccgctgccagagtccctggcctccctccacccctcggtatcccctggctctcctccgccaccccttcccaatcacaagtacaacaccacttctacctcatactccccacttgcaagcctgcccctcaaagcagatactaaaggtttttgcaatatcagtttgtttgaggacttgcctctgcaagagcctcagtcacctcaaaagctcaacccaggttttgatctggctaagggaaatgctggtaaagtaaacctgcccaaggagctgcctgcagatgctgtgaacctaacaatacctgcctctctggacctgtcccccctgttgggcttctggcagctgccccctcctgctacccaaaatacctttgggaatagcactcttgccctggggcctggggaatctttgccccacaggttaagctgtctggggcagcagcagcaagaacccccacttgccatgggcactgtgagcctgggccagctccccctgccccccatccctcatgtgttctcagctggcactggctctgccatcctgcctcatttccatcatgcattcagataattgatttttaaagtgtatttttcgtattctggaagatgttttaagaagcattttaaatgtcagttacaatatgagaaagatttggaaaacgagactgggactatggcttattcagtgatgactggcttgagatgataagagaattctcgaactgcatgtattgtgccaatctgtcctgagtgttcatgctttgtaccaaatttaatgaacgcgtgttctgtaatcaaactgcaaatattgtcataaccaacatccaaaatgacggctgctatatataagtgtttgtcatatggaatttaatcgtaagccatgatcataatgttaactaaataactttatgtggcactgcctagtaagggaactatggaaaggtttggatttctccaaatctgggagaattttcaaaataagaaaataacctttatatgatatactatgactaggctgtgtatttcttttcagggatttttctaccttcagggttggatgtagtttagttactattaccatagccaacctgtagttttacatatacattttcttgtggagcaatagagttctccattttacagaagcattttaaatgtagtttgaatattttccacaagatgctgcaatgtgagttatcacttcatttatcttaaagaaagactaaactggttgtcagttacatctgacagaaaaaaaaaaaaaatcactgtgtaaccaggttaagtggtaaaataatccaggcgtcagtcaaaggcattttgctgactttaatattgattatatttttaacaggaatttaagaaaatattactggaattaaaaatatatatatattaaacaagaattttctttgctctgtctagcttaaactactactcaagctgcttaagttcttaagtattgtttgtaatcaccaataaataagtgcatttgtaattcatcagtcattattagcttttattaaaagaagattacgttttacaatgtaactataatctcttgaatttggtatcttattaatgagttttaaagatgtaaaacctaaccttttttaaagctccattgtcttatgtttttagaggcttttccgtaaacatatatcttacatataataaacttttcaaatcttgcaaaaaaa

SEQ ID NO: 107601 - DNA, 1392 bp, Artificial Sequence
  derived and/or modified sequence
atggccacatttccttgtcagttgtgcggcaaaaccttcttaaccttggagaagttcacgatacacaattactcccactcgcgggagcggccttacaaatgcgttcaaccggattgcggcaaggccttcgtgtcacgctataaattgatgagacacatggcgacccactctccacagaaaagtcatcagtgcgcccactgtgaaaagacattcaatagaaaagaccatctgaaaaatcacctgcagacgcacgaccctaacaagatggcctttggctgtgaggaatgtgggaagaagtacaataccatgctcggatacaaaagacatttggcgctgcacgccgcctcaagcggggacctgacgtgcggcgtgtgcgctcttgagcttgggagtacagaggtgctgctggatcacctgaaggcccacgcggaggaaaaacctccttccggaaccaaggagaagaagcaccaatgtgatcattgtgaacgctgtttctatactcgcaaagatgtgagaaggcatttggttgtgcacaccggttgtaaagactttctatgtcagttctgcgcgcagcgattcgggcgaaaggatcatctaaccagacacacaaagaaaacacactctcaggagttgatgaaggagtcacttcagacaggtgatctgctgtccacattccacacaatatcaccttcgttccagcttaaggctgccgcattgcccccttttccgctaggcgcctccgcccagaacggactggctagcagtctgcctgccgaggtccatagcctgactttatctccgcccgaacaggctgcccagcccatgcaaccattaccagagtccctagcatcattgcacccaagcgtttcacccggctctccacctccacccctgccaaaccataaatacaacaccaccagcacctcctattctcccctagcaagtctgcctctgaaagctgatactaaaggcttttgtaacattagcctgttcgaggacttacctctgcaggagcctcagagccctcagaagttgaaccccggtttcgatctcgctaaaggtaatgctggaaaagttaacctaccaaaggaactgccggccgacgccgtaaatctcacaattcccgctagcctggacctgagtcccctcctgggattttggcagctgcccccccctgccacccagaacacctttgggaacagcaccctggctcttggtcccggcgaatccctgccccacaggctgagttgtttaggccagcagcaacaagagccccccctggctatgggcacagtctctctgggacagctgccactgcctcccatcccacacgtgttcagcgccggcacaggtagcgcaattctgccccatttccaccacgcgttcagatag

SEQ ID NO: 107602 - DNA, 1392 bp, Artificial Sequence
  derived and/or modified sequence
atggcaacgtttccgtgtcagctgtgcggaaagacttttctaaccctagaaaagtttaccatccacaattatagccactcccgcgaaaggccatataaatgcgtgcagcccgactgcggtaaggcgtttgtgagtaggtacaaacttatgcgccatatggctacacattcaccacagaaatctcaccagtgcgcacactgtgagaaaacgttcaaccgcaaagatcatctcaagaatcacctgcagactcatgacccaaacaagatggcctttggttgcgaagaatgcggaaagaagtataacacgatgttggggtataagcgtcatcttgccttacatgcagctagctcaggagacctgacctgtggggtgtgcgccctggagctgggctcgacagaggtacttctggatcacctcaaggcccatgctgaggaaaagcctcccagcggaactaaggaaaaaaagcaccaatgcgaccattgcgaaagatgcttctacacaaggaaagatgtccggaggcacttagttgtgcacaccggatgcaaggatttcctatgccagttttgcgctcagcgttttggacggaaggaccatctaacacgccacaccaagaaaacccattctcaagagttgatgaaagaatcacttcagacaggcgacctcctctctacatttcacactatttcaccctcgttccagctcaaggcagctgctttgccaccctttcctctcggcgcctctgctcagaacggcctggcaagctccttgcccgcagaggttcattctctgaccctgtcccctccggaacaggccgcccagcccatgcagccactgccagagtctctagcgtcactccaccctagcgttagccccggtagccctcctccacccctcccaaaccataagtataatactacatctaccagttacagcccactcgcaagcttgcctctgaaggccgatacgaagggattctgtaacatttccctatttgaggacctgcctcttcaggaacctcaatctccccagaagctgaaccccgggtttgacctggcgaaaggaaatgccggaaaggtaaacctccctaaagaactgcctgctgatgccgtgaatctcaccattcccgcatcactggacctatcaccactcctgggcttctggcagctgcccccccctgccacgcagaacacgttcggcaacagtacactggccctgggtcccggggagtccttaccccacaggttgagctgtctgggccagcagcagcaggagcccccgctagccatgggcacagtatcgctggggcaactccccctaccgccaatcccccatgtattttctgccgggacagggtctgccatcctgccacatttccatcacgccttcaggtag

SEQ ID NO: 107603 - DNA, 1392 bp, Artificial Sequence
  derived and/or modified sequence
atggccacattcccgtgtcaactctgtggaaaaacatttcttactctggaaaagtttaccatccacaactattcgcatagtcgggaaagaccatacaagtgcgttcagccggattgtgggaaggcgtttgtttccagatataagctgatgcgccatatggcgacccacagcccgcagaagagccaccaatgcgctcactgtgagaaaaccttcaataggaaagaccacctgaagaaccaccttcagacacatgatcccaataaaatggccttcggatgtgaggaatgtggcaagaagtacaacactatgcttggctacaagcgacacctggccctgcatgccgcctctagtggagacctcacatgcggtgtgtgcgccttggagttggggagcaccgaggtcctgttggaccacctgaaagcgcatgcggaagaaaagcctcccagcggcactaaggagaagaagcaccaatgcgatcattgcgaacggtgcttctacacccgaaaggacgttagaagacacctcgtcgtccatacaggatgcaaggattttttatgccagttttgcgctcagcgattcggtagaaaagatcatttaactagacatacaaaaaaaacacattcgcaggaactgatgaaagaatccctgcagaccggcgacctgctcagcacgtttcatacaatctcacccagctttcagcttaaggccgccgccctcccaccattccccttgggagctagtgcccagaacggcttagcctccagtttgcccgctgaagtccactctttgactctgtcaccgccagagcaggccgctcaacctatgcaacctctgcccgagagcctcgccagtctacatcccagtgtgtcgccgggatccccaccgcctccactgcctaatcacaaatacaacaccacctcaaccagctattcacccctagcctcacttcctctcaaggctgacaccaagggtttttgcaacataagtctcttcgaggatttgccactgcaagagcctcagtccccacagaagctcaacccaggatttgaccttgcaaagggcaatgctggcaaggtaaacctgcctaaagaattaccagccgacgctgtcaatcttaccatcccagcaagtttggatttgtcacccctccttggattctggcagctgcctccacccgccacccagaacacatttggaaattcaacactagcgctcgggccaggggagtccctccctcaccgtttatcgtgcctggggcaacagcagcaggagccgcccctggccatggggacagtctctctcggacagctgccactccctcccatccctcacgtgttctcggcgggcacgggctcagccatcctcccccactttcatcacgcgttcagatag

SEQ ID NO: 107604 - DNA, 1392 bp, Artificial Sequence
  derived and/or modified sequence
atggccacattcccatgtcagctttgtggcaagacatttttgacgctcgagaagtttactattcacaattatagccactcccgcgagaggccctacaagtgcgtccagccggactgtggaaaggccttcgtgagcaggtacaaacttatgcgacatatggccacccactctccacagaagtcccaccagtgcgcacattgtgaaaagacgttcaatcgaaaagatcacctgaagaatcaccttcagacacacgacccaaacaaaatggcttttggatgtgaagaatgcggtaagaaatacaatacaatgttagggtacaaacgacacctggcactgcacgcagcgtccagcggagacctgacctgcggagtgtgtgcgctggaactgggatctacagaggtgctgctcgatcacctgaaggcacatgcagaagagaaaccaccttcagggaccaaggagaagaaacaccagtgtgaccactgcgagcgctgtttttacactagaaaggacgtgcggcggcacctcgtggttcacaccggctgcaaagactttctgtgtcagttttgcgcacagcgatttggacggaaggatcacttgactcggcatactaaaaaaacccactcacaggagttgatgaaggaatccctacagaccggtgatttactgagcacatttcacacaatcagcccttctttccagctcaaggcagccgctctgcctcctttcccactgggcgcaagcgcacaaaatggcctggcttctagcctccctgctgaggtacacagtctgacgctgtccccaccagaacaggccgctcaaccaatgcaacctctacccgagagtcttgcgtcacttcatccttccgtgagccccgggtcacccccacctcctctcccaaatcacaagtacaacactacttccacctcttatagtccactagcgtctttgcccctcaaagcagacaccaaaggattttgcaatatttccctttttgaagacttgcctctccaggaaccacaatccccgcaaaagcttaacccaggctttgacctcgcgaaggggaatgctgggaaagttaatcttcccaaggagctgcctgcagacgcggtgaacctgacaatacccgcttcactcgacctgtcaccactgttaggattttggcaactgcctccaccagcaactcagaacacttttggaaacagcactctcgccctcggcccaggcgagagcctccctcatagactgtcctgtttggggcagcagcagcaagagcccccactggccatgggaacggttagtttaggacagctgccacttccccctatccctcatgtgttttctgcgggaaccggatctgccattctccctcattttcaccatgcctttcgctag

SEQ ID NO: 107605 - DNA, 1392 bp, Artificial Sequence
  derived and/or modified sequence
atggcaacgtttccttgccagctgtgcggtaagaccttcctgaccctggaaaagtttacgatccataactattcccactcacgcgagcgcccatataagtgtgtccagcccgattgtgggaaggcatttgtgagccgctacaagctgatgcgccatatggccacacacagcccgcagaagagccaccaatgcgctcactgcgaaaaaacgttcaatcgcaaggatcacctgaagaaccacttgcaaacacacgaccccaataagatggccttcggatgcgaggaatgcggaaaaaagtataacacaatgttgggatacaagagacatctggcgctccatgcagcatcctccggggacctcacatgtggagtttgtgccctggaattggggtcaacggaagtgctactggatcatcttaaggctcacgctgaagagaaacccccttcaggaactaaagagaagaagcatcagtgcgatcactgcgaacgttgtttctacacaagaaaggatgtgcgacgccatttggtggtgcacacaggctgcaaggatttcctgtgccagttttgcgctcagagattcggccgaaaggatcaccttactaggcacacaaagaaaacccattcccaagaactcatgaaggaatcactgcagacaggagacctgctttctactttccacacgatatcaccctcgttccagctgaaggcggcagctctgcctcccttcccactgggtgccagtgcccagaatggcctagcttccagcctacccgccgaagtccacagcctcaccttatcgccgccggagcaagctgcacagcccatgcagcccctgcccgagtctttggcctctctacatccttcagtctctcccggctccccccccccaccccttccaaaccataaatataacactacatccacatcttactccccactggcttctcttcccctcaaagccgacactaaagggttctgtaacatttccctgtttgaagacctgcctctgcaggaacctcagagtccccagaagttaaatcctgggttcgatctggctaagggtaatgcaggtaaggtaaacctgccaaaggaattgccagctgatgctgtgaatcttaccatcccagccagcttagacctaagccccctcctgggcttctggcaactgcctcctcctgctacgcagaatactttcggaaattctacgcttgccctggggccgggtgagtctctgccccaccggctttcatgcctgggacaacagcagcaagagccgcctttggcaatgggaacagtaagtctcggccagctgccgcttccacccatcccacacgtgttctctgctgggaccgggtcagccattctcccccacttccaccacgcctttagatag

SEQ ID NO: 107606 - DNA, 1392 bp, Artificial Sequence
  derived and/or modified sequence
atggctacctttccttgccagctctgcggcaagacgtttctaactctcgaaaagtttaccatccacaactacagccactcaagagaacgaccttataaatgcgtacagccagattgtggcaaagcttttgtctcaaggtataaactcatgcggcatatggccactcacagtccacagaaaagccaccaatgtgctcattgcgaaaagactttcaatagaaaggaccacctcaaaaatcacttacagactcacgatcccaataagatggcttttggctgcgaagaatgtgggaaaaagtacaataccatgctgggatataaacggcaccttgccttacacgcggccagctccggtgacctcacatgtggcgtttgtgccctggagctgggcagcacagaggttctgcttgaccaccttaaagcccacgctgaggagaagcctccaagtggaactaaagagaagaaacatcagtgtgaccactgtgaaagatgtttttatactagaaaggacgtgcgtcggcatttggtcgtgcatacaggctgcaaggattttctatgccagttttgtgcacagcgcttcggacgcaaggaccatctcacgaggcacactaagaagacccattcccaagagctgatgaaggagtccctgcagacaggcgacctgctctctactttccataccatctctccctcctttcagctgaaagcggccgcactaccacctttcccactcggtgcctccgcacagaatgggctcgcgtcttcactccccgctgaggtgcacagtctgaccttatcgccacccgagcaagcggcacaacccatgcagcctctccctgagagccttgccagtcttcatccatcagtctctccaggatcaccgcctcctcctttgccaaaccacaagtacaacactacttcgacgagctatagccctctggcctccctgccactgaaggccgatacgaaaggcttctgcaacatttcactctttgaagaccttcccctccaggagccgcaatcgcctcagaagctgaaccccggattcgaccttgcgaaaggaaatgcaggtaaggtcaacctgccaaaggaactgcccgctgacgctgtgaacttgacaatacccgccagtctggatctctcaccattgctggggttttggcagctcccgcctcccgccacccaaaacacttttggcaactccacgttagcactggggccaggtgaatcattaccgcaccggttgagctgcctcgggcagcagcagcaggaaccgcctctcgctatgggaaccgtctccttgggacagctccctctgcctccgatcccccacgtgttcagcgcagggactgggtccgcgattttgccacattttcatcatgccttccggtag

SEQ ID NO: 107607 - DNA, 1392 bp, Artificial Sequence
  derived and/or modified sequence
atggcgacatttccgtgtcagctatgcggcaagacattcctgactctggagaagtttaccatccacaactatagtcatagcagggaacgcccttacaagtgtgtgcagcccgactgtgggaaagcgttcgtgagtagatacaaactcatgaggcacatggccacacacagccctcagaaatcccaccagtgcgctcattgcgagaaaactttcaacaggaaggatcacttgaaaaatcacctgcagacccatgatccaaataagatggccttcggatgtgaggagtgtggcaaaaaatataacaccatgctgggctacaagagacacctggccttgcatgctgcgtcatccggagatctgacctgtggtgtttgcgcgctcgagctcggatcaacagaggtgctgttggaccacctcaaggcccatgcagaggagaaacccccaagcggcactaaagaaaagaagcaccaatgcgaccactgcgaacgatgcttttatacaagaaaggatgtccgtcgacacctggtggttcatacgggctgtaaagacttcttgtgccaattctgcgcacagagatttgggcgtaaggaccatttgaccagacatacgaagaagacacattcccaggaactcatgaaagagtcgctgcagacaggagacctattgagtactttccacaccatctctccttctttccagctgaaggcggccgccctgcctccatttccattgggggccagcgcccaaaacggcctggcctccagtctgcccgcagaagtgcacagtctgacgctcagtccccccgaacaggctgctcagcccatgcagccactgcctgagtcgcttgcttctctgcacccctctgtaagccctggctccccacccccaccgcttcctaaccacaaatacaataccacaagcacctcttactcgcccctggcatccctaccgttgaaggccgacacgaagggcttctgcaatatcagtctctttgaggacttgcctcttcaggagccccagagtccacagaagctgaatccaggctttgatctggcgaaaggaaacgcagggaaagtaaatctccccaaggaactgccggctgacgctgtgaacttgaccattcctgccagcttggacctgtcacctctacttgggttttggcagcttccacccccagctactcagaacacattcggaaactcgacccttgccctgggaccaggcgagtctctgccacaccgtctctcctgtctgggacaacagcagcaagaacctccactggccatggggacggtttcactgggccagctgccactcccccctatcccccacgtgttttcggccgggacaggcagtgctatcctgccgcattttcaccacgccttccggtag

SEQ ID NO: 107608 - DNA, 1392 bp, Artificial Sequence
  derived and/or modified sequence
atggccaccttcccctgccagctgtgtgggaagaccttcctgaccctggagaagttcaccatccacaactacagccacagccgggagcggccctacaagtgtgtgcagcctgactgtgggaaggcctttgtgagccgctacaagctgatgaggcacatggccacccacagcccccagaagagccaccagtgtgcccactgtgagaagaccttcaacaggaaggaccacctgaagaaccacctgcagacccatgaccccaacaagatggccttcggctgtgaagaatgtgggaagaagtacaacaccatgctgggctacaagaggcacctggccctgcacgccgccagcagcggggacctgacctgtggggtgtgtgccctggagctgggcagcacagaggtgctgctggaccacctgaaggcccatgctgaggagaagcccccatctggcaccaaggagaagaagcaccagtgtgaccactgtgagcgctgcttctacaccaggaaggatgtgcggcggcacctggtggtgcacacaggctgcaaggacttcctgtgccagttctgtgcccagagatttggaaggaaggaccacctgaccaggcacaccaagaagacccacagccaggagctgatgaaggagagcctgcagacaggagacctgctgagcaccttccacaccatcagccccagcttccagctgaaggctgctgccctgccccccttccccctgggcgccagcgcccagaatggcctggccagcagcctgcctgctgaggtgcacagcctgaccctgagccccccagagcaggccgcccagcccatgcagcccctgcctgagagcctggccagcctgcaccccagcgtgtccccaggcagccccccaccacccctgcccaaccacaagtacaacaccaccagcaccagctacagccccctggccagcctgcccctgaaggctgacaccaagggcttctgcaacatcagcctgtttgaggacctgcccctgcaggagccccagagcccccagaagctgaaccctggctttgacctggccaagggaaatgctgggaaggtgaacctgcccaaggagctgcctgcagatgctgtgaacctgaccatcccagccagcctggacctgagccccctgctgggcttctggcagctgcccccaccagccacccagaacaccttcggcaacagcaccctggccctgggccctggagagagcctgccccaccggctgagctgcctgggccagcagcagcaggagccccccctggccatgggcaccgtgtccctgggccagctgcccctgccccccatcccccacgtgttttctgctggcaccggcagcgccatcctgccccacttccaccacgccttcagatag

SEQ ID NO: 107609 - DNA, 1392 bp, Artificial Sequence
  derived and/or modified sequence
atggccaccttcccctgccagctgtgcggcaagaccttcctgacccttgagaagtttactatacataattactctcacagccgcgaacgaccttacaagtgtgttcagcctgattgcggtaaagcgtttgtgagcaggtataagctcatgcggcacatggccacccacagtccccagaagtcacaccagtgcgcccattgcgagaagacttttaaccgaaaggatcacctgaaaaatcatctccagacacacgatcctaataagatggctttcggatgcgaggaatgtggaaagaaatataatacgatgctgggatacaaaaggcacctagccttgcacgccgcatcatccggcgatcttacctgtggcgtttgcgcactcgaattggggtcaacggaggtgctccttgaccacctcaaagcccacgcagaagagaagcccccctccgggaccaaagaaaagaaacatcagtgcgaccattgcgaacgctgtttttatactaggaaggatgttagaagacatcttgtcgttcacacaggatgcaaggacttcctgtgccaattctgtgcacagcgcttcggaaggaaggaccacctgacacggcacaccaagaaaactcattcccaggaacttatgaaggagagcctgcagacaggtgatctgctaagcactttccacaccatcagtccaagttttcagctgaaagccgccgccctcccacccttcccactgggagcatccgcccaaaatggactcgcatcaagcctgcctgcggaggtccattctctgaccttgtctcccccggagcaggccgctcagcctatgcagccgctacccgagagcctggctagtttacaccccagcgtttcacctggtagtcctcctccacccctgcccaaccataagtacaatacgaccagcacatcgtacagtccccttgcctccctccctttgaaggccgacaccaaagggttctgtaatattagcctgttcgaggacctcccactccaggagcctcaatccccacagaaactcaacccaggattcgacctggctaagggcaacgctggaaaagtcaatcttcccaaagaactcccagcagatgcggtgaacctgactattcctgctagtcttgatctctctccgctcctcggtttctggcagctccccccgccagccacccagaataccttcggtaactcgacattagccctagggcccggtgagtccctgcctcacagactgagctgcttgggccagcagcagcaagagccacccctcgctatgggtacagtgagcctgggtcagctgcccctgccgcccattccccacgtgtttagcgccgggacagggagcgcgattttgccacactttcatcacgcattccgttag

SEQ ID NO: 107610 - DNA, 1392 bp, Artificial Sequence
  derived and/or modified sequence
atggccaccttcccctgccagctgtgcggcaagaccttcctgaccctggagaaattcacgatccacaactacagccactcaagagagaggccgtacaagtgtgtgcagcccgattgtggaaaggcttttgtgtctagatacaaactcatgcgtcatatggctacacattccccgcagaagtcccaccaatgtgcccactgtgagaagaccttcaatcgaaaggatcacctgaagaatcacctgcagacccacgatcctaacaaaatggcattcggatgcgaggaatgtggcaaaaaatataatacaatgctcggctacaagagacacctggccctccacgccgccagctctggggacctgacttgcggagtgtgtgctctcgagctgggatccaccgaagttctgctggaccacttgaaggcacatgcggaagagaagccccctagtggcactaaagagaagaagcatcaatgcgaccactgcgagcgctgcttctacacgcggaaagatgtgcggaggcaccttgtcgtgcacacagggtgtaaggatttcctgtgtcagttctgtgcacaaagattcggacgcaaggaccatctgacacgccacaccaaaaaaactcatagtcaggagcttatgaaagaatcactacaaacaggcgacctgctatctacattccatactataagcccatcatttcaactgaaagccgccgccctaccaccattcccacttggagccagcgcccaaaacgggttggcatcatccctgcccgcggaagtacacagcctgacccttagccctcccgagcaggccgcacagcccatgcagcctctcccggaaagccttgcgagcctacatccatctgtctcacccgggtctcctcccccaccactgcccaaccacaagtacaatacaacatccaccagctattcccctctggcgtctttgcctctaaaggcggacactaagggtttttgcaatataagcctgttcgaagacctgccgctgcaggagccgcaatctcctcagaagctcaaccccggttttgatctggctaaaggtaatgctgggaaggtgaacctccccaaggaactcccggccgacgccgtaaacctcaccatccctgcttctttggatctctccccactgttaggtttctggcaactcccccctccagctactcaaaatacttttggaaactcgacattggccctgggcccaggagagagcctgccccatcgcctgagttgccttggccagcaacagcaggagccgccactcgccatgggcactgtgtccctgggacagctgccactccctccaattcctcatgtgttttctgccggaactgggagtgctatcttacctcattttcaccatgccttccgctag

SEQ ID NO: 107611 - DNA, 1392 bp, Artificial Sequence
  derived and/or modified sequence
atggccaccttcccctgccagctgtgcggcaagaccttcctgacccttgagaagttcactatccacaattactcccattcacgcgagcggccttataagtgtgttcaacccgattgcggaaaggcgtttgtttcccggtataagttaatgcggcatatggctacccacagcccccaaaagtctcatcagtgcgctcactgcgagaagaccttcaatcgaaaggaccatctgaaaaatcatttacagacgcatgaccccaacaagatggccttcggctgtgaagagtgtggaaagaaatacaataccatgctcggctataaaaggcatctcgctctgcacgccgccagtagcggtgatctgacatgtggcgtctgcgccttggaactgggttctacagaagtgctgctggatcacttgaaagcacacgccgaagagaaacccccatctgggaccaaggagaagaaacaccagtgcgaccactgtgaacgctgcttttatacccgcaaggatgtgaggaggcacttggtggtgcatacgggatgtaaagactttctctgccagttttgtgcccagcggttcggccggaaagaccacctgaccagacatactaagaaaacccactcccaggaacttatgaaagaaagcttacaaacaggcgacctgctttcaacttttcacaccatctcaccctcctttcagcttaaggccgcggctctccctcccttccccctgggagctagcgctcagaacgggctcgcaagcagcctccccgccgaagtacacagcctcactctgagtccaccagaacaggcagcgcagccgatgcagcccctgcctgagtctctcgctagtctgcacccgagtgttagtccaggttcgccccccccccctctccctaaccacaaatacaataccacatcaacgtcctattcccccctggcatcgctgccgctgaaggctgacactaagggattctgtaatattagcctgttcgaggatctgccgttgcaagaaccacagtctccacagaagctcaacccgggctttgacttagccaaggggaatgccgggaaagtcaacttgccaaaagaactgccggccgatgccgtcaatctcacaatccctgcctcattggatttatcacctcttttggggttctggcaactaccccctccagcaactcagaatacctttggaaatagtactcttgcactcggtcccggggaatcactgccacaccggttatcttgtctgggccagcaacagcaagaacccccgctggccatgggcaccgtgagcctgggccagcttcctctgcccccaatcccccacgtgttcagtgctgggaccggctcggctattctgccccactttcaccatgcattcagatag

SEQ ID NO: 107612 - DNA, 1392 bp, Artificial Sequence
  derived and/or modified sequence
atggccaccttcccctgccagctgtgcggcaagaccttcctgaccctggagaaattcaccatacacaactatagccacagccgggaaagaccatacaagtgtgtgcagcccgattgtgggaaagccttcgtgtctcgatataaactgatgcgacacatggccactcactctccccaaaaaagccatcaatgtgcccactgtgagaagacttttaaccggaaggaccacttaaaaaaccatctgcagactcacgaccctaacaagatggccttcgggtgcgaagagtgcggaaagaagtataacacgatgcttgggtacaagagacatctggcccttcatgccgcctcatctggggacctgacctgtggggtctgtgccctggaactgggctctactgaggttttgcttgaccatctgaaggcccatgctgaagaaaagcccccatccggcactaaagaaaaaaagcatcagtgcgaccattgtgaaaggtgtttttatacccgcaaagacgttaggcgacatctcgtggtacatacgggctgcaaagattttctgtgtcagttttgtgctcagcgcttcggacgcaaagaccacctcactagacataccaaaaaaactcattctcaggagctgatgaaggaaagcctgcagaccggtgacctgttatccacttttcatacaatcagcccctcctttcagttaaaggcagccgccctccctccattccccctgggcgcttctgcccagaacgggttagctagctccctgcccgctgaggtgcacagcttaaccctctccccccctgagcaggctgcccagccgatgcagcctctgcctgagtccttggcttccctgcacccttccgtgtctccgggaagccctccgccgcccttacctaaccacaaatataacacaacctcaactagctactcacccctcgcctcactgcccctgaaggcagatacaaaagggttttgtaacatctctctgttcgaggatctccccctgcaggagcctcagagtccacagaaactaaatcccggctttgacctcgccaaggggaacgcgggcaaagttaacttgccaaaagagttaccagccgacgccgtcaatctgactatccccgctagccttgacctgtctccactgcttggcttttggcagctgcccccccctgctacacagaataccttcggaaacagcacactggcactgggtccaggagaatctcttcctcaccgattgtcgtgcctcggtcagcagcaacaggaaccgccgctggcgatgggaacagtctctctggggcagcttcctctaccacctattcctcatgtcttctcggcgggcacaggctccgccatccttcctcactttcatcacgcgtttcgctag

SEQ ID NO: 107613 - DNA, 1392 bp, Artificial Sequence
  derived and/or modified sequence
atggccaccttcccctgccagctgtgcggcaagaccttcctgacccttgaaaagtttacaattcataattatagtcatagccgggagaggccatacaagtgcgttcagcccgattgcgggaaggcatttgtgagccgatacaaactcatgcggcacatggctacacatagcccgcagaaaagtcaccagtgcgctcattgcgaaaagacgttcaacaggaaggatcacttgaagaatcatttgcagacccacgatccaaacaagatggcatttggctgcgaggagtgcggtaagaagtataacacaatgctcggttacaagcggcaccttgcactgcatgctgcatcctcaggagacctgacatgtggagtctgcgctctcgagctcggatcaaccgaggttttactggaccatctgaaagcacacgccgaggagaagcctccctccggaacgaaagaaaaaaagcaccagtgtgaccactgtgagcggtgcttttatacccggaaagacgtgaggaggcacttagtcgtacacacaggctgcaaagatttcctgtgtcagttctgcgcgcagaggtttggcagaaaggatcacctcacacggcacacaaagaaaacgcactcacaggagctaatgaaggagtcattgcagacgggagatttgttgtcgaccttccatactatctctcctagtttccagctcaaagctgccgccctgccacctttcccgcttggggcctccgcgcagaacgggctggctagctctttacccgccgaggttcattctctgacactttctcccccggagcaggccgcccagcccatgcagcccctcccagagagcctggcttccctgcacccgagcgtgagccctggaagtccacctccaccccttccgaaccacaagtacaataccacatcaacttcatattctccgctggcttctttaccattgaaagctgatacaaaggggttttgcaacattagtctcttcgaggacctgcctctccaggaacctcagagtcctcaaaaattgaaccccggcttcgacttagccaaaggaaatgcaggcaaagtaaatcttcctaaggagctgcctgcagatgccgtgaacctgacaatccctgcatcccttgatttgtcccctcttttagggttttggcagttaccccctcccgctactcaaaatactttcgggaattccactttggcactgggcccaggcgaaagcctgccccatcgcctatcctgcctcggacagcagcagcaagagccccctttggccatgggcactgtatcactcggccagctccccctgcctccaatcccacacgtgttcagcgccgggaccgggtctgccatcctgccccattttcatcacgcttttaggtag

SEQ ID NO: 107614 - DNA, 1392 bp, Artificial Sequence
  derived and/or modified sequence
atggccaccttcccctgccagctgtgcggcaagaccttcctgaccctggaaaagttcaccatccacaactactctcatagccgagagcgcccctacaagtgcgtccagcccgactgtggcaaggcgttcgtgagccgctataagttgatgaggcatatggccacgcatagcccccagaagtctcaccagtgcgcacactgcgagaaaactttcaacagaaaagaccatcttaagaatcacctgcagacacacgatccgaataaaatggcattcggatgcgaggaatgtggaaaaaagtacaacacgatgctaggctataaaaggcatttagcactccacgctgcctcctctggcgatctgacatgtggagtgtgtgccttagagttgggctctaccgaggttttgttagaccacctgaaggcccacgccgaggagaaacccccgtcaggaacaaaggagaaaaaacatcaatgcgatcactgcgaaagatgcttttacactaggaaggatgtcagacgccacctggtagttcataccggttgcaaagacttcctgtgccagttctgcgctcagcgctttggacggaaggatcacctaaccaggcacaccaagaagacccacagtcaggagctcatgaaagagtcactccaaaccggggacctgctgtctacgttccacaccatttcgccatccttccagttgaaggccgccgcactgcctcctttccccctcggagctagtgcccagaatggactggcatcaagcctccctgccgaggtgcatagcctgactctgtccccacccgaacaggctgcgcagcccatgcaaccccttccagaaagcctggcaagcctccatccctctgtatctcctggcagtccccccccacctctcccgaatcacaaatataatactacctctactagttattctccgctggcctcgctccctctcaaggccgacacaaaggggttttgcaatatttcgctgtttgaggatctgcccttgcaggagccccagtccccacagaagctgaacccgggatttgacctggcaaaaggcaacgccggcaaggtaaatctgccaaaggagctgccagcagacgccgtaaatcttacaatccctgccagccttgatttgagcccattgctcggcttttggcagctgcccccacccgctacacagaacacctttggcaattcaacactcgctctcggacccggcgagagcctgccacacagactcagttgccttggacaacaacagcaggagccacccctggccatggggactgtgagtctcggacagctgcccctgccgccgattccacatgtattctcagccgggacaggaagtgccattctgcctcattttcatcacgcattcagatag

SEQ ID NO: 107615 - DNA, 1392 bp, Artificial Sequence
  derived and/or modified sequence
atggccaccttcccctgccagctgtgcggcaagaccttcctgaccctggaaaaattcacaatacataattactcacacagtcgcgaaaggccatacaagtgcgtgcagcccgactgtggaaaagctttcgtttcacgctataagctcatgagacacatggccacacacagccctcagaaaagccatcagtgcgctcattgcgaaaaaacctttaaccgaaaggatcatttgaaaaatcacctccagactcacgatcccaacaagatggctttcggatgtgaggaatgcggcaaaaagtacaataccatgttgggctacaaaaggcacttggccctgcatgccgcatcgagtggcgaccttacatgtggagtatgtgctctcgagctgggctctacggaagtgctgctggaccacctgaaggcccacgcggaggaaaagccccccagtggcactaaggaaaaaaaacaccagtgcgatcactgcgagcggtgcttctacacacggaaggacgtgcgccgacacctagtggtgcatacaggctgcaaggatttcctgtgccaattttgcgcccagaggttcgggcgtaaggaccacttaactcgccataccaagaagacacacagccaggagctgatgaaggaatcattgcagaccggcgatctgctgtccacatttcatacaatctcccctagttttcagttgaaagccgccgccctacccccttttccactgggtgcaagcgcccagaatgggctggcctcatcactgcctgccgaggtgcattccctaaccctgagcccccctgagcaagccgcccagccgatgcagccactgccagaaagcctggcaagcctacaccctagcgtgtcacctgggagccccccaccaccgctaccaaatcataagtataacaccaccagcaccagctactcaccactagcatctctgcctttaaaagcagatactaaaggtttttgcaacatatccctcttcgaggatctgccgctgcaggagcctcagtcacctcagaaacttaacccgggctttgatctagccaaagggaatgccgggaaggtgaatctgcccaaggaactaccagctgatgcagtgaatttgacaatccctgcctcactggatctgagccctctcctgggattttggcaactgccacctcccgctacgcagaacaccttcgggaattcaaccctagcgcttggacctggagagtccctgccccataggctgagttgcctcggtcagcagcaacaagaacctcctttggctatgggcactgtctcactgggccaattgcccttgcctcctattcctcacgtgttctctgccggaaccggctctgctatccttccacactttcaccacgccttcaggtag

SEQ ID NO: 107616 - DNA, 3346 bp, Artificial Sequence
  derived and/or modified sequence
attgttcctgcctgattcataaacatcgtgattggcttttgattgctgtcacgtctaatgtggctgctgcctcgtgtcacatctgaaactcatctgtacctcacttagaaagtttctttctataacacaagcctgaacatattgctctcctgattaacaactttcagtggttctgattagacaagacttttcgttgcagtcgacagaaacctaatgggaccattgaagaattccaaacagggtctttataagcttcttctgaaggtctcagacattcagccacggaactcaagtggaatttgtttggataacgtgactgatttcaaagcccggaccccttagacgtgcccatttggtgctgcaagtatttgcataggaatcagaggagttaatcttcttcattccctgacgatgtacaaggtctcttctcacaggtttgaatcttcagacaaacttctgggaggactcggtccctgcctcgcagcagatgttccctgtcactcagtagccaatccgggggacccaggacatgccccagctatagtgatgcagattacctttctgctcctgaatcgcacctgtgcctcagactttctcccctcagcttgagactgcatgtaaactgggatgtgtgaaagcaggaagcaaagctagtgacagctgagaggtccatgtctgggtagaaccaggcccacgatgctgcctctcccgtggtctggagttcagctgcagggactctgctgatgtgcccagcaccatcgttctgtttgtgcttaaatggcacagcatttggtcagcacatctgaaaaggaaggtgtgagaagcaaagcccatggccacgttcccctgccagttatgtggcaagacgttcctcaccctggagaagttcacgattcacaattattcccactccagggagcggccgtacaagtgtgtgcagcctgactgtggcaaagcctttgtttccagatataaattgatgaggcatatggctacccattctccccagaaatctcaccagtgtgctcactgtgagaagacgttcaaccggaaagaccacctgaaaaaccacctccagacccacgaccccaacaaaatggcctttgggtgtgaggagtgtgggaagaagtacaacaccatgctgggctataagaggcacctggccctccatgcggccagcagtggggacctcacctgtggggtctgtgccctggagctagggagcaccgaggtgctactggaccacctcaaagcccatgcggaagagaagccccctagcggaaccaaggaaaagaagcaccagtgcgaccactgtgaaagatgcttctacacccggaaggatgtgcgacgccacctggtggtccacacaggatgcaaggacttcctgtgccagttctgtgcccagagatttgggcgcaaggatcacctcacccggcataccaagaagacccactcacaggagctgatgaaagagagcttgcagaccggagaccttctgagcaccttccacaccatctcgccttcattccaactgaaggctgctgccttgcctcctttccctttaggagcttctgcccagaacgggcttgcaagtagcttgccagctgaggtccatagcctcaccctcagtcccccagaacaagccgcccagcctatgcagccgctgccagagtccctggcctccctccacccctcggtatcccctggctctcctccgccaccccttcccaatcacaagtacaacaccacttctacctcatactccccacttgcaagcctgcccctcaaagcagatactaaaggtttttgcaatatcagtttgtttgaggacttgcctctgcaagagcctcagtcacctcaaaagctcaacccaggttttgatctggctaagggaaatgctggtaaagtaaacctgcccaaggagctgcctgcagatgctgtgaacctaacaatacctgcctctctggacctgtcccccctgttgggcttctggcagctgccccctcctgctacccaaaatacctttgggaatagcactcttgccctggggcctggggaatctttgccccacaggttaagctgtctggggcagcagcagcaagaacccccacttgccatgggcactgtgagcctgggccagctccccctgccccccatccctcatgtgttctcagctggcactggctctgccatcctgcctcatttccatcatgcattcagataattgatttttaaagtgtatttttcgtattctggaagatgttttaagaagcattttaaatgtcagttacaatatgagaaagatttggaaaacgagactgggactatggcttattcagtgatgactggcttgagatgataagagaattctcgaactgcatgtattgtgccaatctgtcctgagtgttcatgctttgtaccaaatttaatgaacgcgtgttctgtaatcaaactgcaaatattgtcataaccaacatccaaaatgacggctgctatatataagtgtttgtcatatggaatttaatcgtaagccatgatcataatgttaactaaataactttatgtggcactgcctagtaagggaactatggaaaggtttggatttctccaaatctgggagaattttcaaaataagaaaataacctttatatgatatactatgactaggctgtgtatttcttttcagggatttttctaccttcagggttggatgtagtttagttactattaccatagccaacctgtagttttacatatacattttcttgtggagcaatagagttctccattttacagaagcattttaaatgtagtttgaatattttccacaagatgctgcaatgtgagttatcacttcatttatcttaaagaaagactaaactggttgtcagttacatctgacagaaaaaaaaaaaaaatcactgtgtaaccaggttaagtggtaaaataatccaggcgtcagtcaaaggcattttgctgactttaatattgattatatttttaacaggaatttaagaaaatattactggaattaaaaatatatatatattaaacaagaattttctttgctctgtctagcttaaactactactcaagctgcttaagttcttaagtattgtttgtaatcaccaataaataagtgcatttgtaattcatcagtcattattagcttttattaaaagaagattacgttttacaatgtaactataatctcttgaatttggtatcttattaatgagttttaaagatgtaaaacctaaccttttttaaagctccattgtcttatgtttttagaggcttttccgtaaacatatatcttacatataataaacttttcaaatcttgc

SEQ ID NO: 107617 - DNA, 4430 bp, Artificial Sequence
  derived and/or modified sequence
gattgctgtcacgtctaatgtggctgctgcctcgtgtcacatctgaaactcatctgtacctcacttagaaagtggttctgattagacaagacttttcgttgcagtcgacagaaacctaatgggaccattgaagaattccaaacaggcaagtgacaggaacatatttgcatgttagaagaatcagcctggcagcagcattgtgattagaatgaaggggaaccgtccaaaaacagactggggaaccaatatggatctgcctctagcatgcggaaatatctctctacactgacctaactgactcactaagcttgtggtttgtttaaaggaagccacatgaaaattgagtttgggccaatagagtgaactcgttctccattctctagcatccctccccatgcaaccaccctatccctgccaagtttctgggcaccacagattggaaagtagcctcctgtaggtatttgcccatgttaagtggtggggtctctttctgtcttcccttcttggtctcacctgtctggtgtgacaagggaagcatgtgccaaccaaggctagacccttgtgagaccagagcagccccactttcggtaaagcaagcaacctctgcttacttgcccaacacaccctagcttccgtgttccttgccttgtgagttatcttcttgggtacaatttaacacagcgttcccacctccttataactaaaatagctagagggggctttgtgcctcaaaccccaaggagaccatcttggcaatctctgcctctgcaacagggcacttgctccctgggcaactcctttcccaggtcatcttctcccttgacatgcccatcagatttaatagtgtgcctatttggcagaaaaatggggtcccttggttgctgattcttaggaatgtgaggttctcccagccagagctctcagcactaaaagttctagtctctgcgtaatggccggcatatctttggcgtatctaaaatcctcttcagtttccagcagggtctttataagcttcttctgaaggtctcagacattcagccacggaactcaagtggaatttgtttggataacgtgactgatttcaaagcccggaccccttagacgtgcccatttggtgctgcaagtactgaccattactacaacatcttacagtcaacaaatttgacacattaaagatttatatcctttcttttgggttaggatcttctctcccctaaagcatctcagtttccagcatgcaatcatttccatcttatggaaatcagccatcccgctccgtgccagcatgctaccctgggaggcacatccaggcttgggaaacgggggtgtcctggatctcatgactccagcagcaccagctgctctctttcctcttccaagtagacttccgttccccccccacttgggtgtttttgtttgttttagcaattcagagctcaagataaagaccttaaagataactttgtgtgtctctccctttctaggtatttgcataggaatcagaggagttaatcttgtttgaatcttcagacaaacttctgggaggactcggtccctgcctcgcagcagatgttccctgtcactcagtagccaatccgggggacccaggacatgccccagctatagtgatgcagattacctttctgctcctgaatcgcacctgtgcctcagactttctcccctcagcttgagactgcatgtaaactgggatgtgtgaaagcaggaagcaaagctagtgacagctgagaggtccatgtctgggtagaaccaggcccacgatgctgcctctcccgtggtctggagttcagctgcagggactctgctgatgtgcccagcaccatcgttctgtttgtgcttaaatggcacagcatttggtcagcacatctgaaaaggaaggtgtgagaagcaaagcccatggccacgttcccctgccagttatgtggcaagacgttcctcaccctggagaagttcacgattcacaattattcccactccagggagcggccgtacaagtgtgtgcagcctgactgtggcaaagcctttgtttccagatataaattgatgaggcatatggctacccattctccccagaaatctcaccagtgtgctcactgtgagaagacgttcaaccggaaagaccacctgaaaaaccacctccagacccacgaccccaacaaaatggcctttgggtgtgaggagtgtgggaagaagtacaacaccatgctgggctataagaggcacctggccctccatgcggccagcagtggggacctcacctgtggggtctgtgccctggagctagggagcaccgaggtgctactggaccacctcaaagcccatgcggaagagaagccccctagcggaaccaaggaaaagaagcaccagtgcgaccactgtgaaagatgcttctacacccggaaggatgtgcgacgccacctggtggtccacacaggatgcaaggacttcctgtgccagttctgtgcccagagatttgggcgcaaggatcacctcacccggcataccaagaagacccactcacaggagctgatgaaagagagcttgcagaccggagaccttctgagcaccttccacaccatctcgccttcattccaactgaaggctgctgccttgcctcctttccctttaggagcttctgcccagaacgggcttgcaagtagcttgccagctgaggtccatagcctcaccctcagtcccccagaacaagccgcccagcctatgcagccgctgccagagtccctggcctccctccacccctcggtatcccctggctctcctccgccaccccttcccaatcacaagtacaacaccacttctacctcatactccccacttgcaagcctgcccctcaaagcagatactaaaggtttttgcaatatcagtttgtttgaggacttgcctctgcaagagcctcagtcacctcaaaagctcaacccaggttttgatctggctaagggaaatgctggtaaagtaaacctgcccaaggagctgcctgcagatgctgtgaacctaacaatacctgcctctctggacctgtcccccctgttgggcttctggcagctgccccctcctgctacccaaaatacctttgggaatagcactcttgccctggggcctggggaatctttgccccacaggttaagctgtctggggcagcagcagcaagaacccccacttgccatgggcactgtgagcctgggccagctccccctgccccccatccctcatgtgttctcagctggcactggctctgccatcctgcctcatttccatcatgcattcagataattgatttttaaagtgtatttttcgtattctggaagatgttttaagaagcattttaaatgtcagttacaatatgagaaagatttggaaaacgagactgggactatggcttattcagtgatgactggcttgagatgataagagaattctcgaactgcatgtattgtgccaatctgtcctgagtgttcatgctttgtaccaaatttaatgaacgcgtgttctgtaatcaaactgcaaatattgtcataaccaacatccaaaatgacggctgctatatataagtgtttgtcatatggaatttaatcgtaagccatgatcataatgttaactaaataactttatgtggcactgcctagtaagggaactatggaaaggtttggatttctccaaatctgggagaattttcaaaataagaaaataacctttatatgatatactatgactaggctgtgtatttcttttcagggatttttctaccttcagggttggatgtagtttagttactattaccatagccaacctgtagttttacatatacattttcttgtggagcaatagagttctccattttacagaagcattttaaatgtagtttgaatattttccacaagatgctgcaatgtgagttatcacttcatttatcttaaagaaagactaaactggttgtcagttacatctgacagaaaaaaaaaaaaaatcactgtgtaaccaggttaagtggtaaaataatccaggcgtcagtcaaaggcattttgctgactttaatattgattatatttttaacaggaatttaagaaaatattactggaattaaaaatatatatatattaaacaagaattttctttgctctgtctagcttaaactactactcaagctgcttaagttcttaagtattgtttgtaatcaccaataaataagtgcatttgtaattcatcagtcattattagcttttattaaaagaagattacgttttacaatgtaactataatctcttgaatttggtatcttattaatgagttttaaagatgtaaaacctaaccttttttaaagctccattgtcttatgtttttagaggcttttccgtaaacatatatcttacatataataaacttttcaaatcttgcaa

SEQ ID NO: 107618 - DNA, 2800 bp, Artificial Sequence
  derived and/or modified sequence
tgaataaatcacttaggcgagatataaattggctttgttccatagcagatttgcctttgtactagttaagaaaatcctgaaaagctttccctgtaagaggatcagttggttggaatagccttggtaggaagaagccaagtttgataattacttggtgaacggaaatgctggtttccaaatgctcatcagggttcagtggcacaaagctggctgtagacttggcttctgtagatttggtaaaaacgtaaattcctggggtcccagtgatgctgttttagtctgtactgatttgccctgtggccacccaggaatctgtatttttaaaagttttccatgctgattctaatgcatagccaggtttagtaaccatttaattcagtattcaacttagagacttcaaccttcttgcactgcaaatttgataaatctttgtttatatgaatctcctttgttgagtgccaactggttatttgctgactttctttcaattcagaatttgttttaggttctgttattgcatagatttgcatacctgttttatggtattttaatactgttggttttaaaaaataccatttcctctgagtgctgttctgaatatattatgtaagcaattttgtgtgttcttttttttccacttgcataaagcaggggaaaagttgagagtttttcttaatccagttgcaagtaggacaaaggatatgagtgtttaaagatcatctattaaaatgcatgaaaaaacactagaaaatctcctgtgcacatcgccagtcgtgtgtgtgctctagaagtgaagttcagggggtaacataatggaggaatgttttcctagcttcattccctgacgatgtacaaggtctcttctcacaggtttgaatcttcagacaaacttctgggaggactcggtccctgcctcgcagcagatgttccctgtcactcagtagccaatccgggggacccaggacatgccccagctatagtgatgcagattacctttctgctcctgaatcgcacctgtgcctcagactttctcccctcagcttgagactgcatgtaaactgggatgtgtgaaagcaggaagcaaagctagtgacagctgagaggtccatgtctgggtagaaccaggcccacgatgctgcctctcccgtggtctggagttcagctgcagggactctgctgatgtgcccagcaccatcgttctgtttgtgcttaaatggcacagcatttggtcagcacatctgaaaaggaaggtgtgagaagcaaagcccatggccacgttcccctgccagttatgtggcaagacgttcctcaccctggagaagttcacgattcacaattattcccactccagggagcggccgtacaagtgtgtgcagcctgactgtggcaaagcctttgtttccagatataaattgatgaggcatatggctacccattctccccagaaatctcaccagtgtgctcactgtgagaagacgttcaaccggaaagaccacctgaaaaaccacctccagacccacgaccccaacaaaatggcctttgggtgtgaggagtgtgggaagaagtacaacaccatgctgggctataagaggcacctggccctccatgcggccagcagtggggacctcacctgtggggtctgtgccctggagctagggagcaccgaggtgctactggaccacctcaaagcccatgcggaagagaagccccctagcggaaccaaggaaaagaagcaccagtgcgaccactgtgaaagatgcttctacacccggaaggatgtgcgacgccacctggtggtccacacaggatgcaaggacttcctgtgccagttctgtgcccagagatttgggcgcaaggatcacctcacccggcataccaagaagacccactcacaggagctgatgaaagagagcttgcagaccggagaccttctgagcaccttccacaccatctcgccttcattccaactgaaggctgctgccttgcctcctttccctttaggagcttctgcccagaacgggcttgcaagtagcttgccagctgaggtccatagcctcaccctcagtcccccagaacaagccgcccagcctatgcagccgctgccagagtccctggcctccctccacccctcggtatcccctggctctcctccgccaccccttcccaatcacaagtacaacaccacttctacctcatactccccacttgcaagcctgcccctcaaagcagatactaaaggtttttgcaatatcagtttgtttgaggacttgcctctgcaagagcctcagtcacctcaaaagctcaacccaggttttgatctggctaagggaaatgctggtaaagtaaacctgcccaaggagctgcctgcagatgctgtgaacctaacaatacctgcctctctggacctgtcccccctgttgggcttctggcagctgccccctcctgctacccaaaatacctttgggaatagcactcttgccctggggcctggggaatctttgccccacaggttaagctgtctggggcagcagcagcaagaacccccacttgccatgggcactgtgagcctgggccagctccccctgccccccatccctcatgtgttctcagctggcactggctctgccatcctgcctcatttccatcatgcattcagataattgatttttaaagtgtatttttcgtattctggaagatgttttaagaagcattttaaatgtcagttacaatatgagaaagatttggaaaacgagactgggactatggcttattcagtgatgactggcttgagatgataaga

SEQ ID NO: 107619 - DNA, 2496 bp, Artificial Sequence
  derived and/or modified sequence
gctcaagataaagaccttaaagataactttgtgtgtctctccctttctaggtatttgcataggaatcagaggagttaatcttgtctcttctcacaggtttgaatcttcagacaaacttctgggaggactcggtccctgcctcgcagcagatgttccctgtcactcagtaggcatatggctacccattctccccagaaatctcaccagtgtgctcactgtgagaagacgttcaaccggaaagaccacctgaaaaaccacctccagacccacgaccccaacaaaatggcctttgggtgtgaggagtgtgggaagaagtacaacaccatgctgggctataagaggcacctggccctccatgcggccagcagtggggacctcacctgtggggtctgtgccctggagctagggagcaccgaggtgctactggaccacctcaaagcccatgcggaagagaagccccctagcggaaccaaggaaaagaagcaccagtgcgaccactgtgaaagatgcttctacacccggaaggatgtgcgacgccacctggtggtccacacaggatgcaaggacttcctgtgccagttctgtgcccagagatttgggcgcaaggatcacctcacccggcataccaagaagacccactcacaggagctgatgaaagagagcttgcagaccggagaccttctgagcaccttccacaccatctcgccttcattccaactgaaggctgctgccttgcctcctttccctttaggagcttctgcccagaacgggcttgcaagtagcttgccagctgaggtccatagcctcaccctcagtcccccagaacaagccgcccagcctatgcagccgctgccagagtccctggcctccctccacccctcggtatcccctggctctcctccgccaccccttcccaatcacaagtacaacaccacttctacctcatactccccacttgcaagcctgcccctcaaagcagatactaaaggtttttgcaatatcagtttgtttgaggacttgcctctgcaagagcctcagtcacctcaaaagctcaacccaggttttgatctggctaagggaaatgctggtaaagtaaacctgcccaaggagctgcctgcagatgctgtgaacctaacaatacctgcctctctggacctgtcccccctgttgggcttctggcagctgccccctcctgctacccaaaatacctttgggaatagcactcttgccctggggcctggggaatctttgccccacaggttaagctgtctggggcagcagcagcaagaacccccacttgccatgggcactgtgagcctgggccagctccccctgccccccatccctcatgtgttctcagctggcactggctctgccatcctgcctcatttccatcatgcattcagataattgatttttaaagtgtatttttcgtattctggaagatgttttaagaagcattttaaatgtcagttacaatatgagaaagatttggaaaacgagactgggactatggcttattcagtgatgactggcttgagatgataagagaattctcgaactgcatgtattgtgccaatctgtcctgagtgttcatgctttgtaccaaatttaatgaacgcgtgttctgtaatcaaactgcaaatattgtcataaccaacatccaaaatgacggctgctatatataagtgtttgtcatatggaatttaatcgtaagccatgatcataatgttaactaaataactttatgtggcactgcctagtaagggaactatggaaaggtttggatttctccaaatctgggagaattttcaaaataagaaaataacctttatatgatatactatgactaggctgtgtatttcttttcagggatttttctaccttcagggttggatgtagtttagttactattaccatagccaacctgtagttttacatatacattttcttgtggagcaatagagttctccattttacagaagcattttaaatgtagtttgaatattttccacaagatgctgcaatgtgagttatcacttcatttatcttaaagaaagactaaactggttgtcagttacatctgacagaaaaaaaaaaaaaatcactgtgtaaccaggttaagtggtaaaataatccaggcgtcagtcaaaggcattttgctgactttaatattgattatatttttaacaggaatttaagaaaatattactggaattaaaaatatatatatattaaacaagaattttctttgctctgtctagcttaaactactactcaagctgcttaagttcttaagtattgtttgtaatcaccaataaataagtgcatttgtaattcatcagtcattattagcttttattaaaagaagattacgttttacaatgtaactataatctcttgaatttggtatcttattaatgagttttaaagatgtaaaacctaaccttttttaaagctccattgtcttatgtttttagaggcttttccgtaaac

SEQ ID NO: 107620 - DNA, 2942 bp, Artificial Sequence
  derived and/or modified sequence
gagccccgcctgcgcgcggcctcctcggcgcagccatcctcttggctgccgcgggcggcaaagcccacggcatctgccatttgtcattcagcccgtcggtaccgccccgagccttgatttagacacggctggggcgtgctctggcctcactctccgggcgggtgctggacggacggacggacggggcagccgtgctcacagctcagcagcgcggggccttggcgcgcggggcgcttccccgggtcgccgtcatggccgcggaggtggcacgcccgagcggcctcgcctgagctccgggggtcgtcgccccgcagggattgctgtcacgtctaatgtggctgctgcctcgtgtcacatctgaaactcatctgtacctcacttagaaagtggttctgattagacaagacttttcgttgcagtcgacagaaacctaatgggaccattgaagaattccaaacaggtatttgcataggaatcagaggagttaatcttgtctcttctcacaggtttgaatcttcagacaaacttctgggaggactcggtccctgcctcgcagcagatgttccctgtcactcagtaggcatatggctacccattctccccagaaatctcaccagtgtgctcactgtgagaagacgttcaaccggaaagaccacctgaaaaaccacctccagacccacgaccccaacaaaatggcctttgggtgtgaggagtgtgggaagaagtacaacaccatgctgggctataagaggcacctggccctccatgcggccagcagtggggacctcacctgtggggtctgtgccctggagctagggagcaccgaggtgctactggaccacctcaaagcccatgcggaagagaagccccctagcggaaccaaggaaaagaagcaccagtgcgaccactgtgaaagatgcttctacacccggaaggatgtgcgacgccacctggtggtccacacaggatgcaaggacttcctgtgccagttctgtgcccagagatttgggcgcaaggatcacctcacccggcataccaagaagacccactcacaggagctgatgaaagagagcttgcagaccggagaccttctgagcaccttccacaccatctcgccttcattccaactgaaggctgctgccttgcctcctttccctttaggagcttctgcccagaacgggcttgcaagtagcttgccagctgaggtccatagcctcaccctcagtcccccagaacaagccgcccagcctatgcagccgctgccagagtccctggcctccctccacccctcggtatcccctggctctcctccgccaccccttcccaatcacaagtacaacaccacttctacctcatactccccacttgcaagcctgcccctcaaagcagatactaaaggtttttgcaatatcagtttgtttgaggacttgcctctgcaagagcctcagtcacctcaaaagctcaacccaggttttgatctggctaagggaaatgctggtaaagtaaacctgcccaaggagctgcctgcagatgctgtgaacctaacaatacctgcctctctggacctgtcccccctgttgggcttctggcagctgccccctcctgctacccaaaatacctttgggaatagcactcttgccctggggcctggggaatctttgccccacaggttaagctgtctggggcagcagcagcaagaacccccacttgccatgggcactgtgagcctgggccagctccccctgccccccatccctcatgtgttctcagctggcactggctctgccatcctgcctcatttccatcatgcattcagataattgatttttaaagtgtatttttcgtattctggaagatgttttaagaagcattttaaatgtcagttacaatatgagaaagatttggaaaacgagactgggactatggcttattcagtgatgactggcttgagatgataagagaattctcgaactgcatgtattgtgccaatctgtcctgagtgttcatgctttgtaccaaatttaatgaacgcgtgttctgtaatcaaactgcaaatattgtcataaccaacatccaaaatgacggctgctatatataagtgtttgtcatatggaatttaatcgtaagccatgatcataatgttaactaaataactttatgtggcactgcctagtaagggaactatggaaaggtttggatttctccaaatctgggagaattttcaaaataagaaaataacctttatatgatatactatgactaggctgtgtatttcttttcagggatttttctaccttcagggttggatgtagtttagttactattaccatagccaacctgtagttttacatatacattttcttgtggagcaatagagttctccattttacagaagcattttaaatgtagtttgaatattttccacaagatgctgcaatgtgagttatcacttcatttatcttaaagaaagactaaactggttgtcagttacatctgacagaaaaaaaaaaaaaatcactgtgtaaccaggttaagtggtaaaataatccaggcgtcagtcaaaggcattttgctgactttaatattgattatatttttaacaggaatttaagaaaatattactggaattaaaaatatatatatattaaacaagaattttctttgctctgtctagcttaaactactactcaagctgcttaagttcttaagtattgtttgtaatcaccaataaataagtgcatttgtaattcatcagtcattattagcttttattaaaagaagattacgttttacaatgtaactataatctcttgaatttggtatcttattaatgagttttaaagatgtaaaacctaaccttttttaaagctccattgtcttatgtttttagaggcttttccgtaaacatatatcttacatataataaacttttcaaatcttgc

SEQ ID NO: 107621 - DNA, 3404 bp, Artificial Sequence
  derived and/or modified sequence
gagccccgcctgcgcgcggcctcctcggcgcagccatcctcttggctgccgcgggcggcaaagcccacggcatctgccatttgtcattcagcccgtcggtaccgccccgagccttgatttagacacggctggggcgtgctctggcctcactctccgggcgggtgctggacggacggacggacggggcagccgtgctcacagctcagcagcgcggggccttggcgcgcggggcgcttccccgggtcgccgtcatggccgcggaggtggcacgcccgagcggcctcgcctgagctccgggggtcgtcgccccgcagggattgctgtcacgtctaatgtggctgctgcctcgtgtcacatctgaaactcatctgtacctcacttagaaagtggttctgattagacaagacttttcgttgcagtcgacagaaacctaatgggaccattgaagaattccaaacaggtatttgcataggaatcagaggagttaatcttgtttgaatcttcagacaaacttctgggaggactcggtccctgcctcgcagcagatgttccctgtcactcagtagccaatccgggggacccaggacatgccccagctatagtgatgcagattacctttctgctcctgaatcgcacctgtgcctcagactttctcccctcagcttgagactgcatgtaaactgggatgtgtgaaagcaggaagcaaagctagtgacagctgagaggtccatgtctgggtagaaccaggcccacgatgctgcctctcccgtggtctggagttcagctgcagggactctgctgatgtgcccagcaccatcgttctgtttgtgcttaaatggcacagcatttggtcagcacatctgaaaaggaaggtgtgagaagcaaagcccatggccacgttcccctgccagttatgtggcaagacgttcctcaccctggagaagttcacgattcacaattattcccactccagggagcggccgtacaagtgtgtgcagcctgactgtggcaaagcctttgtttccagatataaattgatgaggcatatggctacccattctccccagaaatctcaccagtgtgctcactgtgagaagacgttcaaccggaaagaccacctgaaaaaccacctccagacccacgaccccaacaaaatggcctttgggtgtgaggagtgtgggaagaagtacaacaccatgctgggctataagaggcacctggccctccatgcggccagcagtggggacctcacctgtggggtctgtgccctggagctagggagcaccgaggtgctactggaccacctcaaagcccatgcggaagagaagccccctagcggaaccaaggaaaagaagcaccagtgcgaccactgtgaaagatgcttctacacccggaaggatgtgcgacgccacctggtggtccacacaggatgcaaggacttcctgtgccagttctgtgcccagagatttgggcgcaaggatcacctcacccggcataccaagaagacccactcacaggagctgatgaaagagagcttgcagaccggagaccttctgagcaccttccacaccatctcgccttcattccaactgaaggctgctgccttgcctcctttccctttaggagcttctgcccagaacgggcttgcaagtagcttgccagctgaggtccatagcctcaccctcagtcccccagaacaagccgcccagcctatgcagccgctgccagagtccctggcctccctccacccctcggtatcccctggctctcctccgccaccccttcccaatcacaagtacaacaccacttctacctcatactccccacttgcaagcctgcccctcaaagcagatactaaaggtttttgcaatatcagtttgtttgaggacttgcctctgcaagagcctcagtcacctcaaaagctcaacccaggttttgatctggctaagggaaatgctggtaaagtaaacctgcccaaggagctgcctgcagatgctgtgaacctaacaatacctgcctctctggacctgtcccccctgttgggcttctggcagctgccccctcctgctacccaaaatacctttgggaatagcactcttgccctggggcctggggaatctttgccccacaggttaagctgtctggggcagcagcagcaagaacccccacttgccatgggcactgtgagcctgggccagctccccctgccccccatccctcatgtgttctcagctggcactggctctgccatcctgcctcatttccatcatgcattcagataattgatttttaaagtgtatttttcgtattctggaagatgttttaagaagcattttaaatgtcagttacaatatgagaaagatttggaaaacgagactgggactatggcttattcagtgatgactggcttgagatgataagagaattctcgaactgcatgtattgtgccaatctgtcctgagtgttcatgctttgtaccaaatttaatgaacgcgtgttctgtaatcaaactgcaaatattgtcataaccaacatccaaaatgacggctgctatatataagtgtttgtcatatggaatttaatcgtaagccatgatcataatgttaactaaataactttatgtggcactgcctagtaagggaactatggaaaggtttggatttctccaaatctgggagaattttcaaaataagaaaataacctttatatgatatactatgactaggctgtgtatttcttttcagggatttttctaccttcagggttggatgtagtttagttactattaccatagccaacctgtagttttacatatacattttcttgtggagcaatagagttctccattttacagaagcattttaaatgtagtttgaatattttccacaagatgctgcaatgtgagttatcacttcatttatcttaaagaaagactaaactggttgtcagttacatctgacagaaaaaaaaaaaaaatcactgtgtaaccaggttaagtggtaaaataatccaggcgtcagtcaaaggcattttgctgactttaatattgattatatttttaacaggaatttaagaaaatattactggaattaaaaatatatatatattaaacaagaattttctttgctctgtctagcttaaactactactcaagctgcttaagttcttaagtattgtttgtaatcaccaataaataagtgcatttgtaattcatcagtcattattagcttttattaaaagaagattacgttttacaatgtaactataatctcttgaatttggtatcttattaatgagttttaaagatgtaaaacctaaccttttttaaagctccattgtcttatgtttttagaggcttttccgtaaacatatatcttacatataataaacttttcaaatcttgc

SEQ ID NO: 107622 - DNA, 3371 bp, Artificial Sequence
  derived and/or modified sequence
gagccccgcctgcgcgcggcctcctcggcgcagccatcctcttggctgccgcgggcggcaaagcccacggcatctgccatttgtcattcagcccgtcggtaccgccccgagccttgatttagacacggctggggcgtgctctggcctcactctccgggcgggtgctggacggacggacggacggggcagccgtgctcacagctcagcagcgcggggccttggcgcgcggggcgcttccccgggtcgccgtcatggccgcggaggtggcacgcccgagcggcctcgcctgagctccgggggtcgtcgccccgcaggattgttcctgcctgattcataaacatcgtgattggcttttgattgctgtcacgtctaatgtggctgctgcctcgtgtcacatctgaaactcatctgtacctcacttagaaaggtatttgcataggaatcagaggagttaatcttgtttgaatcttcagacaaacttctgggaggactcggtccctgcctcgcagcagatgttccctgtcactcagtagccaatccgggggacccaggacatgccccagctatagtgatgcagattacctttctgctcctgaatcgcacctgtgcctcagactttctcccctcagcttgagactgcatgtaaactgggatgtgtgaaagcaggaagcaaagctagtgacagctgagaggtccatgtctgggtagaaccaggcccacgatgctgcctctcccgtggtctggagttcagctgcagggactctgctgatgtgcccagcaccatcgttctgtttgtgcttaaatggcacagcatttggtcagcacatctgaaaaggaaggtgtgagaagcaaagcccatggccacgttcccctgccagttatgtggcaagacgttcctcaccctggagaagttcacgattcacaattattcccactccagggagcggccgtacaagtgtgtgcagcctgactgtggcaaagcctttgtttccagatataaattgatgaggcatatggctacccattctccccagaaatctcaccagtgtgctcactgtgagaagacgttcaaccggaaagaccacctgaaaaaccacctccagacccacgaccccaacaaaatggcctttgggtgtgaggagtgtgggaagaagtacaacaccatgctgggctataagaggcacctggccctccatgcggccagcagtggggacctcacctgtggggtctgtgccctggagctagggagcaccgaggtgctactggaccacctcaaagcccatgcggaagagaagccccctagcggaaccaaggaaaagaagcaccagtgcgaccactgtgaaagatgcttctacacccggaaggatgtgcgacgccacctggtggtccacacaggatgcaaggacttcctgtgccagttctgtgcccagagatttgggcgcaaggatcacctcacccggcataccaagaagacccactcacaggagctgatgaaagagagcttgcagaccggagaccttctgagcaccttccacaccatctcgccttcattccaactgaaggctgctgccttgcctcctttccctttaggagcttctgcccagaacgggcttgcaagtagcttgccagctgaggtccatagcctcaccctcagtcccccagaacaagccgcccagcctatgcagccgctgccagagtccctggcctccctccacccctcggtatcccctggctctcctccgccaccccttcccaatcacaagtacaacaccacttctacctcatactccccacttgcaagcctgcccctcaaagcagatactaaaggtttttgcaatatcagtttgtttgaggacttgcctctgcaagagcctcagtcacctcaaaagctcaacccaggttttgatctggctaagggaaatgctggtaaagtaaacctgcccaaggagctgcctgcagatgctgtgaacctaacaatacctgcctctctggacctgtcccccctgttgggcttctggcagctgccccctcctgctacccaaaatacctttgggaatagcactcttgccctggggcctggggaatctttgccccacaggttaagctgtctggggcagcagcagcaagaacccccacttgccatgggcactgtgagcctgggccagctccccctgccccccatccctcatgtgttctcagctggcactggctctgccatcctgcctcatttccatcatgcattcagataattgatttttaaagtgtatttttcgtattctggaagatgttttaagaagcattttaaatgtcagttacaatatgagaaagatttggaaaacgagactgggactatggcttattcagtgatgactggcttgagatgataagagaattctcgaactgcatgtattgtgccaatctgtcctgagtgttcatgctttgtaccaaatttaatgaacgcgtgttctgtaatcaaactgcaaatattgtcataaccaacatccaaaatgacggctgctatatataagtgtttgtcatatggaatttaatcgtaagccatgatcataatgttaactaaataactttatgtggcactgcctagtaagggaactatggaaaggtttggatttctccaaatctgggagaattttcaaaataagaaaataacctttatatgatatactatgactaggctgtgtatttcttttcagggatttttctaccttcagggttggatgtagtttagttactattaccatagccaacctgtagttttacatatacattttcttgtggagcaatagagttctccattttacagaagcattttaaatgtagtttgaatattttccacaagatgctgcaatgtgagttatcacttcatttatcttaaagaaagactaaactggttgtcagttacatctgacagaaaaaaaaaaaaaatcactgtgtaaccaggttaagtggtaaaataatccaggcgtcagtcaaaggcattttgctgactttaatattgattatatttttaacaggaatttaagaaaatattactggaattaaaaatatatatatattaaacaagaattttctttgctctgtctagcttaaactactactcaagctgcttaagttcttaagtattgtttgtaatcaccaataaataagtgcatttgtaattcatcagtcattattagcttttattaaaagaagattacgttttacaatgtaactataatctcttgaatttggtatcttattaatgagttttaaagatgtaaaacctaaccttttttaaagctccattgtcttatgtttttagaggcttttccgtaaacatatatcttacatataataaacttttcaaatcttgc

SEQ ID NO: 107623 - DNA, 904 bp, Artificial Sequence
  derived and/or modified sequence
ggacggacggggcagccgtgctcacagctcagcagcgcggggccttggcgcgcggggcgcttccccgggtcgccgtcatggccgcggaggtggcacgcccgagcggcctcgcctgagctccgggggtcgtcgccccgcagattgctgtcacgtctaatgtggctgctgcctcgtgtcacatctgaaactcatctgtacctcacttagaaagacttttcgttgcagtcgacagaaacctaatgggaccattgaagaattccaaacaggtatttgcataggaatcagaggagttaatcttgtttgaatcttcagacaaacttctgggaggactcggtccctgcctcgcagcagatgttccctgtcactcagtaggcatatggctacccattctccccagaaatctcaccagtgtgctcactgtgagaagacgttcaaccggaaagaccacctgaaaaaccacctccagacccacgaccccaacaaaatggcctttgggtgtgaggagtgtgggaagaagtacaacaccatgctgggctataagaggcacctggccctccatgcggccagcagtggggacctcacctgtggggtctgtgccctggagctagggagcaccgaggtgctactggaccacctcaaagcccatgcggaagagaagccccctagcggaaccaaggaaaagaagcaccagtgcgaccactgtgaaagatgcttctacacccggaaggatgtgcgacgccacctggtggtccacacaggatgcaaggacttcctgtgccagttctgtgcccagagatttgggcgcaaggatcacctcacccggcataccaagaagacccactcacaggagctgatgaaagagagcttgcagaccggagaccttctgagcaccttccacaccatc

SEQ ID NO: 107624 - DNA, 3418 bp, Artificial Sequence
  derived and/or modified sequence
gagccccgcctgcgcgcggcctcctcggcgcagccatcctcttggctgccgcgggcggcaaagcccacggcatctgccatttgtcattcagcccgtcggtaccgccccgagccttgatttagacacggctggggcgtgctctggcctcactctccgggcgggtgctggacggacggacggacggggcagccgtgctcacagctcagcagcgcggggccttggcgcgcggggcgcttccccgggtcgccgtcatggccgcggaggtggcacgcccgagcggcctcgcctgagctccgggggtcgtcgccccgcagggattgctgtcacgtctaatgtggctgctgcctcgtgtcacatctgaaactcatctgtacctcacttagaaagtggttctgattagacaagacttttcgttgcagtcgacagaaacctaatgggaccattgaagaattccaaacaggtatttgcataggaatcagaggagttaatcttgtctcttctcacaggtttgaatcttcagacaaacttctgggaggactcggtccctgcctcgcagcagatgttccctgtcactcagtagccaatccgggggacccaggacatgccccagctatagtgatgcagattacctttctgctcctgaatcgcacctgtgcctcagactttctcccctcagcttgagactgcatgtaaactgggatgtgtgaaagcaggaagcaaagctagtgacagctgagaggtccatgtctgggtagaaccaggcccacgatgctgcctctcccgtggtctggagttcagctgcagggactctgctgatgtgcccagcaccatcgttctgtttgtgcttaaatggcacagcatttggtcagcacatctgaaaaggaaggtgtgagaagcaaagcccatggccacgttcccctgccagttatgtggcaagacgttcctcaccctggagaagttcacgattcacaattattcccactccagggagcggccgtacaagtgtgtgcagcctgactgtggcaaagcctttgtttccagatataaattgatgaggcatatggctacccattctccccagaaatctcaccagtgtgctcactgtgagaagacgttcaaccggaaagaccacctgaaaaaccacctccagacccacgaccccaacaaaatggcctttgggtgtgaggagtgtgggaagaagtacaacaccatgctgggctataagaggcacctggccctccatgcggccagcagtggggacctcacctgtggggtctgtgccctggagctagggagcaccgaggtgctactggaccacctcaaagcccatgcggaagagaagccccctagcggaaccaaggaaaagaagcaccagtgcgaccactgtgaaagatgcttctacacccggaaggatgtgcgacgccacctggtggtccacacaggatgcaaggacttcctgtgccagttctgtgcccagagatttgggcgcaaggatcacctcacccggcataccaagaagacccactcacaggagctgatgaaagagagcttgcagaccggagaccttctgagcaccttccacaccatctcgccttcattccaactgaaggctgctgccttgcctcctttccctttaggagcttctgcccagaacgggcttgcaagtagcttgccagctgaggtccatagcctcaccctcagtcccccagaacaagccgcccagcctatgcagccgctgccagagtccctggcctccctccacccctcggtatcccctggctctcctccgccaccccttcccaatcacaagtacaacaccacttctacctcatactccccacttgcaagcctgcccctcaaagcagatactaaaggtttttgcaatatcagtttgtttgaggacttgcctctgcaagagcctcagtcacctcaaaagctcaacccaggttttgatctggctaagggaaatgctggtaaagtaaacctgcccaaggagctgcctgcagatgctgtgaacctaacaatacctgcctctctggacctgtcccccctgttgggcttctggcagctgccccctcctgctacccaaaatacctttgggaatagcactcttgccctggggcctggggaatctttgccccacaggttaagctgtctggggcagcagcagcaagaacccccacttgccatgggcactgtgagcctgggccagctccccctgccccccatccctcatgtgttctcagctggcactggctctgccatcctgcctcatttccatcatgcattcagataattgatttttaaagtgtatttttcgtattctggaagatgttttaagaagcattttaaatgtcagttacaatatgagaaagatttggaaaacgagactgggactatggcttattcagtgatgactggcttgagatgataagagaattctcgaactgcatgtattgtgccaatctgtcctgagtgttcatgctttgtaccaaatttaatgaacgcgtgttctgtaatcaaactgcaaatattgtcataaccaacatccaaaatgacggctgctatatataagtgtttgtcatatggaatttaatcgtaagccatgatcataatgttaactaaataactttatgtggcactgcctagtaagggaactatggaaaggtttggatttctccaaatctgggagaattttcaaaataagaaaataacctttatatgatatactatgactaggctgtgtatttcttttcagggatttttctaccttcagggttggatgtagtttagttactattaccatagccaacctgtagttttacatatacattttcttgtggagcaatagagttctccattttacagaagcattttaaatgtagtttgaatattttccacaagatgctgcaatgtgagttatcacttcatttatcttaaagaaagactaaactggttgtcagttacatctgacagaaaaaaaaaaaaaatcactgtgtaaccaggttaagtggtaaaataatccaggcgtcagtcaaaggcattttgctgactttaatattgattatatttttaacaggaatttaagaaaatattactggaattaaaaatatatatatattaaacaagaattttctttgctctgtctagcttaaactactactcaagctgcttaagttcttaagtattgtttgtaatcaccaataaataagtgcatttgtaattcatcagtcattattagcttttattaaaagaagattacgttttacaatgtaactataatctcttgaatttggtatcttattaatgagttttaaagatgtaaaacctaaccttttttaaagctccattgtcttatgtttttagaggcttttccgtaaacatatatcttacatataataaacttttcaaatcttgc

SEQ ID NO: 107625 - DNA, 2726 bp, Artificial Sequence
  derived and/or modified sequence
cttttccgcgccgccgagtcggagctgcgccgcacgcccagcggccgcccggacccgccggccggagctgacccagtgggccacgggctccggactccagaactttccaagcgggggaaacttggcggcgggattgctgtcacgtctaatgtggctgctgcctcgtgtcacatctgaaactcatctgtacctcacttagaaagtcgacagaaacctaatgggaccattgaagaattccaaacaggtatttgcataggaatcagaggagttaatcttgtctcttctcacaggtttgaatcttcagacaaacttctgggaggactcggtccctgcctcgcagcagatgttccctgtcactcagtaggcatatggctacccattctccccagaaatctcaccagtgtgctcactgtgagaagacgttcaaccggaaagaccacctgaaaaaccacctccagacccacgaccccaacaaaatggcctttgggtgtgaggagtgtgggaagaagtacaacaccatgctgggctataagaggcacctggccctccatgcggccagcagtggggacctcacctgtggggtctgtgccctggagctagggagcaccgaggtgctactggaccacctcaaagcccatgcggaagagaagccccctagcggaaccaaggaaaagaagcaccagtgcgaccactgtgaaagatgcttctacacccggaaggatgtgcgacgccacctggtggtccacacaggatgcaaggacttcctgtgccagttctgtgcccagagatttgggcgcaaggatcacctcacccggcataccaagaagacccactcacaggagctgatgaaagagagcttgcagaccggagaccttctgagcaccttccacaccatctcgccttcattccaactgaaggctgctgccttgcctcctttccctttaggagcttctgcccagaacgggcttgcaagtagcttgccagctgaggtccatagcctcaccctcagtcccccagaacaagccgcccagcctatgcagccgctgccagagtccctggcctccctccacccctcggtatcccctggctctcctccgccaccccttcccaatcacaagtacaacaccacttctacctcatactccccacttgcaagcctgcccctcaaagcagatactaaaggtttttgcaatatcagtttgtttgaggacttgcctctgcaagagcctcagtcacctcaaaagctcaacccaggttttgatctggctaagggaaatgctggtaaagtaaacctgcccaaggagctgcctgcagatgctgtgaacctaacaatacctgcctctctggacctgtcccccctgttgggcttctggcagctgccccctcctgctacccaaaatacctttgggaatagcactcttgccctggggcctggggaatctttgccccacaggttaagctgtctggggcagcagcagcaagaacccccacttgccatgggcactgtgagcctgggccagctccccctgccccccatccctcatgtgttctcagctggcactggctctgccatcctgcctcatttccatcatgcattcagataattgatttttaaagtgtatttttcgtattctggaagatgttttaagaagcattttaaatgtcagttacaatatgagaaagatttggaaaacgagactgggactatggcttattcagtgatgactggcttgagatgataagagaattctcgaactgcatgtattgtgccaatctgtcctgagtgttcatgctttgtaccaaatttaatgaacgcgtgttctgtaatcaaactgcaaatattgtcataaccaacatccaaaatgacggctgctatatataagtgtttgtcatatggaatttaatcgtaagccatgatcataatgttaactaaataactttatgtggcactgcctagtaagggaactatggaaaggtttggatttctccaaatctgggagaattttcaaaataagaaaataacctttatatgatatactatgactaggctgtgtatttcttttcagggatttttctaccttcagggttggatgtagtttagttactattaccatagccaacctgtagttttacatatacattttcttgtggagcaatagagttctccattttacagaagcattttaaatgtagtttgaatattttccacaagatgctgcaatgtgagttatcacttcatttatcttaaagaaagactaaactggttgtcagttacatctgacagaaaaaaaaaaaaaatcactgtgtaaccaggttaagtggtaaaataatccaggcgtcagtcaaaggcattttgctgactttaatattgattatatttttaacaggaatttaagaaaatattactggaattaaaaatatatatatattaaacaagaattttctttgctctgtctagcttaaactactactcaagctgcttaagttcttaagtattgtttgtaatcaccaataaataagtgcatttgtaattcatcagtcattattagcttttattaaaagaagattacgttttacaatgtaactataatctcttgaatttggtatcttattaatgagttttaaagatgtaaaacctaaccttttttaaagctccattgtcttatgtttttagaggcttttccgtaaacatatatcttacatataataaacttttcaaatcttgc

SEQ ID NO: 107626 - DNA, 3277 bp, Artificial Sequence
  derived and/or modified sequence
cttttccgcgccgccgagtcggagctgcgccgcacgcccagcggccgcccggacccgccggccggagctgacccagtgggccacgggctccggactccagaactttccaagcgggggaaacttggcggcgggtaggtaggaaaggcagattgttcctgcctgattcataaacatcgtgattggcttttgattgctgtcacgtctaatgtggctgctgcctcgtgtcacatctgaaactcatctgtacctcacttagaaagtggttctgattagacaagacttttcgttgcagtcgacagaaacctaatgggaccattgaagaattccaaacaggtatttgcataggaatcagaggagttaatcttgtttgaatcttcagacaaacttctgggaggactcggtccctgcctcgcagcagatgttccctgtcactcagtagccaatccgggggacccaggacatgccccagctatagtgatgcagattacctttctgctcctgaatcgcacctgtgcctcagactttctcccctcagcttgagactgcatgtaaactgggatgtgtgaaagcaggaagcaaagctagtgacagctgagaggtccatgtctgggtagaaccaggcccacgatgctgcctctcccgtggtctggagttcagctgcagggactctgctgatgtgcccagcaccatcgttctgtttgtgcttaaatggcacagcatttggtcagcacatctgaaaaggaaggtgtgagaagcaaagcccatggccacgttcccctgccagttatgtggcaagacgttcctcaccctggagaagttcacgattcacaattattcccactccagggagcggccgtacaagtgtgtgcagcctgactgtggcaaagcctttgtttccagatataaattgatgaggcatatggctacccattctccccagaaatctcaccagtgtgctcactgtgagaagacgttcaaccggaaagaccacctgaaaaaccacctccagacccacgaccccaacaaaatggcctttgggtgtgaggagtgtgggaagaagtacaacaccatgctgggctataagaggcacctggccctccatgcggccagcagtggggacctcacctgtggggtctgtgccctggagctagggagcaccgaggtgctactggaccacctcaaagcccatgcggaagagaagccccctagcggaaccaaggaaaagaagcaccagtgcgaccactgtgaaagatgcttctacacccggaaggatgtgcgacgccacctggtggtccacacaggatgcaaggacttcctgtgccagttctgtgcccagagatttgggcgcaaggatcacctcacccggcataccaagaagacccactcacaggagctgatgaaagagagcttgcagaccggagaccttctgagcaccttccacaccatctcgccttcattccaactgaaggctgctgccttgcctcctttccctttaggagcttctgcccagaacgggcttgcaagtagcttgccagctgaggtccatagcctcaccctcagtcccccagaacaagccgcccagcctatgcagccgctgccagagtccctggcctccctccacccctcggtatcccctggctctcctccgccaccccttcccaatcacaagtacaacaccacttctacctcatactccccacttgcaagcctgcccctcaaagcagatactaaaggtttttgcaatatcagtttgtttgaggacttgcctctgcaagagcctcagtcacctcaaaagctcaacccaggttttgatctggctaagggaaatgctggtaaagtaaacctgcccaaggagctgcctgcagatgctgtgaacctaacaatacctgcctctctggacctgtcccccctgttgggcttctggcagctgccccctcctgctacccaaaatacctttgggaatagcactcttgccctggggcctggggaatctttgccccacaggttaagctgtctggggcagcagcagcaagaacccccacttgccatgggcactgtgagcctgggccagctccccctgccccccatccctcatgtgttctcagctggcactggctctgccatcctgcctcatttccatcatgcattcagataattgatttttaaagtgtatttttcgtattctggaagatgttttaagaagcattttaaatgtcagttacaatatgagaaagatttggaaaacgagactgggactatggcttattcagtgatgactggcttgagatgataagagaattctcgaactgcatgtattgtgccaatctgtcctgagtgttcatgctttgtaccaaatttaatgaacgcgtgttctgtaatcaaactgcaaatattgtcataaccaacatccaaaatgacggctgctatatataagtgtttgtcatatggaatttaatcgtaagccatgatcataatgttaactaaataactttatgtggcactgcctagtaagggaactatggaaaggtttggatttctccaaatctgggagaattttcaaaataagaaaataacctttatatgatatactatgactaggctgtgtatttcttttcagggatttttctaccttcagggttggatgtagtttagttactattaccatagccaacctgtagttttacatatacattttcttgtggagcaatagagttctccattttacagaagcattttaaatgtagtttgaatattttccacaagatgctgcaatgtgagttatcacttcatttatcttaaagaaagactaaactggttgtcagttacatctgacagaaaaaaaaaaaaaatcactgtgtaaccaggttaagtggtaaaataatccaggcgtcagtcaaaggcattttgctgactttaatattgattatatttttaacaggaatttaagaaaatattactggaattaaaaatatatatatattaaacaagaattttctttgctctgtctagcttaaactactactcaagctgcttaagttcttaagtattgtttgtaatcaccaataaataagtgcatttgtaattcatcagtcattattagcttttattaaaagaagattacgttttacaatgtaactataatctcttgaatttggtatcttattaatgagttttaaagatgtaaaacctaaccttttttaaagctccattgtcttatgtttttagaggcttttccgtaaacatatatcttacatataataaacttttcaaatcttgc

SEQ ID NO: 107627 - DNA, 6296 bp, Artificial Sequence
  derived and/or modified sequence
tattcttattctctcctcgcattacagcacaaaccagagccttcgcctcctccatggtagaggggcttatgtcccagaaaagactttgtgagagaatttacatttgaggaacttcaggccttgagggggaaaataaggttgggggattaagatgtggacttaatgaaagcctgtttttcactctaaaaattcaagaggacacgctaagaacgatcattgctatttatctgtcttaaattagaaatcatgggcattgtacagttgatttttacttatcatgacttgctcactagaaacttcgtgatctctttctgttatattttaaaaagatgtttttaaatggttttatcttaaagaaatattaggaaaaaaaaaactgaggtagggtccaccatttagaatcagatatctagaatgtaacgtatgttacaattcagagtctctaaaccactctcctaaaatcataatatgagatgattctcagcttgccaaattttctagagttgtgaaataggttatgtcactcaaccagtgtttatttgagggaattcatggttggcagggtccccattatacatcagaagtttttatttcttattttctatcactcatgtaaagattaggatttgtttgaactgcctatttcaagataatgattccaaatcccagccttaaatttcatatctaacatgtttgttgtttttccctgtcccatacattaattctaggttcaaggccatgtcaccctaaagcagccctcacttcttttgcagctgcagtgctgttgcttaaccataactcttggcctctctccagactgtttttttttttttttttttttgcaaaatgtccttgatggtcataatggtgtattttttaaaaattccagttgtttttgtaagttttcttatatcccatcttacattcaattccccctgcaaacctcccactagataaaccacttcccgctctattctttgtcttgagactgacttctaggaaggctgtccacagctgcctcaggccgaaggctaactaggagaatattaggtcgtgtgcttggattcctgttctccaaacgattctaattaaaactagtccactacccccaccaacacgttcagaaggaaaaaaatgtagcagaatccccaaatgccctcatcacttcattataccatttgggtagctttatggcacctgtaggactagttcatgccaggcccatttgtaactgttttctctagttaaacatgatattgccattaacagcacattaaataggattacactgcttaagaatctaggaatttctcaaatatatgagaaaatgtgaaagcacagggataatagaaatttattttataaacacatgctaggagatggaattgtgtcatgatgatccacattaaagaaacatgattgaagtgaatccattatttatactctgactttccattatatatatatattactccaaaagaagttattcatgtttcctaattgtgagcttacccatcgtgtaaaattggccctaacacttattcacaggccacatctacttcgtacatgtactttgcctctgtatgtacacgtgtaacgcataaccgtatatcagctctgcaagatacatagatatccccattttatggtgacggagactgaggcttagagaagttatgcaacttacctaaagttacacaccttccaagcagcagagccagcattcgaacttagacccatctgactccaaagccagtgccctctacactagaccacactgtctttcttaggttggatctaaaaaaatactaccagctggttggttttttaactaactgtaggaacacaacctagtattaagtagagtatgcatgctgcatagtggactgaggtagagtaaaacccattattgtaccacttttaggtaagaaaatgtattatctaaggaatatcattaaaatttccttacttccctccatgaacaaacaaaaaattaaaatgaaagcagtgggggatgaagggaggcggggatcataacataggagtgttaaatattaaaattagaaaagaaaataatttctctatcaatgtttaaaatgctagaaattatgcatgcttatactataacaaagaatactttatttggggaataacttaattgatccatgatgtggcatttaccaaggtaatttttccctttttgttccagcagtaggaattagaggtggttcataaaacacacaatcaccatgtaaattgaaaccgcattaagatcatagtcatcttatgttgtttccctaaaatggttctcatttgccccacatattcaaatcagagtgcacaaagatgttgtgctgagtcagggaagatttagaatgctctgtgaacagttttatactgaacttcagagttcagttattgtacttattttttggtgtgtgtgtgtgcacagttgggttttttgtttgttttgctatttgaattactgtttggccattttaatgtatataactgataaatccaggaggataatctgtatgtctgctctctcagtttctttctataacacaagcctgaacatattgctctcctgattaacaactttcagtggttctgattagacaagacttttcgttgcagtcgacagaaacctaatgggaccattgaagaattccaaacaggcaagtgacaggaacatatttgcatgttagaagaatcagcctggcagcagcattgtgattagaatgaaggggaaccgtccaaaaacagactggggaaccaatatggatctgcctctagcatgcggaaatatctctctacactgacctaactgactcactaagcttgtggtttgtttaaaggaagccacatgaaaattgagtttgggccaatagagtgaactcgttctccattctctagcatccctccccatgcaaccaccctatccctgccaagtttctgggcaccacagattggaaagtagcctcctgtaggtatttgcccatgttaagtggtggggtctctttctgtcttcccttcttggtctcacctgtctggtgtgacaagggaagcatgtgccaaccaaggctagacccttgtgagaccagagcagccccactttcggtaaagcaagcaacctctgcttacttgcccaacacaccctagcttccgtgttccttgccttgtgagttatcttcttgggtacaatttaacacagcgttcccacctccttataactaaaatagctagagggggctttgtgcctcaaaccccaaggagaccatcttggcaatctctgcctctgcaacagggcacttgctccctgggcaactcctttcccaggtcatcttctcccttgacatgcccatcagatttaatagtgtgcctatttggcagaaaaatggggtcccttggttgctgattcttaggaatgtgaggttctcccagccagagctctcagcactaaaagttctagtctctgcgtaatggccggcatatctttggcgtatctaaaatcctcttcagtttccagcagggtctttataagcttcttctgaaggtctcagacattcagccacggaactcaagtggaatttgtttggataacgtgactgatttcaaagcccggaccccttagacgtgcccatttggtgctgcaagtactgaccattactacaacatcttacagtcaacaaatttgacacattaaagatttatatcctttcttttgggttaggatcttctctcccctaaagcatctcagtttccagcatgcaatcatttccatcttatggaaatcagccatcccgctccgtgccagcatgctaccctgggaggcacatccaggcttgggaaacgggggtgtcctggatctcatgactccagcagcaccagctgctctctttcctcttccaagtagacttccgttccccccccacttgggtgtttttgtttgttttagcaattcagagctcaagataaagaccttaaagataactttgtgtgtctctccctttctaggtatttgcataggaatcagaggagttaatcttgcatatggctacccattctccccagaaatctcaccagtgtgctcactgtgagaagacgttcaaccggaaagaccacctgaaaaaccacctccagacccacgaccccaacaaaatggcctttgggtgtgaggagtgtgggaagaagtacaacaccatgcggaagagaagccccctagcggaaccaaggaaaagaagcaccagtgcgaccactgtgaaagatgcttctacacccggaaggatgtgcgacgccacctggtggtccacacaggatgcaaggacttcctgtgccagttctgtgcccagagatttgggcgcaaggatcacctcacccggcataccaagaagacccactcacaggagctgatgaaagagagcttgcagaccggagaccttctgagcaccttccacaccatctcgccttcattccaactgaaggctgctgccttgcctcctttccctttaggagcttctgcccagaacgggcttgcaagtagcttgccagctgaggtccatagcctcaccctcagtcccccagaacaagccgcccagcctatgcagccgctgccagagtccctggcctccctccacccctcggtatcccctggctctcctccgccaccccttcccaatcacaagtacaacaccacttctacctcatactccccacttgcaagcctgcccctcaaagcagatactaaaggtttttgcaatatcagtttgtttgaggacttgcctctgcaagagcctcagtcacctcaaaagctcaacccaggttttgatctggctaagggaaatgctggtaaagtaaacctgcccaaggagctgcctgcagatgctgtgaacctaacaatacctgcctctctggacctgtcccccctgttgggcttctggcagctgccccctcctgctacccaaaatacctttgggaatagcactcttgccctggggcctggggaatctttgccccacaggttaagctgtctggggcagcagcagcaagaacccccacttgccatgggcactgtgagcctgggccagctccccctgccccccatccctcatgtgttctcagctggcactggctctgccatcctgcctcatttccatcatgcattcagataattgatttttaaagtgtatttttcgtattctggaagatgttttaagaagcattttaaatgtcagttacaatatgagaaagatttggaaaacgagactgggactatggcttattcagtgatgactggcttgagatgataagagaattctcgaactgcatgtattgtgccaatctgtcctgagtgttcatgctttgtaccaaatttaatgaacgcgtgttctgtaatcaaactgcaaatattgtcataaccaacatccaaaatgacggctgctatatataagtgtttgtcatatggaatttaatcgtaagccatgatcataatgttaactaaataactttatgtggcactgcctagtaagggaactatggaaaggtttggatttctccaaatctgggagaattttcaaaataagaaaataacctttatatgatatactatgactaggctgtgtatttcttttcagggatttttctaccttcagggttggatgtagtttagttactattaccatagccaacctgtagttttacatatacattttcttgtggagcaatagagttctccattttacagaagcattttaaatgtagtttgaatattttccacaagatgctgcaatgtgagttatcacttcatttatcttaaagaaagactaaactggttgtcagttacatctgacagaaaaaaaaaaaaaatcactgtgtaaccaggttaagtggtaaaataatccaggcgtcagtcaaaggcattttgctgactttaatattgattatatttttaacaggaatttaagaaaatattactggaattaaaaatatatatatattaaacaagaattttctttgctctgtctagcttaaactactactcaagctgcttaagttcttaagtattgtttgtaatcaccaataaataagtgcatttgtaattcatcagtcattattagcttttattaaaagaagattacgttttacaatgtaactataatctcttgaatttggtatcttattaatgagttttaaagatgtaaaacctaaccttttttaaagctccattgtcttatgtttttagaggcttttccgtaaacatatatcttacatataataaacttttcaaatcttgc

SEQ ID NO: 107628 - DNA, 1392 bp, Artificial Sequence
  derived and/or modified sequence
atggcaacttttccttgccagctctgcggaaagacttttctgacattggagaagttcacgatccacaactattcgcactcccgggagagaccctacaaatgcgtgcagccggactgtggtaaagccttcgtgagtcgctacaaactcatgcggcacatggccacgcactctccccagaaatcccatcagtgtgcccactgtgaaaagacgttcaatcggaaggaccaccttaagaaccacctccaaactcacgaccccaacaagatggctttcggatgtgaggagtgtggcaagaaatacaacacaatgttaggctacaagcggcacctcgcattacatgctgcctcgtccggcgacctgacatgtggcgtatgtgcattggagctgggctccactgaagtgcttctcgatcacctcaaagcacatgccgaggagaaacctcccagtggcaccaaggagaaaaaacaccagtgtgaccactgtgagcggtgtttctacacgagaaaggatgttagaagacatttggtcgtgcatacggggtgcaaagattttctgtgccaattttgtgcccagcgtttcgggaggaaagaccatctcacccgccacactaaaaaaacccatagccaagagcttatgaaagaatccctgcagacgggggatctgctatctacattccacacgatctcacctagcttccaactgaaggccgcagccctacccccattccctttaggggcttcagcccagaatggtttggcttcgagcctgcctgccgaggtccactcgctgacactgagccctcccgaacaagcagctcagccaatgcagcctctgccggagagtcttgcatctctccacccaagcgtcagtcctgggtcccccccaccccctctaccaaaccataagtataacactacatcaactagttacagtcctttagcgtccctccctctcaaggctgacacaaaaggtttttgcaacatcagtctctttgaggacctgcctctccaagaaccccagtccccccagaagctgaatccgggattcgatttagcaaaaggcaatgccggtaaagtgaatctgcctaaggagctccccgctgatgccgtgaacttgaccattcccgcttccctcgatctgagccctctcttgggattttggcagctcccccctcccgcaacccaaaataccttcgggaactcaacactcgctttgggccctggggaaagtctaccccatcggctgtcctgtctgggacagcaacaacaagaacctcctttggccatgggtactgtttcactaggacaactgccccttcctcccatcccacacgtatttagtgccggaactggcagcgcaattttacctcactttcatcacgcgttccgatag

SEQ ID NO: 107629 - DNA, 1392 bp, Artificial Sequence
  derived and/or modified sequence
atggccacatttccatgccagttgtgtggtaagactttcctgactctggaaaagttcaccatccacaactattcccacagtcgcgaacgcccatacaagtgcgtccagcccgattgcgggaaagccttcgtatcacgctacaagctgatgcgacacatggccacccatagcccacagaaatcccaccagtgcgctcattgcgaaaagacctttaaccgcaaagaccatttgaagaaccacctgcaaactcacgaccctaacaaaatggccttcggttgcgaggagtgcggcaagaaatacaacaccatgctcggctacaaacgccacctggcactgcacgccgcttccagtggcgacctgacctgcggcgtgtgcgcacttgagctcggctctacggaggtgctgctcgaccatctgaaggcccacgccgaagagaaaccaccttcgggcaccaaggagaagaagcaccaatgtgaccactgcgagcgctgcttctacacccgcaaagacgtgcgacgccacctggtcgttcataccggatgcaaagactttctgtgtcagttttgcgcgcaaaggttcgggcgaaaggatcacttgaccaggcacactaaaaaaactcactcacaggaactgatgaaggagagtctgcagacaggggatctgctgagtaccttccacacaatctctccctccttccagctgaaagccgcagccctcccgccattccctctgggagcctctgcccagaacggtctcgcgagtagtcttccagccgaagtgcattctttgaccctgagcccacctgagcaggccgcacaaccaatgcagcctctacctgagagccttgcatcgctgcaccctagtgtgtcgccgggtagccccccacctccactccctaatcacaagtacaacactacgtccacgagttattcccctctggcgtcactccccctcaaggccgacaccaaggggttttgtaatatctcactcttcgaagatctcccattgcaagaacctcagtccccccaaaagctaaacccgggattcgatcttgcaaaaggcaatgccggaaaggtgaacctccctaaggagctgccggcagacgccgtgaacctgaccattcctgcgagcctagatctgagcccactgctgggattctggcagctgccacctcctgctacgcagaacacgttcggcaactcaacactggctttgggtccaggagaatctctgcctcacaggctttcgtgtctgggacagcagcaacaggaaccacctcttgccatgggaacagtatcgctggggcagttgccacttcctccaattccacacgtgttcagcgccggaaccggttcggccatcctgccgcacttccatcatgccttcaggtag

SEQ ID NO: 107630 - DNA, 1392 bp, Artificial Sequence
  derived and/or modified sequence
atggctacatttccttgccaattgtgcggaaagacatttcttactctggaaaagtttactattcacaattactctcatagcagggagaggccctacaagtgcgttcagcccgactgtggcaaggcctttgtgtctcgatacaagcttatgcgacacatggccacacattctccccagaagtcacatcaatgtgctcactgcgaaaagacctttaaccgcaaagatcatctgaaaaatcacttacagacccacgaccctaacaagatggcatttggttgtgaagaatgtggtaagaaatacaatacaatgttgggatacaagcgtcacttggctctacacgcagcaagtagcggagacttaacttgcggcgtctgtgcattggaactgggcagcactgaggttctgcttgaccatcttaaggctcatgccgaggagaagcccccatcaggcactaaggagaagaagcaccaatgtgatcattgtgagcggtgtttctatacacgtaaggatgtgcgtaggcacttggtggtgcacactgggtgcaaagactttctgtgtcagttctgcgcccaacgttttggtcgaaaggatcatctgacacgtcataccaaaaagacacattcacaagagctgatgaaagagtctctgcaaaccggggatcttctctctacgttccacacaatcagccctagctttcagcttaaagccgcagcccttccaccttttcccttaggggcatcagcccagaatggactggccagctctttgccagctgaggtccattctctgaccctaagtccgcctgaacaggccgctcagcctatgcagccgttacccgagagcttagcgtctcttcacccctccgtgagccctggttccccaccacccccacttcctaatcataagtataataccacctccacatcatactctccccttgcctctctccctctgaaagccgatactaaaggattttgtaatatttcgctgttcgaggacctccccttgcaggagcctcagagccctcagaagcttaatccgggattcgacctcgctaaggggaatgcgggaaaagtgaacctgcccaaagagttgcctgctgacgcagtcaatttgacgatcccagcgtccctagacctttctccactgctcggattctggcagctgcccccacccgcaactcagaatacttttggcaatagtaccctggcccttgggcctggagaaagtctgccacaccgcctgtcctgcttgggccagcagcagcaggagccgccactggcgatggggaccgtgtcactcggccagctaccattaccaccaatcccacacgtgttctcggccggaactggatccgccatcctaccccatttccaccacgccttcagatag

SEQ ID NO: 107631 - DNA, 1392 bp, Artificial Sequence
  derived and/or modified sequence
atggcaactttcccgtgccagctttgcggaaagactttccttactcttgagaagttcacaatccacaactatagccacagtagggagcgcccttacaaatgcgttcagccagactgtggcaaggctttcgtatcaagatataaacttatgaggcacatggcaacccattcccctcagaaatcccaccaatgtgctcactgtgagaaaactttcaaccgaaaggaccacctgaaaaatcacttgcagacacacgatcctaataaaatggctttcggttgtgaagagtgtggcaagaagtacaacacgatgcttggatacaagagacacctggcattgcacgctgccagcagcggtgaccttacctgtggagtttgcgctttagagctgggaagtactgaggtgctgttggaccatttaaaggcccatgcagaagagaaaccgccatctggcaccaaagaaaagaaacatcagtgcgatcattgcgaacggtgcttctacacacgaaaagacgtcagacgacacctggtggtccacaccgggtgcaaagactttctgtgtcaattctgcgctcagagatttggcaggaaggaccacttgacaagacacactaaaaaaacccacagccaggagttaatgaaggaaagtttgcagaccggcgatctcttaagtacgtttcacaccatttcaccttctttccagcttaaggcagctgcactcccccctttcccactgggagcttctgctcaaaatggcttggcctccagtctgccagcggaggtacactcactaactctgtctccaccggagcaggcagcccagcccatgcaacctttgcccgagagccttgcttccctacatcctagcgtgagcccagggtcacctccacccccattgccaaatcacaaatacaatactacctctacttcttatagtcctttggcctccttgccgctgaaagccgatactaaaggtttctgcaacatttccctgtttgaggatcttccgctccaggagccgcagagcccccaaaagctgaatcctggatttgatctggctaaggggaacgctggtaaggtgaatctgcctaaggagttgcctgcagacgctgtcaatctgacgatccccgcatctctggacctgagtcccttgttaggattttggcagctgccccctcccgctactcaaaataccttcgggaactcgaccctggctctaggaccgggagagagtttgccccacagattgagctgcctgggtcagcagcagcaagagcccccactggccatgggcaccgttagcctgggacagttacctctcccccctattccacacgtgtttagtgccggaaccggctccgccattttgccccacttccatcatgcctttcgctag

SEQ ID NO: 107632 - DNA, 1392 bp, Artificial Sequence
  derived and/or modified sequence
atggctacctttccttgtcaactttgcggaaagacattccttacgttagaaaaattcacgatacacaattacagccactcgcgggaacggccatataagtgtgttcagcccgactgcgggaaggcctttgtatcgagatacaagctgatgcgccacatggccacgcattcaccacaaaaaagccatcagtgcgcccactgcgaaaagactttcaatagaaaagatcacttaaaaaaccacttgcaaacccacgatccaaataaaatggcgtttggctgcgaggaatgcgggaagaagtacaatacgatgctcggctataagcggcatcttgccctgcatgccgcatcttcaggcgatctgacttgcggtgtttgtgcattagaactgggctccacggaagtgctgctggatcatttaaaggcccatgcagaggaaaagcccccttccggaacaaaggaaaagaaacaccaatgcgaccactgtgaacgctgcttctacacaagaaaggatgtgcggcgtcatctggtggtgcacacaggctgtaaggactttctgtgccagttctgtgcacagcggttcgggaggaaggaccacctaacaaggcacactaagaagacccatagccaggagctcatgaaggagtctctgcaaactggcgacctcttatcaacattccacactatttccccatctttccagcttaaggcagccgctcttcccccttttcccctgggcgcatctgcccagaatggtctggcatccagcctccccgcagaggttcactctttgactctgagtcccccagagcaggcggctcagcccatgcagcctcttcctgagtctctggcatccttgcatccctctgtctcaccgggaagtcctccgccacctcttccaaaccacaagtacaatacaacaagcacatcctatagccctctcgcgagcctgccattaaaagccgacacaaagggcttctgcaatatctcactgttcgaggatcttccacttcaggaaccgcagtccccccaaaagctcaatcccggattcgacctagcaaaagggaatgccggaaaggttaacctacctaaggaattacctgctgatgctgtcaacctcactataccagcctcactggacttatcccctctgctcggcttttggcagctacctccgcctgcaacacagaatacctttggcaatagcactctagccctcggccctggcgagagtctgccccataggctttcttgcctgggccagcagcagcaggagcctccgctcgcgatggggacagtgagtttggggcagctgccacttccccctatccctcacgtgtttagcgcgggaaccggatctgccatcttaccccactttcaccacgcattccggtag

SEQ ID NO: 107633 - DNA, 1392 bp, Artificial Sequence
  derived and/or modified sequence
atggctactttcccatgtcagctgtgcggaaagacatttctcacattggaaaagtttactatccataattatagccacagcagagagaggccatacaaatgtgtgcaacctgactgcggtaaggccttcgtttcgaggtacaagttaatgcgccacatggccacacatagcccacagaaatctcatcagtgtgcgcactgcgagaaaacatttaataggaaggaccatctgaaaaaccatctccagacacatgatcccaataagatggccttcggctgtgaggaatgcggcaaaaaatataacacaatgctggggtacaagcgccatctggcactacatgccgcttcctcaggcgatctgacctgcggcgtgtgcgctctcgagctggggtccacagaagtgctgcttgatcacctgaaggctcatgctgaagaaaagcctccttcggggaccaaagagaagaaacaccagtgcgatcactgtgaaagatgtttctacacaaggaaagacgtgcgcaggcatttagtggtccatactggctgcaaggactttctttgccagttttgtgcacaacggttcggccgaaaggaccacctgacacggcacaccaagaaaacccacagccaagaactgatgaaggagtcccttcagactggtgatctgttatctacgttccacacaattagcccttctttccagctcaaggccgctgccctacccccttttcccctgggtgcatccgcccagaatggactggcgtcttcactgcctgctgaggtacactctcttactctcagcccacccgaacaagctgcccagccaatgcagcctcttcccgagtcgcttgcgtcattgcatccttccgtgagccccggatccccgccaccacctttgcccaaccataagtataacacaacatccacatcgtactcaccacttgcttctttacctttgaaagccgacacgaaagggttttgtaacatctccctttttgaggacctgcccctgcaagagcctcagtcacctcagaaactgaacccgggttttgatctggcaaagggtaatgctgggaaagtgaatctaccaaaggagttaccagctgatgccgtgaacctcacaattccggcaagtctagaccttagccctctgctgggcttctggcagctgcccccacccgctactcagaatactttcgggaattcaacactggctctcggcccaggggaatctctcccacacagactgagttgtctggggcagcagcagcaggagcccccattagctatggggacagtgtccctgggtcagctcccattaccccctattccacacgtgttctccgcaggtaccggatccgctatcctgccgcactttcatcacgcattccggtag

SEQ ID NO: 107634 - DNA, 1392 bp, Artificial Sequence
  derived and/or modified sequence
atggctaccttcccttgccagttatgtggtaaaaccttcctgacgctggaaaagttcacaatccacaactattcccattccagggagagaccgtataagtgtgtccagccagattgtggtaaggcctttgtcagccgttataagctgatgaggcacatggctacccattctcctcaaaagtcccaccagtgcgcgcactgtgagaagacatttaacagaaaagaccatctgaagaatcatctgcagactcatgacccaaacaaaatggcctttggctgcgaagagtgcggcaaaaagtacaataccatgctgggttataaaaggcatctggccctccatgcagcctcatcgggtgatctgacttgtggcgtgtgcgccctcgagctgggcagtacagaggtgctgctcgaccacctcaaggcacacgccgaagaaaaaccgcctagcggcacaaaggagaaaaagcatcagtgcgatcattgtgaacgctgcttctatacccggaaggacgtccggaggcacttggtcgtgcatactgggtgcaaagacttcctttgccagttttgcgctcagaggtttggcaggaaggatcacctcacgcgacatacgaagaagacgcattctcaggaacttatgaaagaaagcctgcagacaggcgacctcctttccacgttccataccatctccccaagttttcaattgaaggctgccgcactgcctccattcccacttggggcttccgcccagaatggcttagcgagtagtctccctgccgaggttcactcacttacattgtctccacccgagcaggccgctcaacccatgcagccactccctgagagcctagcctctcttcatccatcagtgtccccaggcagccctcctcctcctctgcccaaccacaagtacaataccacctccactagctattcccccctcgcttcacttcccctaaaggccgacaccaaggggttttgcaatataagtctctttgaagaccttccgctgcaggagcctcagagccctcagaaacttaatccagggttcgacctggccaaaggaaatgccggtaaagttaatctgcctaaagaactgccagccgacgcagtcaatctcactattcctgcctccctggatctgtcccccctgttgggcttctggcagctgccacctccagccactcagaatacttttggcaactccaccctggccctgggcccaggggaatccctcccacacaggctgtcttgcctgggtcagcaacaacaagaacctcctttggccatggggactgtgagtctgggccagctccctctgccacctatcccccacgtgttttctgctggtactggctctgcgattctgccccacttccatcatgcttttaggtag

SEQ ID NO: 107635 - DNA, 1392 bp, Artificial Sequence
  derived and/or modified sequence
atggccaccttcccctgccagctgtgcggcaagaccttcctgaccctggagaagttcaccatccacaactacagccacagcagagagagaccctacaagtgcgtgcagcccgactgcggcaaggccttcgtgagcagatacaagctgatgagacacatggccacccacagcccccagaagagccaccagtgcgcccactgcgagaagaccttcaacagaaaggaccacctgaagaaccacctgcagacccacgaccccaacaagatggccttcggctgcgaggagtgcggcaagaagtacaacaccatgctgggctacaagagacacctggccctgcacgccgccagcagcggcgacctgacctgcggcgtgtgcgccctggagctgggcagcaccgaggtgctgctggaccacctgaaggcccacgccgaggagaagccccccagcggcaccaaggagaagaagcaccagtgcgaccactgcgagagatgcttctacaccagaaaggacgtgagaagacacctggtggtgcacaccggctgcaaggacttcctgtgccagttctgcgcccagagattcggcagaaaggaccacctgaccagacacaccaagaagacccacagccaggagctgatgaaggagagcctgcagaccggcgacctgctgagcaccttccacaccatcagccccagcttccagctgaaggccgccgccctgccccccttccccctgggcgccagcgcccagaacggcctggccagcagcctgcccgccgaggtgcacagcctgaccctgagcccccccgagcaggccgcccagcccatgcagcccctgcccgagagcctggccagcctgcaccccagcgtgagccccggcagcccccccccccccctgcccaaccacaagtacaacaccaccagcaccagctacagccccctggccagcctgcccctgaaggccgacaccaagggcttctgcaacatcagcctgttcgaggacctgcccctgcaggagccccagagcccccagaagctgaaccccggcttcgacctggccaagggcaacgccggcaaggtgaacctgcccaaggagctgcccgccgacgccgtgaacctgaccatccccgccagcctggacctgagccccctgctgggcttctggcagctgcccccccccgccacccagaacaccttcggcaacagcaccctggccctgggccccggcgagagcctgccccacagactgagctgcctgggccagcagcagcaggagccccccctggccatgggcaccgtgagcctgggccagctgcccctgccccccatcccccacgtgttcagcgccggcaccggcagcgccatcctgccccacttccaccacgccttcagatag

SEQ ID NO: 107636 - protein, 850 aa, Artificial Sequence
  derived and/or modified sequence
MRLGSGTFATCCVAIEVLGIAVFLRGFFPAPVRSSARAEHGAEPPAPEPSAGASSNWTTLPPPLFSKVVIVLIDALRDDFVFGSKGVKFMPYTTYLVEKGASHSFVAEAKPPTVTMPRIKERETPLPNLLVLCGDHGMSETGSHGASSTEEVNTPLILISSAFERKPGDIRHPKHVQQTDVAATLAIALGLPIPKDSVGSLLFPVVEGRPMREQLRFLHLNTVQLSKLLQENVPSYEKDPGFEQFKMSERLHGNWIRLYLEEKHSEVLFNLGSKVLRQYLDALKTLSLSLSAQVAQYDIYSMMVGTVVVLEVLTLLLLSVPQALRRKAELEVPLSSPGFSLLFYLVILVLSAVHVIVCTSAESSCYFCGLSWLAAGGVMVLASALLCVIVSVLTNVLVGGNTPRKNPMHPSSRWSELDLLILLGTAGHVLSLGASSFVEEEHQTWYFLVNTLCLALSQETYRNYFLGDDGEPPCGLCVEQGHDGATAAWQDGPGCDVLERDKGHGSPSTSEVLRGREKWMVLASPWLILACCRLLRSLNQTGVQWAHRPDLGHWLTSSDHKAELSVLAALSLLVVFVLVQRGCSPVSKAALALGLLGVYCYRAAIGSVRFPWRPDSKDISKGIIEARFVYVFVLGILFTGTKDLLKSQVIAADFKLKTVGLWEIYSGLVLLAALLFRPHNLPVLAFSLLIQTLMTKFIWKPLRHDAAEITVMHYWFGQAFFYFQGNSNNIATVDISAGFVGLDTYVEIPAVLLTAFGTYAGPVLWASHLVHFLSSETRSGSALSHACFCYALICSIPVFTYIVLVTSLRYHLFIWSVFSPKLLYEGMHLLITAAVCVFFTAMDQTRLTQS

SEQ ID NO: 107637 - DNA, 2553 bp, Artificial Sequence
  derived and/or modified sequence
atgagactgggcagcggcaccttcgccacctgctgcgtggccatcgaggtgctgggcatcgccgtgttcctgagaggcttcttccccgcccccgtgagaagcagcgccagagccgagcacggcgccgagccccccgcccccgagcccagcgccggcgccagcagcaactggaccaccctgcccccccccctgttcagcaaggtggtgatcgtgctgatcgacgccctgagagacgacttcgtgttcggcagcaagggcgtgaagttcatgccctacaccacctacctggtggagaagggcgccagccacagcttcgtggccgaggccaagccccccaccgtgaccatgcccagaatcaaggagagagagacccccctgcccaacctgctggtgctgtgcggcgaccacggcatgagcgagaccggcagccacggcgccagcagcaccgaggaggtgaacacccccctgatcctgatcagcagcgccttcgagagaaagcccggcgacatcagacaccccaagcacgtgcagcagaccgacgtggccgccaccctggccatcgccctgggcctgcccatccccaaggacagcgtgggcagcctgctgttccccgtggtggagggcagacccatgagagagcagctgagattcctgcacctgaacaccgtgcagctgagcaagctgctgcaggagaacgtgcccagctacgagaaggaccccggcttcgagcagttcaagatgagcgagagactgcacggcaactggatcagactgtacctggaggagaagcacagcgaggtgctgttcaacctgggcagcaaggtgctgagacagtacctggacgccctgaagaccctgagcctgagcctgagcgcccaggtggcccagtacgacatctacagcatgatggtgggcaccgtggtggtgctggaggtgctgaccctgctgctgctgagcgtgccccaggccctgagaagaaaggccgagctggaggtgcccctgagcagccccggcttcagcctgctgttctacctggtgatcctggtgctgagcgccgtgcacgtgatcgtgtgcaccagcgccgagagcagctgctacttctgcggcctgagctggctggccgccggcggcgtgatggtgctggccagcgccctgctgtgcgtgatcgtgagcgtgctgaccaacgtgctggtgggcggcaacacccccagaaagaaccccatgcaccccagcagcagatggagcgagctggacctgctgatcctgctgggcaccgccggccacgtgctgagcctgggcgccagcagcttcgtggaggaggagcaccagacctggtacttcctggtgaacaccctgtgcctggccctgagccaggagacctacagaaactacttcctgggcgacgacggcgagcccccctgcggcctgtgcgtggagcagggccacgacggcgccaccgccgcctggcaggacggccccggctgcgacgtgctggagagagacaagggccacggcagccccagcaccagcgaggtgctgagaggcagagagaagtggatggtgctggccagcccctggctgatcctggcctgctgcagactgctgagaagcctgaaccagaccggcgtgcagtgggcccacagacccgacctgggccactggctgaccagcagcgaccacaaggccgagctgagcgtgctggccgccctgagcctgctggtggtgttcgtgctggtgcagagaggctgcagccccgtgagcaaggccgccctggccctgggcctgctgggcgtgtactgctacagagccgccatcggcagcgtgagattcccctggagacccgacagcaaggacatcagcaagggcatcatcgaggccagattcgtgtacgtgttcgtgctgggcatcctgttcaccggcaccaaggacctgctgaagagccaggtgatcgccgccgacttcaagctgaagaccgtgggcctgtgggagatctacagcggcctggtgctgctggccgccctgctgttcagaccccacaacctgcccgtgctggccttcagcctgctgatccagaccctgatgaccaagttcatctggaagcccctgagacacgacgccgccgagatcaccgtgatgcactactggttcggccaggccttcttctacttccagggcaacagcaacaacatcgccaccgtggacatcagcgccggcttcgtgggcctggacacctacgtggagatccccgccgtgctgctgaccgccttcggcacctacgccggccccgtgctgtgggccagccacctggtgcacttcctgagcagcgagaccagaagcggcagcgccctgagccacgcctgcttctgctacgccctgatctgcagcatccccgtgttcacctacatcgtgctggtgaccagcctgagataccacctgttcatctggagcgtgttcagccccaagctgctgtacgagggcatgcacctgctgatcaccgccgccgtgtgcgtgttcttcaccgccatggaccagaccagactgacccagagctag

SEQ ID NO: 107638 - DNA, 2553 bp, Artificial Sequence
  derived and/or modified sequence
atgcgcctcggttctgggacattcgcaacttgctgcgtggcgattgaagtgttaggtattgctgtttttctaagagggttcttccccgccccggtgaggtcctctgctcgggccgagcatggcgcagaaccacctgcccccgaacccagcgctggggcaagtagcaattggaccaccctgcccccaccacttttcagcaaggtagttatcgtgcttattgatgcattgagagacgattttgtgttcggcagtaaaggtgtcaagttcatgccatacactacctacctggtggaaaaaggcgcatctcatagtttcgtggctgaagccaaaccccccaccgtgaccatgccccgtatcaaggagcgtgaaacaccactcccaaacttgctagtgctgtgcggcgaccacgggatgtctgaaaccggcagtcacggagcttcgtcaacagaggaggtaaacacacctctgattttgatctcttcagcctttgaacgaaagcctggggatattagacacccgaaacacgtccagcagacagatgtggcagcgacactggcgatcgctcttggtcttcccatccccaaggactcagtgggaagcttgctgtttcctgtggtggagggacggcccatgcgagaacaactgcgattcctgcatttgaacaccgttcagctcagtaagctgctgcaagaaaacgtgccatcctatgagaaggatccaggcttcgagcagttcaaaatgtccgaaagacttcatggcaattggatccgactgtacctcgaggagaagcactcagaggtcctatttaatctcggatcaaaggtactccggcagtatctggacgccctgaaaacattgtctctgtcgctcagtgcccaggtagcccagtacgacatctattcaatgatggtgggtactgttgttgtgctagaggtgcttacgctgctgctgctgagcgtaccacaagcactgcgccgaaaagccgaactcgaggtgcctctcagttctcccggtttctccctgctgttctacctggttattctggtgctctccgcggtgcacgttatagtatgtacctccgctgagtcttcctgttatttttgtggcctatcatggctagccgccggcggagtgatggtactggccagcgcgttgctgtgcgtgattgtctctgtgctgactaatgttttagttggcgggaatacacctcgaaaaaaccccatgcatccttctagccgatggtccgaactcgacctgctcatcctgctggggaccgccgggcatgtcctttcactgggcgcgtcaagctttgtcgaagaagaacatcagacctggtattttctggtcaacaccctgtgtctggcactgtcccaggagacctaccgcaactacttcctgggggatgatggggagcccccgtgtggcctttgcgtagagcagggccatgatggggctaccgctgcttggcaggacggtcccggatgcgacgtgcttgagagggataagggccacggctcaccttcaacttccgaagtactccgcggccgagagaagtggatggtgctcgcctccccttggctcatactagcctgctgtcgtcttctccgcagccttaatcagaccggcgttcagtgggcccacagacctgatctgggacattggttaaccagcagcgatcacaaagctgagctaagcgttttggccgcactgtccctgctagtggtgtttgtccttgtgcaacgtgggtgttcacccgtaagcaaggcggcattagccctaggccttttaggagtttattgctacagggccgcaatcggtagcgtgcgttttccttggaggcccgacagcaaggatatttccaagggcattatcgaggccaggttcgtttacgtgtttgtcctcgggattttattcaccgggaccaaggatcttctgaaaagtcaagtgatcgcggccgattttaagctgaaaacagtagggctctgggagatttattcaggtttggttttgctggctgcacttctgtttcgcccgcacaatttgcccgtgctggctttcagtctgctgatacagacactgatgaccaaatttatttggaagcccctgcgacacgatgccgccgagattaccgtgatgcactattggtttggtcaggcattcttctacttccaaggcaactccaataatatcgctacagttgatatctcagccggtttcgttggcctcgacacctatgttgagattcccgcggttctgctcaccgctttcgggacttatgcagggcccgtgttgtgggcctcacatcttgtgcactttctgagcagcgaaacacgcagcgggagtgccctgagccatgcctgtttctgttacgctctcatctgctccattcctgtctttacatatatcgttctggtgaccagcctgcgataccatctctttatttggtcagtgttctcccccaagctgttatacgaaggcatgcacctgttaattaccgcagccgtttgtgtgtttttcactgccatggatcagacgcgcctgacccagtcatag

SEQ ID NO: 107639 - DNA, 2553 bp, Artificial Sequence
  derived and/or modified sequence
atgaggctgggcagcggcacctttgccacctgctgcgtggccatcgaggtgctgggcattgctgtgttcctgcggggcttcttccctgcccctgtgcgcagcagcgcccgggcagagcacggggctgagcccccagcccctgagcccagcgctggggccagcagcaactggaccaccctgcccccacccctcttcagcaaggtggtgattgtgctgattgatgccctgagagatgactttgtgtttggcagcaaaggagtgaagttcatgccctacaccacctacctggtggagaagggggccagccacagctttgtggccgaggccaagcccccaacagtgaccatgccccgcatcaaggagcgggagacccccctgcccaacctgctggtgctgtgtggggaccacggcatgtctgaaacaggcagccacggggccagcagcacagaggaggtgaacacccccctcatcctgatcagcagcgcctttgagaggaagccaggggacatccgccaccccaagcacgtgcagcagacagatgtggccgccaccctggccatcgccctgggcctgcccatccccaaggacagcgtgggcagcctgctcttccctgtggtggagggccggcccatgagggagcagctgcgcttcctgcacctgaacacagtgcagctgagcaagctgctgcaggagaatgtgcccagctatgagaaggaccccggctttgagcagttcaagatgtctgagcggctgcacggcaactggatccggctgtacctggaggagaagcacagcgaggtgctcttcaacctgggcagcaaggtgctgcggcagtacctggatgccctgaagaccctgagcctgagcctgagcgcccaggtggcccagtatgacatctacagcatgatggtgggcaccgtggtggtgctggaggtgctgaccctgctgctgctgtctgtgccccaggccctgcggaggaaggccgagctggaggtgcccctgagcagccctggcttcagcctgctcttctacctggtgatcctggtgctgtctgctgtgcacgtgattgtgtgcaccagcgctgagagcagctgctacttctgtggcctgtcctggctggccgccggcggcgtgatggtgctggccagcgccctgctgtgtgtgattgtgtctgtgctgaccaacgtgctggtgggcggcaacacccccaggaagaaccccatgcaccccagcagccgctggagcgagctggacctgctgatcctgctgggcacagctggccacgtgctgagcctgggcgccagcagctttgtggaggaggagcaccagacctggtacttcctggtgaacaccctgtgcctggccctgagccaggagacctacagaaactacttcctgggagatgatggagagcccccctgtggcctgtgtgtggagcagggccatgatggagccacagctgcctggcaggacggccctggctgtgatgtgctggagcgggacaagggccacggcagccccagcaccagcgaggtgctgcggggccgggagaagtggatggtgctggccagcccctggctgatcctggcctgctgccgcctgctgcggagcctgaaccagacaggagtgcagtgggcccacaggccagacctgggccactggctgaccagcagtgaccacaaggccgagctgtctgtgctggccgccctgagcctgctggtggtgtttgtgctggtgcagaggggctgcagccctgtgtccaaggccgccctggccctgggcctgctgggcgtgtactgctacagagctgccatcggctctgtgcgcttcccctggaggccagacagcaaggacatcagcaagggcatcatcgaggccaggtttgtgtatgtgtttgtgctgggcatcctcttcaccggcaccaaggacctgctgaagagccaggtgattgctgctgacttcaagctgaagacagtgggcctgtgggagatctacagcggcctggtgctgctggccgccctgctcttccggccccacaacctgcctgtgctggccttcagcctgctgatccagaccctgatgaccaagttcatctggaagcccctgcggcatgatgctgctgagatcaccgtgatgcactactggtttggccaggccttcttctacttccagggcaacagcaacaacatcgccaccgtggacatctctgctggctttgtgggcctggacacctacgtggagatcccagctgtgctgctgacagccttcggcacctacgccggccctgtgctgtgggccagccacctggtgcacttcctgagcagcgagaccaggagcggcagcgccctgagccacgcctgcttctgctacgccctgatctgcagcatccctgtgttcacctacatcgtgctggtgaccagcctgcgctaccacctgttcatctggagcgtcttcagccccaagctgctgtatgagggcatgcacctgctgatcacagctgctgtgtgtgtgttcttcaccgccatggaccagacccggctgacccagagctag

SEQ ID NO: 107640 - DNA, 2553 bp, Artificial Sequence
  derived and/or modified sequence
atgcggctgggcagcggcaccttcgccacctgctgcgtggccatcgaagttctgggaatcgctgtgtttctccggggctttttccctgcaccagtgaggtcatcagcccgtgcagagcacggtgctgagccccccgcgccggagccgtcagctggggcatcctcaaactggaccacactgccacctcccctgttttctaaggtggtcatcgtgctgatagatgccttgcgcgacgactttgtcttcggatctaagggagttaaattcatgccatatacaacctatctggtggaaaaaggtgcgagccactcgtttgtggccgaggcaaagccaccaaccgtgactatgcccaggattaaagagcgggagactccactcccaaatcttcttgttctgtgtggtgatcatggaatgtctgagacgggaagccacggcgcgtcatctacagaggaagtcaatactcccttaatccttatctctagtgctttcgaacggaaacctggagacatacgccaccctaagcacgtgcagcagaccgatgtggccgctacactggccatcgcactggggttgcccatccctaaggattctgttggaagtttgcttttccctgtggttgaaggcagacctatgagggagcagttacggtttctgcaccttaacactgtgcagctcagtaagctactgcaggaaaatgtcccatcctacgagaaggaccccggcttcgagcagttcaagatgagcgaacggctgcatggaaactggattagactctacctagaagagaaacattcggaagtcctctttaatctcggaagcaaggtgctcaggcaatatctagacgccttaaagaccctgagcctgagcttgagtgcgcaggtagcccaatatgacatctactccatgatggtgggcactgtggtggtgcttgaagtgcttaccttactgctgttgtctgttccacaagcattgcgcaggaaagccgaacttgaagttcccttatcctcacccgggttttctctactcttctatctggtaatcctcgtcctcagcgccgtgcacgtgattgtttgcacctctgccgagtcaagttgctatttttgtggattatcatggctggctgccggaggggtgatggtcttggcctcagcgctgctgtgcgtgatcgtgagcgtgctcaccaacgtactggtggggggcaacactccccgcaaaaaccctatgcatccgtccagcagatggtccgaacttgaccttctcatcctcctgggcaccgctggccatgtgctgtcactgggagcatcatccttcgtcgaagaggaacatcagacatggtattttcttgtgaacaccctctgtctggctctgtcacaggagacgtatcgcaattattttttgggggatgacggtgaacctccttgcggcctgtgtgtggagcaaggccacgatggagctacagcggcctggcaagatggacccggatgcgacgtacttgaaagggataaggggcatggatctccttcaacatccgaggtattgaggggccgtgaaaaatggatggtgttggcctctccatggctcattcttgcgtgctgtcggctacttagatctctgaatcagaccggcgtccagtgggcacatcgacccgaccttggccactggctgacttcctctgatcataaggcagagctgtctgtgttggccgctctgtccctgctcgtggtttttgtgttggtgcagcgcggctgctcccccgttagcaaagctgcactcgcattgggcctgctcggcgtgtactgttatcgagccgctatcggttccgtgcgctttccttggagacctgattcaaaagatatttcgaaagggattatcgaagccagatttgtgtatgtctttgtgctcgggatcctgtttactggaactaaggacttgcttaaaagccaggtgatcgccgctgacttcaaattaaagacagtgggtttatgggaaatctactccggccttgttctcctggctgctctgctgtttcgtccccataacctgccagtcttagccttttctctgctcatccagaccctcatgacgaagtttatctggaaaccactgcggcatgacgctgctgaaattactgtgatgcactactggtttggtcaggcctttttctacttccaaggtaattctaataacatagccactgtggatatctccgcaggcttcgtcggccttgacacttacgttgagatcccagccgtattactcaccgcattcgggacctacgcagggcctgtgttgtgggcgtcccacctggtgcattttttgtcttcggagacccgtagtggatccgctctgtctcacgcttgtttttgctacgcactcatctgtagcattccggtctttacctacattgtcctggtgacatccctccgttatcacttatttatatggtccgtatttagtcccaagctgctgtacgagggcatgcatttgttgatcacggctgctgtctgtgtctttttcaccgctatggatcagaccagactgactcaatcctag

SEQ ID NO: 107641 - DNA, 2787 bp, Artificial Sequence
  derived and/or modified sequence
cctggagccggaagcgcggctgcagcagggcgaggctccaggtggggtcggttccgcatccagcctagcgtgtccacgatgcggctgggctccgggactttcgctacctgttgcgtagcgatcgaggtgctagggatcgcggtcttccttcggggattcttcccggctcccgttcgttcctctgccagagcggaacacggagcggagcccccagcgcccgaaccctcggctggagccagttctaactggaccacgctgccaccacctctcttcagtaaagttgttattgttctgatagatgccttgagagatgattttgtgtttgggtcaaagggtgtgaaatttatgccctacacaacttaccttgtggaaaaaggagcatctcacagttttgtggctgaagcaaagccacctacagttactatgcctcgaatcaaggagagagagacgcctttacccaatttgctggttctttgtggtgaccatggcatgtctgaaacaggaagtcacggggcctcctccaccgaggaggtgaatacacctctgattttaatcagttctgcgtttgaaaggaaacccggtgatatccgacatccaaagcacgtccaacagacggatgtggctgcgacactggcgatagcacttggcttaccgattccaaaagacagtgtagggagcctcctattcccagttgtggaaggaagaccaatgagagagcagttgagatttttacatttgaatacagtgcagcttagtaaactgttgcaagagaatgtgccgtcatatgaaaaagatcctgggtttgagcagtttaaaatgtcagaaagattgcatgggaactggatcagactgtacttggaggaaaagcattcagaagtcctattcaacctgggctccaaggttctcaggcagtacctggatgctctgaagacgctgagcttgtccctgagtgcacaagtggcccagtacgacatctattcgatgatggtggggactgtcgtggttttggaggttctcaccctgctcctgctcagcgtcccacaggcactgcgcagaaaggctgagctggaagtcccactgtcatctcctgggttttctctgctcttttatttggtgatcctggttctttcggccgttcacgtcattgtgtgcacctcagctgaaagttcgtgctacttctgtggcctctcgtggctggcggcaggtggggtgatggtgctggcctcggcgctgctgtgtgtgattgtgtctgttctgaccaacgtgctcgtgggtggaaacaccccaaggaagaaccccatgcatcccagctcaaggtggtcagagctagaccttcttattctgttggggacggcgggccacgtcttgagcctgggcgccagcagcttcgtggaggaggagcaccagacctggtacttccttgtgaacaccctgtgtctagctctgagccaagaaacctacagaaactactttctgggagatgacggtgagcctccgtgtggcctctgtgtggaacaagggcatgacggggccacagcagcgtggcaggacgggcctggctgtgatgtcctggagcgagacaaaggccacggaagcccctctacctccgaagtgctcagaggccgcgagaagtggatggtgctggccagtccgtggctaatactggcctgctgccggctgctgcgctccctaaaccagacaggtgtgcagtgggctcaccggcctgacctcggccactggctcaccagctctgaccacaaagccgagctctctgtcctggctgccctctccctcctcgtagtttttgtgctggtgcagagggggtgctcccctgtgtccaaggctgccctggcgctggggctgctgggcgtctactgctaccgggcggccatcgggagtgtccggttcccgtggcggccggacagcaaggacatttccaagggtattattgaagctcgttttgtttatgtctttgtccttggcattctgttcacgggcaccaaagacttacttaaatctcaagtcattgctgcagacttcaaactcaagactgtaggtttatgggagatatatagtggattagttcttctggcagccttgctctttagaccacataatcttccggtcttagcatttagcctcttgattcagactctaatgactaaattcatctggaagcccctgagacacgatgcagctgagattactgtgatgcattattggtttggtcaagcattcttctattttcagggcaactccaacaacattgccaccgtggacatctccgcaggcttcgtgggcttagacacctacgtggaaatcccagccgtgctcctgacagcgtttgggacgtacgcagggcctgtgctgtgggccagccacttagtgcacttcctgagctcagaaacacgcagtggttcagcactgagtcatgcttgcttctgctacgcactgatttgttctattccagttttcacgtacatcgttttggtgacatctctgcgttatcatttatttatatggagtgtattttctccaaaacttctctacgagggaatgcacctgctcattacagctgctgtctgtgtattcttcacggcaatggatcaaaccagactcacacagtcttagactaagctgaacactggaaaaataatacatgcttaaagtctgctgttattctaaaatgaaagatatgaattcaacaaagttgatggataactttctttgactgctctacctgaatttagactaagcagtaaatagtttaataaaagatcactttaa

SEQ ID NO: 107642 - DNA, 2553 bp, Artificial Sequence
  derived and/or modified sequence
atgcgcttgggaagtggaactttcgcaacctgctgcgtcgcaattgaggtgctggggatagctgtcttcctgcggggtttcttcccagcacccgtgaggagcagtgcgagagccgaacatggcgctgaacccccagccccagaaccaagcgctggcgcaagctccaactggaccacccttccccctcccttgttctcaaaggtcgttatagttctgattgatgctctgcgcgacgacttcgtctttggatccaagggcgtgaagtttatgccctatactacctatttagtggaaaagggagcgagccattcattcgtagccgaggcgaagccaccaactgtcaccatgccgaggattaaagaaagagaaaccccgctgcctaatctgttagtactctgtggcgaccacggtatgagtgaaaccgggtcacatggagcctccagtaccgaagaggtgaacacccccctcatcctgatttcatccgctttcgaaaggaagccaggagacatacgccacccaaaacatgtccaacagactgatgttgccgcaactctggcaatagcactggggctgcccatccccaaggattctgttggctccctgctttttcccgtcgtggaggggaggcctatgagagaacagctgcgctttctgcatctgaatacggtgcagctttccaagctgctgcaagagaatgtcccatcttacgagaaggacccaggattcgagcaatttaaaatgtccgaacggcttcacggaaactggatccggctgtatctcgaggagaaacattccgaagtcctcttcaatctgggatcaaaagtcctgagacagtatttggacgcactgaagacacttagcttgtccctgtctgcacaggtcgcgcagtacgatatatattctatgatggtgggcacagtggtcgtgcttgaggtcctgactttgctgctgctgtctgtgcctcaagctctccgcaggaaagctgaactcgaggtgccattgtctagtcccggtttctccctgcttttttacctggtgatactcgtgctgagcgcggtgcatgttatcgtatgcacatccgccgagtctagctgttacttttgcggtctttcctggctggctgctggcggtgtgatggtccttgcgtctgcactgctgtgtgtcatagtctctgtcctgactaatgtgttagtggggggtaacactcctcgaaagaaccccatgcacccgtcatcgaggtggtccgaacttgatctacttattttgctcggcactgctgggcacgtcctgtccctgggagcctctagcttcgtcgaggaggagcaccaaacttggtatttcttggtgaatactctgtgcctggcactatcccaggaaacctataggaactacttcctcggtgacgatggggagccaccctgtggactctgcgttgagcaggggcacgatggggcaacagctgcatggcaggatggaccaggatgtgatgtcctggagagagacaagggccatggttccccttctacctcggaggtactgcggggtcgggaaaagtggatggtgctcgcctctccttggctaatcctggcatgctgtagattattgcgctctcttaatcagactggggtgcagtgggctcaccggcctgaccttggtcactggctgacaagcagtgaccacaaagccgaattaagcgtgctggctgcgttgagcctgttggtcgtcttcgtgctggtacagagaggctgcagcccggtcagcaaggccgcattggcactgggactgctgggcgtttactgctatagggccgcaattggcagcgttaggtttccatggagacccgactccaaggacataagtaagggcatcatcgaggccaggtttgtctacgtctttgtgttgggaatcctgtttacaggcacaaaagatctgcttaagagccaggtgatcgctgcagacttcaagttgaaaacggttggactgtgggagatttattccggactggtattgctggcagctctgctctttaggccacacaacctaccggtgctcgcctttagcctgctgatccagacgctgatgactaagttcatctggaaaccactgcgccatgacgccgcagaaataactgtgatgcattactggtttggtcaagctttcttctatttccaggggaactctaataatattgcgacggtcgacatttctgctggctttgtcggcttggatacatatgttgagattcccgctgtcttactgacggccttcggtacttatgccggtcccgttctgtgggcctctcaccttgttcacttcctatcgagcgaaacacgctcagggtctgcgttatcacacgcctgcttctgttatgcgctcatatgctctatccccgtgtttacgtacatcgttctcgttacaagcctgcggtaccatttgtttatctggtccgtattttcccctaagttactctatgaaggaatgcacctcctgatcaccgctgctgtgtgtgtgttcttcacagccatggaccagacacgcctcacacaatcatag

SEQ ID NO: 107643 - protein, 341 aa, Artificial Sequence
  derived and/or modified sequence
MTGSLPGFVDVIRNLNSPALLEDSVIRQAKAAGKRIVFYGDETWVKLFPKHFVEYDGTTSFFVSDYTEVDNNVTRHLDKVLKRGDWDILILHYLGLDHIGHISGPNSPLIGQKLSEMDSVLMKIHTSLQSKERETPLPNLLVLCGDHGMSETGSHGASSTEEVNTPLILISSAFERKPGDIRHPKHVQQTDVAATLAIALGLPIPKDSVGSLLFPVVEGRPMREQLRFLHLNTVQLSKLLQENVPSYEKDPGFEQFKMSERLHGNWIRLYLEEKHSEVLFNLGSKVLRQYLDALKTLSLSLSAQVAQFSPCSCSASHRHCAERLSWKSHCHLLGFLCSFIW

SEQ ID NO: 107644 - DNA, 1026 bp, Artificial Sequence
  derived and/or modified sequence
atgaccggcagcctgcccggcttcgtggacgtgatcagaaacctgaacagccccgccctgctggaggacagcgtgatcagacaggccaaggccgccggcaagagaatcgtgttctacggcgacgagacctgggtgaagctgttccccaagcacttcgtggagtacgacggcaccaccagcttcttcgtgagcgactacaccgaggtggacaacaacgtgaccagacacctggacaaggtgctgaagagaggcgactgggacatcctgatcctgcactacctgggcctggaccacatcggccacatcagcggccccaacagccccctgatcggccagaagctgagcgagatggacagcgtgctgatgaagatccacaccagcctgcagagcaaggagagagagacccccctgcccaacctgctggtgctgtgcggcgaccacggcatgagcgagaccggcagccacggcgccagcagcaccgaggaggtgaacacccccctgatcctgatcagcagcgccttcgagagaaagcccggcgacatcagacaccccaagcacgtgcagcagaccgacgtggccgccaccctggccatcgccctgggcctgcccatccccaaggacagcgtgggcagcctgctgttccccgtggtggagggcagacccatgagagagcagctgagattcctgcacctgaacaccgtgcagctgagcaagctgctgcaggagaacgtgcccagctacgagaaggaccccggcttcgagcagttcaagatgagcgagagactgcacggcaactggatcagactgtacctggaggagaagcacagcgaggtgctgttcaacctgggcagcaaggtgctgagacagtacctggacgccctgaagaccctgagcctgagcctgagcgcccaggtggcccagttcagcccctgcagctgcagcgccagccacagacactgcgccgagagactgagctggaagagccactgccacctgctgggcttcctgtgcagcttcatctggtag

SEQ ID NO: 107645 - DNA, 1026 bp, Artificial Sequence
  derived and/or modified sequence
atgaccgggtctctccccgggttcgtggatgtcattaggaacctgaattctccggcgctgcttgaagactccgtgatcagacaggcaaaagcagccggaaagcgcattgtgttttacggagatgaaacctgggtcaagctgttcccgaagcactttgtggaatatgacggaactacatcttttttcgtcagcgactacactgaggtggacaacaatgtgacccgccatctggacaaggtcctgaagcggggggattgggatatcctgatcctgcactacctcggcctggaccacattggacatataagtgggccaaacagtcccctgatcggccagaagctgtctgaaatggactccgtccttatgaagattcacacgagcttgcaatctaaggagagggagacccccctgcccaatctgctggtgttatgcggcgatcacggaatgagcgagactggcagccacggcgcttcctccaccgaggaggtaaacacccccctgattctcattagttcagcattcgagaggaaacctggcgatattaggcatcccaaacatgtccagcagaccgacgtagctgccaccttagctatcgcactgggcctgcccattcctaaggacagtgtcgggagtctgttgttcccagtggtggaaggtcgtcctatgcgggagcagttacggtttctccatcttaacactgtgcagctgtccaaactgctgcaagagaacgttcctagctatgagaaggaccctggcttcgaacagttcaagatgtcagaaaggttgcatggaaattggattaggctctacctggaggaaaaacactctgaggtgctctttaacttaggcagcaaggtgctgagacagtaccttgatgctttgaagaccctgtccctgtccctgagcgcccaagttgcccagttctctccatgcagctgttctgccagccaccgtcactgtgcggaacgcttgtcatggaagagtcactgtcaccttctcggttttttatgcagctttatctggtag

SEQ ID NO: 107646 - DNA, 1026 bp, Artificial Sequence
  derived and/or modified sequence
atgacaggcagcctgcccggctttgtggatgtgatccggaacctgaacagccctgccctgctggaggacagcgtcatccggcaggccaaggccgccggcaagagaattgtgttctatggagatgagacctgggtgaagctgttccccaagcactttgtggagtatgatggcaccaccagcttctttgtgtctgactacacagaggtggacaacaacgtgaccaggcacctggacaaggtgctgaagagaggagactgggacatcctgatcctgcactacctgggcctggaccacatcggccacatcagcggccccaacagccccctcatcggccagaagctgtctgagatggattctgtgctgatgaagatccacaccagcctgcagagcaaggagcgggagacccccctgcccaacctgctggtgctgtgtggggaccacggcatgtctgagaccggcagccatggagccagcagcacagaggaggtgaacacccccctcatcctgatcagcagcgcctttgagaggaagccaggggacatccgccaccccaagcacgtgcagcagacagatgtggccgccaccctggccatcgccctgggcctgcccatccccaaggacagcgtgggcagcctgctcttccctgtggtggagggccggcccatgagggagcagctgcgcttcctgcacctgaacacagtgcagctgagcaagctgctgcaggagaatgtgcccagctatgagaaggaccccggctttgagcagttcaagatgtctgagcggctgcacggcaactggatccggctgtacctggaggagaagcacagcgaggtgctcttcaacctgggcagcaaggtgctgcggcagtacctggatgccctgaagaccctgagcctgagcctgagcgcccaggtggcccagttcagcccctgcagctgcagcgccagccaccgccactgtgccgagcggctgtcctggaagagccactgccacctgctgggcttcctgtgcagcttcatctggtag

SEQ ID NO: 107647 - DNA, 1026 bp, Artificial Sequence
  derived and/or modified sequence
atgaccggcagcctgcccggcttcgtggacgtgatccggaacctgaactcaccggccttacttgaggacagtgttattagacaagcaaaggccgctgggaagaggatagtgttttacggtgacgagacctgggtgaaattatttcctaagcatttcgttgagtacgatggcactacaagcttttttgtatcagactacacagaagttgacaacaatgtgacgaggcacctcgacaaagtgctgaaacgcggagactgggacatccttatcctgcactacctgggactcgaccacattgggcacatcagcggtcctaatagcccgctcattggtcagaagctgagcgaaatggactccgtgctcatgaagattcacaccagcctccagtctaaagagcgtgaaacacctcttcctaacctgcttgtcctgtgtggggaccacggcatgtctgagactggctcccacggggcaagcagtacggaggaggtgaacaccccactcatcttaataagctcggcttttgagaggaaacccggggacatcagacatcccaagcatgtgcaacagactgacgtcgccgcaactttggcgatagctttggggctgcccattcccaaggatagcgttggctccctcctgtttcctgtagtcgaaggtcgaccaatgcgtgagcagttgcggttccttcatttgaataccgtccaactgtcgaagttactccaagagaacgtccctagctatgagaaagaccccggctttgagcaattcaagatgtctgaacgtctccacggcaattggattagactttacctcgaggaaaaacactctgaagttctgttcaaccttgggtccaaagtgctgcgtcagtatcttgacgccttaaaaaccctatctctgtcacttagcgctcaggtggcccaattcagcccatgtagctgttccgcttcacaccggcactgtgcagagagactttcatggaagagtcattgtcatttactcgggttcctttgctcgttcatttggtag

SEQ ID NO: 107648 - DNA, 1784 bp, Artificial Sequence
  derived and/or modified sequence
actgtcgctgcgacgataaggcctggcgttattgcttagaggcggctacctggagccggaagcgcggctgcagcagggcgaggctccaggtggggtcggttccgcatccagcctagcgtgtccacgatgcggctgggctccgggactttcgctacctgttgcgtagcgatcgaggtgctagggatcgcggtcttccttcggggattcttcccggctcccgttcgttcctctgccagagcggaacacggagcggagcccccagcgcccgaaccctcggctggagccagttctaactggaccacgctgccaccacctctcttcagtaaagttgttattgttctgatagatgccttgagagatgattttgtgtttgggtcaaagggtgtgaaatttatgccctacacaacttaccttgtggaaaaaggagcatctcacagttttgtggctgaagcaaagccacctacagttactatgcctcgaatcaaggtgtccagcctactgacagcagctttgaagtacatagtgcatttcccaagaaccgtgggtaaagaaaaaagcattgatgacggggagccttcctggctttgtcgacgtcatcaggaacctcaattctcctgcactgctggaagacagtgtgataagacaagcaaaagcagctggaaaaagaatagtcttttatggagatgaaacctgggttaaattattcccaaagcattttgtggaatatgatggaacaacctcatttttcgtgtcagattacacagaggtggataataatgtcacgaggcatttggataaagtattaaaaagaggagattgggacatattaatcctccactacctggggctggaccacattggccacatttcagggcccaacagccccctgattgggcagaagctgagcgagatggacagcgtgctgatgaagatccacacctcactgcagtcgaaggagagagagacgcctttacccaatttgctggttctttgtggtgaccatggcatgtctgaaacaggaagtcacggggcctcctccaccgaggaggtgaatacacctctgattttaatcagttctgcgtttgaaaggaaacccggtgatatccgacatccaaagcacgtccaacagacggatgtggctgcgacactggcgatagcacttggcttaccgattccaaaagacagtgtagggagcctcctattcccagttgtggaaggaagaccaatgagagagcagttgagatttttacatttgaatacagtgcagcttagtaaactgttgcaagagaatgtgccgtcatatgaaaaagatcctgggtttgagcagtttaaaatgtcagaaagattgcatgggaactggatcagactgtacttggaggaaaagcattcagaagtcctattcaacctgggctccaaggttctcaggcagtacctggatgctctgaagacgctgagcttgtccctgagtgcacaagtggcccagttctcaccctgctcctgctcagcgtcccacaggcactgcgcagaaaggctgagctggaagtcccactgtcatctcctgggttttctctgctcttttatttggtgatcctggttctttcggccgttcacgtcattgtgtgcacctcagctgaaagttcgtgctacttctgtggcctctcgtggctggcggcaggtggggtgatggtgctggcctcggcgctgctgtgtgtgattgtgtctgttctgaccaacgtgctcgtgggtggaaacaccccaaggaaggtacgtacggctggttcctg

SEQ ID NO: 107649 - DNA, 1026 bp, Artificial Sequence
  derived and/or modified sequence
atgacaggctcactccccggtttcgtcgatgtaatacgtaatctgaatagtcctgccctgttggaggattccgtgatcagacaggccaaggcagctggaaagagaattgtgttctatggtgacgagacatgggtgaagctcttccctaagcacttcgtggagtacgatggcacgacctccttcttcgtgtctgactatacggaagtggataacaacgtgacccgtcacctggacaaggtccttaaacgaggtgactgggatatattaattctccattatcttggtctggaccacatcggtcacatatctggacctaactcgcctcttatcggccagaaactgtctgagatggacagcgtgctcatgaagatccacacgtctctccagagcaaggagagagagactcccctgccaaatctcctggttctatgcggcgatcacggcatgagcgagacaggcagtcatggcgcttccagcaccgaggaggtgaacacacctcttattctgatatcatccgcgtttgagcggaagccgggagacattaggcatcccaagcatgtccagcagacagatgtggcagcgaccctggcaattgctcttgggcttcccatccccaaggacagcgtgggatcactcttattccccgtggtcgaaggacgacctatgagagagcagcttagattcctccacctgaatacagtgcagcttagcaagctgcttcaggagaatgtaccaagctacgagaaagacccaggcttcgaacagttcaagatgagcgagaggctgcacgggaattggatccgcctctacctggaggaaaaacactccgaggtcctgttcaatctgggatcgaaggtgctgcgccaatacctggacgcattgaagacattgtccttgtcgctgtctgctcaggttgcgcaattctctccctgttcttgctccgcttcccatagacactgtgccgagcgcctgtcctggaaaagtcattgtcacctgttagggtttttatgctcattcatatggtag

SEQ ID NO: 107650 - protein, 299 aa, Artificial Sequence
  derived and/or modified sequence
MPYTTYLVEKGASHSFVAEAKPPTVTMPRIKALMTGSLPGFVDVIRNLNSPALLEDSVIRQAKAAGKRIVFYGDETWVKLFPKHFVEYDGTTSFFVSDYTEVDNNVTRHLDKVLKRGDWDILILHYLGLDHIGHISGPNSPLIGQKLSEMDSVLMKIHTSLQSKERETPLPNLLVLCGDHGMSETGSHGASSTEEVNTPLILISSAFERKPGDIRHPKHVQQTDVAATLAIALGLPIPKDSVGSLLFPVVEGRPMREQLRFLHLNTVQLSKLLQENVPSYEKGSHPAPAQRPTGTAQKG

SEQ ID NO: 107651 - DNA, 900 bp, Artificial Sequence
  derived and/or modified sequence
atgccctacaccacctacctggtggagaagggcgccagccacagcttcgtggccgaggccaagccccccaccgtgaccatgcccagaatcaaggccctgatgaccggcagcctgcccggcttcgtggacgtgatcagaaacctgaacagccccgccctgctggaggacagcgtgatcagacaggccaaggccgccggcaagagaatcgtgttctacggcgacgagacctgggtgaagctgttccccaagcacttcgtggagtacgacggcaccaccagcttcttcgtgagcgactacaccgaggtggacaacaacgtgaccagacacctggacaaggtgctgaagagaggcgactgggacatcctgatcctgcactacctgggcctggaccacatcggccacatcagcggccccaacagccccctgatcggccagaagctgagcgagatggacagcgtgctgatgaagatccacaccagcctgcagagcaaggagagagagacccccctgcccaacctgctggtgctgtgcggcgaccacggcatgagcgagaccggcagccacggcgccagcagcaccgaggaggtgaacacccccctgatcctgatcagcagcgccttcgagagaaagcccggcgacatcagacaccccaagcacgtgcagcagaccgacgtggccgccaccctggccatcgccctgggcctgcccatccccaaggacagcgtgggcagcctgctgttccccgtggtggagggcagacccatgagagagcagctgagattcctgcacctgaacaccgtgcagctgagcaagctgctgcaggagaacgtgcccagctacgagaagggcagccaccccgcccccgcccagagacccaccggcaccgcccagaagggctag

SEQ ID NO: 107652 - DNA, 900 bp, Artificial Sequence
  derived and/or modified sequence
atgccttataccacttacctcgtagagaagggcgcatcacactccttcgttgcggaggcaaagccaccaacggtgactatgccccgcattaaggcccttatgacggggtctcttcctggatttgttgacgtcatccgcaacctcaactcccccgccttgctggaggattctgttatcagacaagccaaagcggcaggtaaaaggattgtattctacggtgacgaaacctgggtgaaactgttccccaaacacttcgtggaatatgatggcaccacctccttctttgtcagcgactatacagaggtagataataacgtgacacggcacctggataaggtactcaaacggggagattgggatatcctgattctacactatctggggctcgaccacataggacatatatctggacccaatagcccactgatcggacagaaactttctgaaatggattctgtgctgatgaagatccatacttcccttcagtccaaagaacgcgaaacccccctgcctaatttgctggtgctgtgcggggatcacggaatgagcgagacaggctcacacggcgccagttcgactgaagaagtaaatactcctctcatcctgatctcttccgccttcgagcgtaagccaggcgatatccgacatcccaaacatgtacagcagactgacgttgcagccacattagcaatcgccctgggtctccctatccctaaggattccgtgggcagcctcttgttcccggtggtagagggtcgacctatgagggaacagcttcggttcctgcacctgaatacggttcagctaagtaagcttttacaagagaatgtgcctagctatgaaaagggtagccaccccgccccagcccaacgcccaaccggcactgcacagaaaggatag

SEQ ID NO: 107653 - DNA, 900 bp, Artificial Sequence
  derived and/or modified sequence
atgccgtacacgacatatcttgtggaaaagggagccagtcactcattcgtagccgaggccaagccacccaccgtgacaatgccccgcatcaaggccctcatgacagggagtcttccgggcttcgtagatgtcataagaaacttaaattcgcctgctctgttggaggatagtgtgatcagacaggccaaagctgccggtaaacggattgtgttttatggcgatgagacctgggttaaattatttcccaaacattttgttgagtatgatgggactacttctttttttgtgagcgactatacggaggtcgataacaatgtgacacggcatttggacaaagtcttgaagcgaggcgattgggacattttgattctgcattacctgggccttgatcacattggccatatttccggtcctaactctcccctgattggtcagaagttgtctgaaatggatagtgtacttatgaaaattcatacctccctgcagtctaaagagcgtgagactcctctgcctaatttgttggtactttgtggggatcacggcatgagtgagacgggatcccacggagcctcctcaacggaagaggtaaatacacccctaatcctgatttctagcgccttcgaaagaaagcctggcgacattaggcacccaaagcacgtccagcagaccgacgtggctgccaccctggccattgctcttggtttgcccatccctaaggacagtgtgggctccttattattcccggtagtggaaggaaggccaatgcgcgaacagctacgctttttgcacttgaacacagtgcagctcagcaaactgctgcaggaaaatgttccctcttatgagaaaggaagccacccggctccagcacagcggcccacagggacggcccagaaggggtag

SEQ ID NO: 107654 - DNA, 900 bp, Artificial Sequence
  derived and/or modified sequence
atgccctacaccacctacctggtggagaagggggccagccacagctttgtggccgaggccaagccacccaccgtgaccatgccccgcatcaaggccctgatgacaggcagcctgcccggctttgtggatgtgatccggaacctgaacagccctgccctgctggaggacagcgtcatccggcaggccaaggctgctgggaagagaattgtgttctatggagatgagacctgggtgaagctgttccccaagcactttgtggagtatgatggcaccaccagcttctttgtgtctgactacacagaggtggacaacaacgtgaccaggcacctggacaaggtgctgaagagaggagactgggacatcctgatcctgcactacctgggcctggaccacatcggccacatcagcggccccaacagccccctgattggccagaagctgtctgagatggacagcgtgctgatgaagatccacaccagcctgcagagcaaggagcgggagacccccctgcccaacctgctggtgctgtgtggggaccacggcatgtctgaaacaggcagccacggggccagcagcacagaggaggtgaacacccccctcatcctgatcagcagcgcctttgagaggaagccaggggacatccgccaccccaagcacgtgcagcagacagatgtggccgccaccctggccatcgccctgggcctgcccatccccaaggacagcgtgggcagcctgctcttccctgtggtggagggccggcccatgagggagcagctgcgcttcctgcacctgaacacagtgcagctgagcaagctgctgcaggagaatgtgcccagctatgagaagggcagccacccagccccagcccagaggcccactggaacagcccagaagggctag

SEQ ID NO: 107655 - DNA, 900 bp, Artificial Sequence
  derived and/or modified sequence
atgccctacaccacctacctggtggagaagggcgccagccacagcttcgtggccgaggccaagccccctaccgtcactatgcctaggattaaggccctgatgactggcagtcttccaggattcgtagatgtgattagaaatttgaattctcccgctctgttggaagactccgttattcgccaagccaaagccgccgggaaaagaatagtgttctatggcgacgagacttgggtgaagctgttccccaaacattttgtcgaatacgacggcactacttccttttttgtgtccgactatacagaggtcgacaataatgtgacccggcatttggacaaagtgctaaaacggggcgactgggacatcctgatcttgcattatctgggcctcgatcacattgggcatatcagtggtcccaacagcccgctaattggacagaaactgagtgagatggactcggtactgatgaaaattcatacttctctgcagagcaaggagagggaaaccccactgcctaacctgctggtgctgtgcggggaccacggcatgtccgaaacaggaagtcatggtgcaagcagtactgaggaagttaacacccccttgattctcataagctccgccttcgaaaggaagcctggcgacattcgacacccaaagcatgtgcagcagactgatgtggcggccactctggccatcgccctaggcctgccgattcctaaagattctgttggctccctactgtttcctgtcgtggaggggcggcctatgagagaacagcttcgcttcctccatctcaacactgtccagctttccaaactgcttcaagagaacgtgccctcttacgagaaaggctctcatcccgccccggcgcaaaggcctaccgggaccgcacaaaagggctag

SEQ ID NO: 107656 - DNA, 900 bp, Artificial Sequence
  derived and/or modified sequence
atgccctacaccacctacctggtggagaagggcgccagccacagcttcgtcgcagaagctaaacccccaacggtcacaatgccccgcataaaggccctcatgacaggctccctgcccggttttgtagacgtcattcgcaatctgaactctccggcccttttggaggactccgtgatccggcaggccaaggctgcagggaagaggatcgtgttttacggggacgagacctgggtgaaattatttccgaaacattttgtggaatatgacggaaccaccagtttttttgtcagtgattacactgaagttgataacaatgtgacccgccacctcgacaaagtgttgaaacggggtgattgggacatacttatcttacattacctcggcctggaccacatcgggcatatctctggacctaactccccgctgatcggtcagaaactgagcgagatggatagcgtcctaatgaagattcacacatccttgcagagcaaagagcgcgagactccacttccaaacctcttggttctctgcggtgatcatgggatgtcggaaactggatcccacggcgcttcttcgaccgaggaagtgaatacccctctgattctgatctcaagtgcatttgagaggaaaccaggggatatccgccacccgaaacatgttcagcagaccgatgttgctgccacgctggccatcgcccttgggctgccaattcctaaggattccgtggggtccctcctatttccagtggtagagggaaggcccatgcgggaacagctcagatttctgcatctcaacacagtgcagctgtccaagctgctccaggaaaatgttccctcctacgaaaagggcagccatccagcacccgcccagcggcctactgggactgctcagaaagggtag

SEQ ID NO: 107657 - DNA, 900 bp, Artificial Sequence
  derived and/or modified sequence
atgccgtacaccacttatttagtggagaaaggagcttctcacagctttgtggcagaggccaagcccccaacagtaaccatgccacgcattaaagccctgatgaccggcagtctgccaggattcgtggacgtgatcagaaacctgaatagccctgctttgctggaggattccgttatccgccaggccaaggccgctggaaaaaggatcgtcttctatggtgacgaaacctgggtcaaactattccccaagcatttcgtggagtacgatgggaccactagcttttttgtttcggattacaccgaagtggataataatgtgactagacacctggataaggtgctcaagcgcggagactgggatatcctgattctacactaccttgggctcgaccatattggacatatatctgggcctaactcacctctgatcgggcagaagctgtctgagatggacagcgtgctgatgaaaatccatacctctcttcagagcaaggagcgtgaaacccctctaccaaatttgctcgtgctgtgtggggaccatggaatgtccgaaaccggctcccatggagcttcatctactgaagaagtgaacacacctttaattttaattagttccgccttcgaaagaaagccgggagacataaggcatcccaagcatgtccagcagacagatgtggccgcaacgcttgccatcgcacttgggctgcccatccctaaggactcagtgggctcattgttgtttcccgtcgtcgaaggccgtcctatgagggagcagcttcgtttcctacatctgaacactgtgcagttgtcaaagctgttgcaggagaatgtcccaagctatgagaaaggcagccacccggctcccgcacagaggcctactggaaccgcccagaaggggtag

SEQ ID NO: 107658 - DNA, 900 bp, Artificial Sequence
  derived and/or modified sequence
atgccttacaccacctatctggttgaaaagggggcatctcactccttcgtagccgaggctaagccgccaactgtaactatgcctcggatcaaagcattaatgaccggttccctgcccggatttgtggatgtaattcgaaaccttaactcacccgctctgctggaggattctgtgattcgacaagccaaagccgctgggaaacgcatcgtcttctacggtgacgaaacgtgggtcaagctttttcccaaacacttcgtcgagtacgacggaaccacaagtttcttcgtgtccgactatacagaggtagacaacaatgtcacacgacaccttgacaaggtcttgaagcggggagactgggacatcctgattctccactacctggggcttgaccatattggacacatctccggacccaactctccactaattggtcagaagctgtccgagatggacagcgtactgatgaagattcatacctcactgcagagcaaagaacgcgaaacaccactgccaaatctgctagtactctgtggcgaccatgggatgagtgagactggctcacacggcgctagttcaacagaagaggtgaacacaccgctgattctcataagcagtgcttttgaaaggaaacccggagacatccgacacccaaaacacgtgcagcaaacggacgtagctgccacactggctatcgcactggggctcccaattcccaaagattcagtgggctccttgctgttccccgtggttgaagggaggcccatgagagaacagttacggttcctgcatcttaacactgtgcagctttctaagcttctgcaagagaatgtccctagctatgagaaaggcagtcatcccgcacccgcacagcgcccaacaggaacggcccagaaaggttag

SEQ ID NO: 107659 - protein, 514 aa, Artificial Sequence
  derived and/or modified sequence
MADSGLDKKSTKCPDCSSASQKDVLCVCSSKTRVPPVLVVEMSQTSSIGSAESLISLERKKEKNINRDITSRKDLPSRTSNVERKASQQQWGRGNFTEGKVPHIRIENGAAIEEIYTFGRILGKGSFGIVIEATDKETETKWAIKKVNKEKAGSSAVKLLEREVNILKSVKHEHIIHLEQVFETPKKMYLVMELCEDGELKEILDRKGHFSENETRWIIQSLASAIAYLHNNDIVHRDLKLENIMVKSSLIDDNNEINLNIKVTDFGLAVKKQSRSEAMLQATCGTPIYMAPEVISAHDYSQQCDIWSIGVVMYMLLRGEPPFLASSEEKLFELIRKGELHFENAVWNSISDCAKSVLKQLMKVDPAHRITAKELLDNQWLTGNKLSSVRPTNVLEMMKEWKNNPESVEENTTEEKNKPSTEEKLKSYQPWGNVPDANYTSDEEEEKQSTAYEKQFPATSKDNFDMCSSSFTSSKLLPAEIKGEMEKTPVTPSQGTATKYPAKSGALSRTKKKL

SEQ ID NO: 107660 - protein, 63 aa, Artificial Sequence
  derived and/or modified sequence
MADSGLDKKSTKCPDCSSASQKDVLCVCSSKTRVPPVLVVEMSQTSSIGSAESLISLERKKEK

SEQ ID NO: 107661 - protein, 171 aa, Artificial Sequence
  derived and/or modified sequence
MADSGLDKKSTKCPDCSSASQKDVLCVCSSKTRVPPVLVVEMSQTSSIGSAESLISLERKKEKNINRDITSRKDLPSRTSNVERKASQQQWGRGNFTEGKVPHIRIENGAAIEEIYTFGRILGKGSFGIVIEATDKETETKWAIKKVNKEKAGSSAVKLLEREVNILKSVK

SEQ ID NO: 107662 - protein, 29 aa, Artificial Sequence
  derived and/or modified sequence
MADSGLDKKSTKCPDCSSASQKDVLCVCS

SEQ ID NO: 107663 - DNA, 1545 bp, Artificial Sequence
  derived and/or modified sequence
atggcagattccggactcgataagaaatccaccaagtgccccgattgctcttcagccagtcagaaagacgtgctttgcgtctgttcctccaaaacgagagtccctccagtgctggtcgttgaaatgagccagacatcctctattggctccgcggagtctttgatttctcttgagcggaagaaggagaagaacatcaatagagatataaccagtagaaaagacctgcccagtcgaacaagcaacgtggaaagaaaggcttcccagcagcagtggggcagagggaatttcacagaaggaaaagtgccccacatcagaatcgagaatggagccgccattgaggagatttacactttcggccggatccttgggaagggctcatttggcatcgtgatagaagccactgataaagagacagaaacgaagtgggccataaagaaagtgaataaagaaaaggccggcagttccgccgtcaaacttttggaaagggaggtcaatatcctcaaatccgtgaagcacgagcacataattcacctagaacaggtgtttgaaacacctaagaagatgtatcttgtcatggaactctgtgaggatggagagctgaaggagatcttggaccgcaaagggcatttctccgagaacgaaactcgatggattatccagagcctcgcttccgccattgcttatcttcataataacgacatagtgcaccgggatctgaaactggagaatatcatggtgaagagctccctgatcgatgacaacaatgaaatcaacctcaatattaaagtcactgacttcgggcttgctgtgaagaagcagtctaggagcgaagctatgctccaggcgacctgcggcactccaatttatatggctccagaagtgatcagcgctcacgactactcgcagcagtgcgatatttggagtatcggcgttgtgatgtatatgctgctgcgaggggaacccccattcctagcctcgtccgaagaaaagttgtttgaacttataaggaagggcgagctgcatttcgaaaacgctgtctggaatagcattagtgattgtgccaagagcgtgttgaaacagctgatgaaggtggacccggcccaccgaataactgcaaaggagttgcttgataaccagtggctcacagggaataagctgtccagtgtgcgcccaaccaacgtgctggagatgatgaaggagtggaagaacaaccccgagtctgtggaagaaaacactacagaggaaaaaaataagccgtccacagaggagaaattgaaatcctatcaaccttgggggaacgtgcccgatgcaaactatacctcggatgaggaggaagaaaagcaatctaccgcatacgagaagcaattccccgccacttccaaagacaactttgacatgtgctcgagcagtttcactagtagtaaacttctgcccgccgagattaaaggagaaatggaaaagaccccagtaactcccagccagggaaccgccacaaaataccctgctaaatccggcgctttgtccagaaccaagaagaagctatag

SEQ ID NO: 107664 - DNA, 1545 bp, Artificial Sequence
  derived and/or modified sequence
atggccgatagcggtctggacaagaaatccactaaatgccccgattgcagttctgcatctcaaaaggacgtcttgtgcgtttgcagctcaaaaacccgggtgccaccggtgctggtggttgagatgagtcagacaagctctattggtagcgctgagtctctcatctctctggagaggaagaaggaaaaaaacattaacagagacatcactagcagaaaagacctgccatctcggacgtctaatgtggaaagaaaagcatcccagcagcagtgggggcggggaaactttactgaaggaaaagtgccgcacatcaggatagagaatggtgcagccattgaggaaatctatacttttggtagaattctcggcaaagggagctttgggatcgtcatcgaggctaccgacaaggaaacagaaacgaaatgggccataaagaaagtgaataaggagaaggctggctctagcgccgttaagttgctcgaacgggaagtgaatatcctgaaaagtgtcaaacacgagcacatcatccacttagaacaggtgtttgagactccaaagaagatgtacctggtaatggagctgtgtgaagacggggaactgaaagaaatattggatcggaaaggccattttagtgagaacgaaacacgctggattatccagtcgctggcctcggcgatagcctaccttcataataacgatatcgtccatcgagacctgaaattagaaaacattatggttaagagttcgttaattgatgacaacaatgagatcaatttaaatattaaggtcactgacttcggcctcgctgtgaagaagcagtctaggtcagaagctatgctccaggctacctgcggcacaccaatctatatggcccccgaggtcatttctgcacacgactacagccagcagtgcgacatttggtctatcggagtggtgatgtacatgctgttaaggggtgagccaccattcctggcatcctctgaggaaaagctattcgagctcatcaggaagggagagctccactttgaaaacgccgtgtggaattccatctctgactgcgccaaatcggtgctcaagcagcttatgaaagttgatcccgcccatcggatcacggccaaagagctgctggacaaccaatggttgactggcaacaaattgtcctcagtgagaccaacgaatgtgctagagatgatgaaggagtggaaaaataatcccgaaagcgttgaggaaaacactacggaggagaaaaataagcctagcaccgaggagaagttgaagtcctatcagccttggggtaacgttcccgatgctaactacacaagcgatgaggaagaggagaagcagtctaccgcctatgagaagcaattcccagctacgtccaaggacaatttcgatatgtgtagttcaagtttcacaagttccaaactgctacctgccgaaattaagggcgagatggagaaaacccccgtcactccatcccaagggactgctaccaaataccccgctaagagtggagccctatccagaacaaagaagaagttgtag

SEQ ID NO: 107665 - DNA, 1545 bp, Artificial Sequence
  derived and/or modified sequence
atggctgattcaggcctcgataagaaatctaccaagtgtcccgattgttcaagtgcctctcagaaagacgtcttgtgcgtgtgcagctcaaagacaagagtcccccctgtactcgttgttgagatgtcacaaaccagctcaattgggtccgctgagtcgttaatcagcctggagcgcaaaaaggagaaaaacattaaccgcgatatcacaagtcgcaaagacctcccatcccggacaagtaacgtggagagaaaagcctcacagcagcaatggggccgtggcaacttcacggagggcaaagttccccacatccgcatagaaaacggggccgccatcgaggaaatctacactttcgggagaatcttgggcaagggttcgtttggcattgttattgaagctacggataaggagaccgagactaagtgggctatcaagaaggttaacaaagaaaaggcggggagttcagccgtcaagcttctggagagggaggttaacatcctaaaaagcgttaagcacgagcatatcattcatctagaacaggtcttcgagactcctaagaagatgtatctcgtgatggagctgtgcgaggacggtgaactcaaggaaatccttgatcgcaaaggccatttttcagagaacgagacgcgttggattatccagtccctggcgtccgctattgcctacttacacaacaatgacattgttcacagggacctgaagctggagaacatcatggttaaatcttcacttatagacgataacaatgagatcaacctcaacatcaaggtcactgatttcggtttggctgtgaagaagcagtccagaagtgaagctatgcttcaggctacttgtggcacaccgatctatatggcaccggaggtcatatcagcacacgactacagccagcagtgtgacatttggtctataggcgttgtgatgtacatgcttctaagaggagaaccgccgtttctcgcaagcagcgaagagaagctcttcgaactgattaggaagggagaattacactttgagaacgcagtgtggaacagcatcagtgactgcgccaagagcgttctaaaacagctgatgaaagtggaccctgctcatagaatcactgccaaagagcttttggacaaccaatggctgaccgggaacaagttgtctagcgtccgccctacaaatgtactggaaatgatgaaggagtggaaaaataaccctgaaagtgtggaagagaataccacggaggagaaaaacaagccttctaccgaagaaaagctcaagagttaccagccatggggtaatgtccccgatgccaactatacatctgatgaagaagaggagaaacaatcgacggcctatgagaagcaatttcccgctacgtctaaagataacttcgacatgtgcagctcaagcttcaccagttcaaagctgctcccggccgaaattaagggggagatggaaaaaacacccgtcaccccaagccagggcactgccacaaaatatccagccaaatcgggtgcactttcgcggacaaagaagaaactgtag

SEQ ID NO: 107666 - DNA, 1545 bp, Artificial Sequence
  derived and/or modified sequence
atggctgacagcggcctggacaagaagagcaccaagtgcccagactgcagcagcgccagccagaaggatgtgctgtgtgtgtgcagcagcaagaccagggtgccccctgtgctggtggtggagatgagccagaccagcagcatcggcagcgctgagagcctcatcagcctggagaggaagaaggagaagaacatcaacagagacatcaccagcaggaaggacctgcccagcaggaccagcaatgtggagaggaaggccagccagcagcagtggggccggggcaacttcacagagggcaaggtgccccacatcagaattgaaaatggagctgccatcgaggagatctacaccttcggccgcatcctgggcaagggcagctttggaattgtgattgaggccacagacaaggagacagagaccaagtgggccatcaagaaggtgaacaaggagaaggccggcagcagcgctgtgaagctgctggagcgggaggtgaacatcctgaagtctgtgaagcatgagcacatcatccacctggagcaggtgtttgagacccccaagaagatgtacctggtgatggagctgtgtgaagatggagagctgaaggagatcctggacaggaagggccacttctctgaaaatgagacccgctggatcatccagagcctggccagcgccatcgcctacctgcacaacaatgacatcgtgcaccgggacctgaagctggagaacatcatggtgaagagcagcctgattgatgacaacaatgagatcaacctgaacatcaaggtgacagactttggcctggccgtgaagaagcagagccgctctgaggccatgctgcaggccacctgtggcacccccatctacatggcccctgaggtgatcagcgcccatgactacagccagcagtgtgacatctggagcattggagtggtgatgtacatgctgctgcggggggagccccccttcctggccagcagcgaggagaagctgtttgagctgatcagaaaaggagagctgcactttgaaaatgctgtgtggaacagcatcagtgactgtgccaagtctgtgctgaagcagctgatgaaggtggaccctgcccaccgcatcacagccaaggagctgctggacaaccagtggctgaccggcaacaagctgagctctgtgcggcccaccaacgtgctggagatgatgaaggagtggaagaacaaccctgagagcgtggaggagaacaccacagaggagaagaacaagcccagcacagaggagaagctgaagagctaccagccctggggcaatgtgcctgatgccaactacaccagtgatgaggaggaggagaagcagagcacagcctatgagaagcagtttcctgccaccagcaaggacaactttgacatgtgcagcagcagcttcaccagcagcaagctgctgcctgctgagatcaagggggagatggagaagacccctgtgacccccagccagggcacagccaccaagtacccagccaagagcggggccctgagcaggaccaagaagaagctgtag

SEQ ID NO: 107667 - DNA, 1545 bp, Artificial Sequence
  derived and/or modified sequence
atggccgacagcggcctggacaagaagagcaccaagtgccccgactgctcgtcagcctcacagaaggacgtgctgtgcgtctgctcatctaaaactcgcgttcctcccgtccttgttgtggagatgtcgcagacgtcatccataggctcagctgaaagtctgatctctttggagagaaaaaaggagaagaacattaatcgggacataacatctcgcaaggacctgcccagcagaacttccaacgtggaacgaaaggcttcacagcaacagtggggtcgagggaatttcacagaaggaaaggtgccgcacatccgcatcgaaaatggcgcagccatcgaagaaatttacacgtttgggaggatccttgggaaaggcagcttcggtatcgttatagaggccacggataaagagaccgaaaccaagtgggctataaagaaagtgaacaaggaaaaagccggcagctccgccgtgaagctgttagagcgagaagtgaatatcctcaaatcggtgaaacatgaacatatcatccatctggaacaggtcttcgagactcctaagaagatgtaccttgtcatggaactgtgcgaggacggtgagctgaaggagattctggacagaaaaggccacttttcagagaacgagacccgctggattatccaatcgctggcctccgccatcgcatatctccacaacaatgatattgtgcaccgcgatctgaagctggaaaatatcatggtcaaatcctccttaattgacgataataatgaaatcaatctaaatataaaagtgacggacttcggactggccgtgaaaaagcaatcccgctcagaggcaatgctccaggctacatgcggaacaccaatttacatggctcccgaggtgattagcgcccacgactactcacaacagtgtgacatctggtcgatcggggtcgtgatgtatatgttgcttcgaggtgaaccgcctttcttagcgtcctccgaagagaaactgttcgaactgatccggaagggagagctccacttcgagaacgcagtgtggaactcaatctcggactgtgcaaagtccgtgctcaaacagctgatgaaagtcgaccccgcgcatcgaattactgcaaaggagctcctcgacaaccagtggctgaccgggaacaagctgtcgagtgtgaggccaacaaacgtgctggaaatgatgaaggaatggaaaaataaccctgaatctgtggaggagaatactacagaggagaaaaataagccatctaccgaagagaagcttaagagttatcagccatggggcaacgtccccgacgcgaattacacctcagacgaggaggaggaaaagcaatccactgcttacgagaagcagttccctgccacatcaaaggacaattttgatatgtgctctagctcatttactagcagcaaattgctccccgctgaaatcaagggtgagatggaaaagactcccgtcacaccttcgcagggcactgccactaaatacccagctaagtctggtgctctctcacgtacgaaaaaaaagctttag

SEQ ID NO: 107668 - DNA, 1545 bp, Artificial Sequence
  derived and/or modified sequence
atggccgacagcggcctggacaagaagagcaccaagtgccccgactgcagttcggcgagccagaaggatgtcttatgcgtctgctcctccaagacccgggtaccaccggtcctcgtggtcgagatgtctcagaccagctctataggaagtgcggaatctctgatcagcctcgaacggaaaaaggagaagaatataaacagagacatcaccagtcgcaaggaccttccaagccggacatccaatgtggagcggaaggcttcccagcaacagtggggaaggggcaactttaccgaagggaaagtgccccatatacgcattgagaacggtgctgctattgaagagatctacaccttcggaaggatcctagggaaaggtagctttgggatcgtgatagaagccaccgacaaggagactgagaccaaatgggccatcaagaaggtgaacaaggaaaaagcgggatcttctgctgttaagcttctggaaagagaagtgaacatactgaagtcggtcaagcacgaacacattattcatttggagcaggtgtttgaaacacccaaaaagatgtacctggttatggaactgtgcgaggatggcgaacttaaagagatccttgatagaaaagggcactttagtgagaacgagacaagatggattattcagagtttagctagcgccattgcctacctgcacaataacgacatcgttcatagagacctcaaactggaaaacataatggtgaaaagtagtctgatcgacgataataatgaaatcaatctgaatatcaaggtcacagattttggactggctgtaaaaaaacagtctcggtctgaagccatgctgcaggctacatgtggaacacctatctatatggcccctgaggtgattagcgcccacgattactcccaacaatgcgatatttggtccataggcgtcgtgatgtatatgctgttgcggggcgaacccccattcctcgcatctagcgaggaaaagctgttcgagctcattcgtaaaggcgagctgcatttcgagaatgccgtgtggaacagcatttccgactgtgcgaaaagtgtgctgaagcagctcatgaaggtggatcctgcccatcgtattacagccaaggagctcctggacaaccagtggcttactgggaacaaactcagttctgttcgccccacaaatgtccttgagatgatgaaggagtggaagaacaaccccgaaagcgttgaagaaaatactaccgaagaaaagaataaaccaagcaccgaggagaagctcaagtcttaccaaccctggggcaatgtgccggatgcgaattacaccagcgacgaagaggaggaaaagcagagtaccgcgtacgaaaagcagttccctgccacctcaaaggacaatttcgatatgtgttcttcatcatttaccagctccaagttacttcccgcagagatcaagggagagatggaaaagactcccgtcaccccctcgcaaggcacagcaactaagtatcccgccaagtcaggggccctttccagaaccaagaagaaactgtag

SEQ ID NO: 107669 - DNA, 1545 bp, Artificial Sequence
  derived and/or modified sequence
atggccgacagcggcctggacaagaagagcaccaagtgccccgactgcagtagtgcatctcagaaggatgtgctgtgtgtctgttcatctaaaactagagtgcccccggtcctggttgttgagatgtcacaaacctcttcaatcggttcggccgagtcactgattagcctggagcggaaaaaagaaaagaatattaaccgggacatcacatctcgtaaagacctgccgtcgcgcactagtaacgttgaacgaaaagcatcccagcagcagtggggtcgcggaaacttcaccgaggggaaggtgcctcatattagaatcgagaacggcgccgcaattgaggagatatacacgtttggaagaatattagggaaaggctccttcggtatcgtcattgaagccactgacaaagagaccgagactaaatgggcgataaaaaaagtgaataaagagaaggcaggttcctcagccgtaaagctgttggagcgggaggtgaatatactgaagagcgtgaagcacgagcatattatccatttggaacaagtctttgaaacccccaaaaagatgtatctggtgatggaactgtgcgaagatggggaactgaaagagatacttgaccgaaaagggcatttcagtgagaatgagacaagatggattattcagagtctggcgtctgccatcgcataccttcacaacaacgacattgtacacagagatttgaagcttgaaaacataatggttaaaagcagtctgattgatgacaacaacgagatcaatttgaacattaaggtgactgactttggattggccgttaagaagcaatcaaggtcagaagcaatgctacaggccacttgtggaactcccatctatatggcacctgaggttatctccgcccacgattacagccagcagtgtgacatctggtcaataggcgttgtgatgtacatgctgctccgcggagagccccctttcctcgcctcatctgaggaaaaactcttcgaactgattcgcaaaggagaactgcacttcgagaatgcagtttggaactccatcagcgactgcgcaaagagcgtgttgaagcaactgatgaaggtcgatcccgcacatcgcattaccgccaaggaactgctggacaaccaatggttgacaggcaataaacttagctccgttcgtcctacaaatgtgctagagatgatgaaggaatggaagaataaccccgagtccgtcgaagagaatacaacagaagaaaagaacaaaccaagcacagaggaaaagctcaaaagctatcagccgtggggaaatgtgccagacgctaactacacctccgatgaggaggaggagaaacagtcaaccgcatacgagaagcagttcccagccacttctaaggacaattttgacatgtgttcctctagtttcacaagcagcaagctcctgccagcggaaattaaaggtgaaatggaaaaaacccccgtcacacctagtcaagggaccgccaccaaatatcctgccaagagcggtgcccttagcagaacaaagaagaaactgtag

SEQ ID NO: 107670 - DNA, 1545 bp, Artificial Sequence
  derived and/or modified sequence
atggccgattcagggctggataagaagtcaacaaagtgccccgattgtagtagtgcgtcccagaaggacgtactgtgtgtgtgtagtagcaagacccgagtgcccccagtcctagtcgtcgaaatgagccaaacaagctctatcgggagcgccgagagcctcatttccctggagcgcaagaaagaaaaaaacataaacagagatatcacttcccgtaaggatttgccctctaggacgagcaacgttgaacgcaaggcttcacagcagcagtggggcagaggcaatttcacagagggaaaggtgccacacatccggatcgagaacggcgctgccattgaggaaatctacacctttggccgaattctggggaaggggagctttggcattgtcatagaggctaccgacaaagaaacggaaactaagtgggcaattaagaaggttaataaggagaaggccggttccagcgccgtgaaacttcttgagcgggaggtgaacattctcaaatctgttaaacatgaacacataattcacttggagcaggtgtttgagacacccaaaaagatgtatttggtcatggagttgtgcgaggacggggagctcaaagaaattctcgaccggaagggccacttcagcgagaatgagacccggtggattatccagagcctggcctccgctattgcctacctccataacaacgatatcgtgcaccgggatcttaagctggagaatattatggtgaaaagctccctcattgatgacaacaacgaaattaacctcaatatcaaggtaaccgatttcgggctcgcagttaagaaacaatctcggagcgaggcaatgctccaagccacatgcggaacgcctatctatatggctcccgaggttatctccgcccatgactactcacaacagtgcgatatatggtctataggcgtagttatgtatatgctcctccgcggagaacccccattcttggcctcgagcgaggagaagctgtttgagcttatacgtaagggcgagcttcatttcgagaacgctgtttggaattcaatctcagattgcgccaaatccgtgctaaaacaattaatgaaggtcgaccctgcccacaggataactgccaaggagcttctggacaaccagtggctgaccggtaataagttatcctccgttagaccgacaaacgtgttggagatgatgaaagagtggaagaacaatccagagtccgtggaagagaatacgacggaggaaaaaaataagccttcaaccgaggaaaagcttaagagctatcagccatgggggaatgtacccgatgccaattacacctcggacgaggaagaagagaagcagagcacagcctatgaaaaacagtttccggcaacttctaaggataactttgatatgtgctcttctagcttcacgtcaagcaagctcctgccagcggagattaagggggaaatggaaaagacccctgtcacaccttctcagggtacggccaccaagtaccccgcaaaatcaggcgctctttcgcgcactaagaagaagctatag

SEQ ID NO: 107671 - DNA, 1545 bp, Artificial Sequence
  derived and/or modified sequence
atggccgacagcggccttgacaaaaagtcgacaaaatgcccagactgcagcagtgcgtcacagaaggacgtgctttgcgtctgcagttccaagacacgtgttccccctgtgctagtcgttgagatgagccagactagctccatcgggtccgcagagagtctcatctctctggagagaaaaaaggaaaaaaatatcaacagggacattacctctcggaaagatcttcccagcaggaccagtaatgtggaaagaaaggcttcacaacaacagtggggtaggggcaatttcacagagggcaaggtgccccatattcggatagaaaatggggctgccattgaagaaatctacacattcggtcgcatactgggaaaaggaagtttcggcatagtaatcgaggcgacagacaaggaaacagaaacgaagtgggccataaagaaagttaataaggagaaggccggatccagtgccgttaaattgctggaaagagaggttaacatcttgaagtccgtcaagcatgagcacattattcatctggaacaagtcttcgagacgccaaaaaaaatgtatttggttatggaattgtgcgaagatggtgaattgaaagagatcctggaccgcaaagggcactttagcgagaatgaaacacgatggataatccagagcctggctagtgccatagcctaccttcataacaacgatattgtgcatcgggacctcaagttagagaatatcatggtgaaaagctccttaatcgacgataacaacgagattaacctgaatatcaaggttaccgattttggcctcgctgttaagaagcaatctaggtctgaagccatgctccaggccacgtgcggaacgcctatttacatggcccctgaggtcattagtgcacacgattattcccagcaatgtgatatttggtccattggagtggtcatgtacatgttactgcgcggtgagcccccatttcttgccagctcggaagagaaactgttcgaactgatccgcaaaggagaacttcacttcgagaatgcagtgtggaatagcatctcagattgcgcaaaatccgtgctgaagcagttgatgaaggtcgatcccgctcatcgaataacggccaaggaactgcttgacaatcaatggttaactggcaacaagctcagttctgtacgaccaaccaatgtgttggagatgatgaaagagtggaaaaacaaccccgaatctgtggaggagaacaccacagaggagaaaaacaagccgtccaccgaagagaaactcaagtcttatcagccttggggaaatgtccctgatgccaattatacatcagatgaggaagaggaaaagcaaagtaccgcgtacgaaaaacagttccccgctacaagtaaagacaacttcgatatgtgcagttcatccttcacctcttctaagctgctgccggcagagatcaaaggcgagatggagaaaactcctgttacaccttctcagggaacagccacgaagtacccagcgaagtccggcgctctgtctcgaacaaagaaaaagttatag

SEQ ID NO: 107672 - DNA, 1545 bp, Artificial Sequence
  derived and/or modified sequence
atggccgactctggtctcgacaagaaaagcactaaatgtcccgactgtagttctgcaagtcagaaagatgtgctctgcgtttgctcgtccaaaactagggtgccaccagtgctagtagtggaaatgagtcagacctctagtattgggagtgcagaatcgctaatcagtcttgaacggaagaaggagaagaacattaatcgtgacataacctcaagaaaagacctgccctcacgaacttccaatgtcgagcggaaggcttcacagcagcaatggggcaggggcaattttacagaggggaaagtgccccacataaggattgagaacggtgctgcgatagaagagatctacacatttggaagaatcttggggaagggaagctttggaatcgtcatcgaggcaaccgataaggagacagagactaaatgggcaatcaagaaggtcaacaaggaaaaggcaggaagcagcgctgtgaagctgctggagcgggaagtgaacatcctgaagtcagtaaagcacgaacatatcatccatctggagcaagtgtttgaaacaccaaagaaaatgtatttagtgatggaactttgtgaggatggggagcttaaggagatactggaccgcaaaggacatttctcagagaacgaaacccgttggatcattcagtccttagcctctgctatcgcatatctccacaataacgatatcgtccatcgagacttaaagttagaaaacatcatggtgaagagttcactgatcgacgacaataacgaaatcaaccttaacatcaaggtcactgatttcggcttagcggtgaaaaagcagtctagaagcgaagcaatgttgcaggccacctgtggaactcctatttacatggcgccagaagttattagcgcccacgattactcacagcagtgcgacatctggagcatcggcgtcgtgatgtatatgctgctgcggggagagccacctttcctggcaagctctgaagagaagctctttgaactgatccgcaaaggcgaactgcactttgaaaatgccgtgtggaactcaattagtgactgcgcaaagtccgtgctgaagcaactcatgaaagtggaccccgcacatcggattacagctaaagagctattagataatcagtggcttactggaaacaagctgtcaagtgttcggccaaccaacgtcttagagatgatgaaggaatggaagaacaaccccgaatccgttgaggagaacaccactgaggagaagaataagccctccactgaggaaaaactcaaaagttatcagccctggggaaacgtgcccgatgcaaattatacatccgatgaagaagaagagaaacagtccaccgcatacgaaaaacaattcccagccacctccaaagataatttcgacatgtgcagttcatcctttacctcgagcaagctgctaccggcagagataaaaggcgagatggaaaaaacccctgtgacccctagtcaagggactgctacaaaatatccagcgaagtctggagccctaagtaggactaagaagaagttgtag

SEQ ID NO: 107673 - DNA, 2707 bp, Artificial Sequence
  derived and/or modified sequence
gccggccggctggtaaccccccagcggagggaccgggccgagcccgcggacccctccgagtgtctcctggggcccagccgttggtaccccatttcccccgggtccggtatttggggtggtctctgtctgccccggttcatctccaccgtctcaccttcaccccatcttgggacgtgaaactttttgaaagtttagaagcgaacttactgtggggaccttcctctggggttagttctctggtgccaccttcagtgatctgtgtggcagctctgctgctcacttctggctttactgggttttggtatttaactgttgcttacgcacactggaaattttcacctgcagtttttcttctgcctaagctctcacgtgtgaatatgtgtctagtgcatccttaacctgaggacttcaccagttcgaaattacagttttcaccatcaactaccttatcctttttggcctggttttcttcctcaaacagtggaaacatttttaaagttgcttttgttgcagagttaaacaaatggctgatagtggcttagataaaaaatccacaaaatgccccgactgttcatctgcttctcagaaagatgtactttgtgtatgttccagcaaaacaagggttcctccagttttggtggtggaaatgtcacagacatcaagcattggtagtgcagaatctttaatttcactggagagaaaaaaagaaaaaaatatcaacagagatataacctccaggaaagatttgccctcaagaacctcaaatgtagagagaaaagcatctcagcaacaatggggtcggggcaactttacagaaggaaaagttcctcacataaggattgagaatggagctgctattgaggaaatctatacctttggaagaatattgggaaaagggagctttggaatagtcattgaagcgacagacaaggaaacagaaacgaagtgggcaattaaaaaagtgaacaaagaaaaggctggaagctctgctgtgaagttacttgaacgagaggtgaacattctgaaaagtgtaaaacatgaacacatcatacatctggaacaagtatttgaaacgccaaagaaaatgtaccttgtgatggagctttgtgaggatggagaactcaaagaaattctggataggaaagggcatttctcagagaatgagacaaggtggatcattcaaagtctcgcatcagctatagcatatcttcacaataatgatattgtacatagagatctgaaactggaaaatataatggttaaaagcagtcttattgatgataacaatgaaataaacttaaacataaaggtgactgattttggcttagcggtgaagaagcaaagtaggagtgaagccatgctgcaggccacatgtgggactcctatctatatggcccctgaagttatcagtgcccacgactatagccagcagtgtgacatttggagcataggcgtcgtaatgtacatgttattacgtggagaaccaccctttttggcaagctcagaagagaagctttttgagttaataagaaaaggagaactacattttgaaaatgcagtctggaattccataagtgactgtgctaaaagtgttttgaaacaacttatgaaagtagatcctgctcacagaatcacagctaaggaactactagataaccagtggttaacaggcaataaactttcttcggtgagaccaaccaatgtattagagatgatgaaggaatggaaaaataacccagaaagtgttgaggaaaacacaacagaagagaagaataagccgtccactgaagaaaagttgaaaagttaccaaccctggggaaatgtccctgatgccaattacacttcagatgaagaggaggaaaaacagtctactgcttatgaaaagcaatttcctgcaaccagtaaggacaactttgatatgtgcagttcaagtttcacatctagcaaactccttccagctgaaatcaagggagaaatggagaaaacccctgtgactccaagccaaggaacagcaaccaagtaccctgctaaatccggcgccctgtccagaaccaaaaagaaactctaaggttccctccagtgttggacagtacaaaaacaaagctgctcttgttagcactttgatgagggggtaggaggggaagaagacagccctatgctgagcttgtagccttttagctccacagagccccgccatgtgtttgcaccagcttaaaattgaagctgcttatctccaaagcagcataagctgcacatggcattaaaggacagccaccagtaggcttggcagtgggctgcagtggaaatcaactcaagatgtacacgaaggttttttaggggggcagataccttcaatttaaggctgtgggcacacttgctcatttttacttcaaattcttatgtttaggcacagctatttataggggaaaacaagaggccaaatatagtaatggaggtgccaaataattatgtgcactttgcactagaagactttgttagaaaattactaataaacttgccatacgtattacagcagaagtgcttcagtcattcacatgtgttcgtgagattttaggttgctatagattgtttaagacagcttattttaaatgtagaaaaataggagattttgtaactgcttgccattaacttgctgctaaattcccaatgtattgattaaatcaataaaaaacagatgttactcagc

SEQ ID NO: 107674 - DNA, 2558 bp, Artificial Sequence
  derived and/or modified sequence
gccggccggctggtaaccccccagcggagggaccgggccgagcccgcggacccctccgagtgtctcctggggcccagccgttggtaccccatttcccccgggtccggtatttggggtggtctctgtctgccccggttcatctccaccgtctcaccttcaccccatcttgggacgtgaaactttttgaaagtttagaagcgaacttactgtgggctctcacgtgtgaatatgtgtctagtgcatccttaacctgaggacttcaccagttcgaaattacagttttcaccatcaactaccttatcctttttggcctggttttcttcctcaaacagtggaaacatttttaaagttgcttttgttgcagagttaaacaaatggctgatagtggcttagataaaaaatccacaaaatgccccgactgttcatctgcttctcagaaagatgtactttgtgtatgttccagcaaaacaagggttcctccagttttggtggtggaaatgtcacagacatcaagcattggtagtgcagaatctttaatttcactggagagaaaaaaagaaaaaaatatcaacagagatataacctccaggaaagatttgccctcaagaacctcaaatgtagagagaaaagcatctcagcaacaatggggtcggggcaactttacagaaggaaaagttcctcacataaggattgagaatggagctgctattgaggaaatctatacctttggaagaatattgggaaaagggagctttggaatagtcattgaagcgacagacaaggaaacagaaacgaagtgggcaattaaaaaagtgaacaaagaaaaggctggaagctctgctgtgaagttacttgaacgagaggtgaacattctgaaaagtgtaaaacatgaacacatcatacatctggaacaagtatttgaaacgccaaagaaaatgtaccttgtgatggagctttgtgaggatggagaactcaaagaaattctggataggaaagggcatttctcagagaatgagacaaggtggatcattcaaagtctcgcatcagctatagcatatcttcacaataatgatattgtacatagagatctgaaactggaaaatataatggttaaaagcagtcttattgatgataacaatgaaataaacttaaacataaaggtgactgattttggcttagcggtgaagaagcaaagtaggagtgaagccatgctgcaggccacatgtgggactcctatctatatggcccctgaagttatcagtgcccacgactatagccagcagtgtgacatttggagcataggcgtcgtaatgtacatgttattacgtggagaaccaccctttttggcaagctcagaagagaagctttttgagttaataagaaaaggagaactacattttgaaaatgcagtctggaattccataagtgactgtgctaaaagtgttttgaaacaacttatgaaagtagatcctgctcacagaatcacagctaaggaactactagataaccagtggttaacaggcaataaactttcttcggtgagaccaaccaatgtattagagatgatgaaggaatggaaaaataacccagaaagtgttgaggaaaacacaacagaagagaagaataagccgtccactgaagaaaagttgaaaagttaccaaccctggggaaatgtccctgatgccaattacacttcagatgaagaggaggaaaaacagtctactgcttatgaaaagcaatttcctgcaaccagtaaggacaactttgatatgtgcagttcaagtttcacatctagcaaactccttccagctgaaatcaagggagaaatggagaaaacccctgtgactccaagccaaggaacagcaaccaagtaccctgctaaatccggcgccctgtccagaaccaaaaagaaactctaaggttccctccagtgttggacagtacaaaaacaaagctgctcttgttagcactttgatgagggggtaggaggggaagaagacagccctatgctgagcttgtagccttttagctccacagagccccgccatgtgtttgcaccagcttaaaattgaagctgcttatctccaaagcagcataagctgcacatggcattaaaggacagccaccagtaggcttggcagtgggctgcagtggaaatcaactcaagatgtacacgaaggttttttaggggggcagataccttcaatttaaggctgtgggcacacttgctcatttttacttcaaattcttatgtttaggcacagctatttataggggaaaacaagaggccaaatatagtaatggaggtgccaaataattatgtgcactttgcactagaagactttgttagaaaattactaataaacttgccatacgtattacagcagaagtgcttcagtcattcacatgtgttcgtgagattttaggttgctatagattgtttaagacagcttattttaaatgtagaaaaataggagattttgtaactgcttgccattaacttgctgctaaattcccaatgtattgattaaatcaataaaaaacagatgttactcagc

SEQ ID NO: 107675 - DNA, 3103 bp, Artificial Sequence
  derived and/or modified sequence
atgtactcccaattacttctggaagtttctcaaagtactcctttatatgtactgcagagtgtatttttcttcctcctcaactgagatctttccaacttgccaccatgcagctgccaatggtcctagttaagtaaaatgctgccatacctattttagactcagggaaaaatagcacccactcatttttatttttgctcaatataaaaatgaggatacttatgaggatacttaaacttttaggattagctagttttctaaaaatcgaattattcactcctttgtaaagtatgtaataggaatttgctctaataatcaatagattaaggtttaaaatttgaaaccatagtaatgtatgtttaacaccaatattttaagcctttttaaaaaccacaacccacattaagaaatacatttcatactgtgatcaagtacacacgcacacacacactctatacatatatgtctgtccaattaaaagtttcacagaaatttccaaggaggtatgctaaatattatctctttgattctactttatttttaaaaagtggtatcaacccacaaaatggatttcataacccactacgcagtttgataagatgctgttttagaccatgcttttcaccagttttgtggtcctattttgtccttttcatgtctatacaggatgcttctagtgctagttgctagcttttctctgatttccaggatggtaataggttaagaatttctctaaatggttatttcttttctttctgcagctctcacgtgtgaatatgtgtctagtgcatccttaacctgaggacttcaccagttcgaaattacagttttcaccatcaactaccttatcctttttggcctggttttcttcctcaaacagtggaaacatttttaaagttgcttttgttgcagagttaaacaaatggctgatagtggcttagataaaaaatccacaaaatgccccgactgttcatctgcttctcagaaagatgtactttgtgtatgttccagcaaaacaagggttcctccagttttggtggtggaaatgtcacagacatcaagcattggtagtgcagaatctttaatttcactggagagaaaaaaagaaaaaaatatcaacagagatataacctccaggaaagatttgccctcaagaacctcaaatgtagagagaaaagcatctcagcaacaatggggtcggggcaactttacagaaggaaaagttcctcacataaggattgagaatggagctgctattgaggaaatctatacctttggaagaatattgggaaaagggagctttggaatagtcattgaagcgacagacaaggaaacagaaacgaagtgggcaattaaaaaagtgaacaaagaaaaggctggaagctctgctgtgaagttacttgaacgagaggtgaacattctgaaaagtgtaaaacatgaacacatcatacatctggaacaagtatttgaaacgccaaagaaaatgtaccttgtgatggagctttgtgaggatggagaactcaaagaaattctggataggaaagggcatttctcagagaatgagacaaggtggatcattcaaagtctcgcatcagctatagcatatcttcacaataatgatattgtacatagagatctgaaactggaaaatataatggttaaaagcagtcttattgatgataacaatgaaataaacttaaacataaaggtgactgattttggcttagcggtgaagaagcaaagtaggagtgaagccatgctgcaggccacatgtgggactcctatctatatggcccctgaagttatcagtgcccacgactatagccagcagtgtgacatttggagcataggcgtcgtaatgtacatgttattacgtggagaaccaccctttttggcaagctcagaagagaagctttttgagttaataagaaaaggagaactacattttgaaaatgcagtctggaattccataagtgactgtgctaaaagtgttttgaaacaacttatgaaagtagatcctgctcacagaatcacagctaaggaactactagataaccagtggttaacaggcaataaactttcttcggtgagaccaaccaatgtattagagatgatgaaggaatggaaaaataacccagaaagtgttgaggaaaacacaacagaagagaagaataagccgtccactgaagaaaagttgaaaagttaccaaccctggggaaatgtccctgatgccaattacacttcagatgaagaggaggaaaaacagtctactgcttatgaaaagcaatttcctgcaaccagtaaggacaactttgatatgtgcagttcaagtttcacatctagcaaactccttccagctgaaatcaagggagaaatggagaaaacccctgtgactccaagccaaggaacagcaaccaagtaccctgctaaatccggcgccctgtccagaaccaaaaagaaactctaaggttccctccagtgttggacagtacaaaaacaaagctgctcttgttagcactttgatgagggggtaggaggggaagaagacagccctatgctgagcttgtagccttttagctccacagagccccgccatgtgtttgcaccagcttaaaattgaagctgcttatctccaaagcagcataagctgcacatggcattaaaggacagccaccagtaggcttggcagtgggctgcagtggaaatcaactcaagatgtacacgaaggttttttaggggggcagataccttcaatttaaggctgtgggcacacttgctcatttttacttcaaattcttatgtttaggcacagctatttataggggaaaacaagaggccaaatatagtaatggaggtgccaaataattatgtgcactttgcactagaagactttgttagaaaattactaataaacttgccatacgtattacagcagaagtgcttcagtcattcacatgtgttcgtgagattttaggttgctatagattgtttaagacagcttattttaaatgtagaaaaataggagattttgtaactgcttgccattaacttgctgctaaattcccaatgtattgattaaatcaataaaaaacagatgttactcagc

SEQ ID NO: 107676 - DNA, 1545 bp, Artificial Sequence
  derived and/or modified sequence
atggccgacagcggcctggacaagaagagcaccaagtgccccgactgcagcagcgccagccagaaggacgtgctgtgcgtgtgcagcagcaagaccagagtgccccccgtgctggtggtggagatgagccagaccagcagcatcggcagcgccgagagcctgatcagcctggagagaaagaaggagaagaacatcaacagagacatcaccagcagaaaggacctgcccagcagaaccagcaacgtggagagaaaggccagccagcagcagtggggcagaggcaacttcaccgagggcaaggtgccccacatcagaatcgagaacggcgccgccatcgaggagatctacaccttcggcagaatcctgggcaagggcagcttcggcatcgtgatcgaggccaccgacaaggagaccgagaccaagtgggccatcaagaaggtgaacaaggagaaggccggcagcagcgccgtgaagctgctggagagagaggtgaacatcctgaagagcgtgaagcacgagcacatcatccacctggagcaggtgttcgagacccccaagaagatgtacctggtgatggagctgtgcgaggacggcgagctgaaggagatcctggacagaaagggccacttcagcgagaacgagaccagatggatcatccagagcctggccagcgccatcgcctacctgcacaacaacgacatcgtgcacagagacctgaagctggagaacatcatggtgaagagcagcctgatcgacgacaacaacgagatcaacctgaacatcaaggtgaccgacttcggcctggccgtgaagaagcagagcagaagcgaggccatgctgcaggccacctgcggcacccccatctacatggcccccgaggtgatcagcgcccacgactacagccagcagtgcgacatctggagcatcggcgtggtgatgtacatgctgctgagaggcgagccccccttcctggccagcagcgaggagaagctgttcgagctgatcagaaagggcgagctgcacttcgagaacgccgtgtggaacagcatcagcgactgcgccaagagcgtgctgaagcagctgatgaaggtggaccccgcccacagaatcaccgccaaggagctgctggacaaccagtggctgaccggcaacaagctgagcagcgtgagacccaccaacgtgctggagatgatgaaggagtggaagaacaaccccgagagcgtggaggagaacaccaccgaggagaagaacaagcccagcaccgaggagaagctgaagagctaccagccctggggcaacgtgcccgacgccaactacaccagcgacgaggaggaggagaagcagagcaccgcctacgagaagcagttccccgccaccagcaaggacaacttcgacatgtgcagcagcagcttcaccagcagcaagctgctgcccgccgagatcaagggcgagatggagaagacccccgtgacccccagccagggcaccgccaccaagtaccccgccaagagcggcgccctgagcagaaccaagaagaagctgtag

SEQ ID NO: 107677 - protein, 888 aa, Artificial Sequence
  derived and/or modified sequence
MQRSIMAALKEWNGVVSESDSPVKRPGRKAARVLGSEGEEEDEALSPAKGQKPALDCSQVSPPRPATSPENNASLSDTSPMDSSPSGIPKRRTARKQLPKRTIQEVLEEQSEDEDREAKRKKEEEEETPKESLTEAEVATEKEGEDGDQPTTPPKPLKTSKAETPTESVSEPEVATKQELQEEEEQTKPPRRAPKTLSSFFTPRKPAVKKEVKEEEPGAPGKEGAAEGPLDPSGYNPAKNNYHPVEDACWKPGQKVPYLAVARTFEKIEEVSARLRMVETLSNLLRSVVALSPPDLLPVLYLSLNHLGPPQQGLELGVGDGVLLKAVAQATGRQLESVRAEAAEKGDVGLVAENSRSTQRLMLPPPPLTASGVFSKFRDIARLTGSASTAKKIDIIKGLFVACRHSEARFIARSLSGRLRLGLAEQSVLAALSQAVSLTPPGQEFPPAMVDAGKGKTAEARKTWLEEQGMILKQTFCEVPDLDRIIPVLLEHGLERLPEHCKLSPGIPLKPMLAHPTRGISEVLKRFEEAAFTCEYKYDGQRAQIHALEGGEVKIFSRNQEDNTGKYPDIISRIPKIKLPSVTSFILDTEAVAWDREKKQIQPFQVLTTRKRKEVDASEIQVQVCLYAFDLIYLNGESLVREPLSRRRQLLRENFVETEGEFVFATSLDTKDIEQIAEFLEQSVKDSCEGLMVKTLDVDATYEIAKRSHNWLKLKKDYLDGVGDTLDLVVIGAYLGRGKRAGRYGGFLLASYDEDSEELQAICKLGTGFSDEELEEHHQSLKALVLPSPRPYVRIDGAVIPDHWLDPSAVWEVKCADLSLSPIYPAARGLVDSDKGISLRFPRFIRVREDKQPEQATTSAQVACLYRKQSQIQNQQGEDSGSDPEDTY

SEQ ID NO: 107678 - DNA, 2667 bp, Artificial Sequence
  derived and/or modified sequence
atgcagagaagcatcatggccgccctgaaggagtggaacggcgtggtgagcgagagcgacagccccgtgaagagacccggcagaaaggccgccagagtgctgggcagcgagggcgaggaggaggacgaggccctgagccccgccaagggccagaagcccgccctggactgcagccaggtgagcccccccagacccgccaccagccccgagaacaacgccagcctgagcgacaccagccccatggacagcagccccagcggcatccccaagagaagaaccgccagaaagcagctgcccaagagaaccatccaggaggtgctggaggagcagagcgaggacgaggacagagaggccaagagaaagaaggaggaggaggaggagacccccaaggagagcctgaccgaggccgaggtggccaccgagaaggagggcgaggacggcgaccagcccaccaccccccccaagcccctgaagaccagcaaggccgagacccccaccgagagcgtgagcgagcccgaggtggccaccaagcaggagctgcaggaggaggaggagcagaccaagccccccagaagagcccccaagaccctgagcagcttcttcacccccagaaagcccgccgtgaagaaggaggtgaaggaggaggagcccggcgcccccggcaaggagggcgccgccgagggccccctggaccccagcggctacaaccccgccaagaacaactaccaccccgtggaggacgcctgctggaagcccggccagaaggtgccctacctggccgtggccagaaccttcgagaagatcgaggaggtgagcgccagactgagaatggtggagaccctgagcaacctgctgagaagcgtggtggccctgagcccccccgacctgctgcccgtgctgtacctgagcctgaaccacctgggccccccccagcagggcctggagctgggcgtgggcgacggcgtgctgctgaaggccgtggcccaggccaccggcagacagctggagagcgtgagagccgaggccgccgagaagggcgacgtgggcctggtggccgagaacagcagaagcacccagagactgatgctgccccccccccccctgaccgccagcggcgtgttcagcaagttcagagacatcgccagactgaccggcagcgccagcaccgccaagaagatcgacatcatcaagggcctgttcgtggcctgcagacacagcgaggccagattcatcgccagaagcctgagcggcagactgagactgggcctggccgagcagagcgtgctggccgccctgagccaggccgtgagcctgaccccccccggccaggagttcccccccgccatggtggacgccggcaagggcaagaccgccgaggccagaaagacctggctggaggagcagggcatgatcctgaagcagaccttctgcgaggtgcccgacctggacagaatcatccccgtgctgctggagcacggcctggagagactgcccgagcactgcaagctgagccccggcatccccctgaagcccatgctggcccaccccaccagaggcatcagcgaggtgctgaagagattcgaggaggccgccttcacctgcgagtacaagtacgacggccagagagcccagatccacgccctggagggcggcgaggtgaagatcttcagcagaaaccaggaggacaacaccggcaagtaccccgacatcatcagcagaatccccaagatcaagctgcccagcgtgaccagcttcatcctggacaccgaggccgtggcctgggacagagagaagaagcagatccagcccttccaggtgctgaccaccagaaagagaaaggaggtggacgccagcgagatccaggtgcaggtgtgcctgtacgccttcgacctgatctacctgaacggcgagagcctggtgagagagcccctgagcagaagaagacagctgctgagagagaacttcgtggagaccgagggcgagttcgtgttcgccaccagcctggacaccaaggacatcgagcagatcgccgagttcctggagcagagcgtgaaggacagctgcgagggcctgatggtgaagaccctggacgtggacgccacctacgagatcgccaagagaagccacaactggctgaagctgaagaaggactacctggacggcgtgggcgacaccctggacctggtggtgatcggcgcctacctgggcagaggcaagagagccggcagatacggcggcttcctgctggccagctacgacgaggacagcgaggagctgcaggccatctgcaagctgggcaccggcttcagcgacgaggagctggaggagcaccaccagagcctgaaggccctggtgctgcccagccccagaccctacgtgagaatcgacggcgccgtgatccccgaccactggctggaccccagcgccgtgtgggaggtgaagtgcgccgacctgagcctgagccccatctaccccgccgccagaggcctggtggacagcgacaagggcatcagcctgagattccccagattcatcagagtgagagaggacaagcagcccgagcaggccaccaccagcgcccaggtggcctgcctgtacagaaagcagagccagatccagaaccagcagggcgaggacagcggcagcgaccccgaggacacctactag

SEQ ID NO: 107679 - DNA, 2667 bp, Artificial Sequence
  derived and/or modified sequence
atgcagcggagcatcatggctgctttaaaagagtggaacggggtggtcagcgaaagcgactcaccggtcaaacgaccgggcagaaaggctgctcgggtcctcgggagtgagggggaagaagaagatgaggctttgagccccgccaaggggcagaagcccgctttagactgtagtcaggtgagccctcccagaccagccaccagtccggaaaacaacgccagcctgtctgacacatcccccatggatagttccccgagcggtattccaaagcgaagaacagccagaaagcaattacccaaacgcacgatccaggaagttctcgaggaacagtccgaagatgaagatcgggaagctaagaggaagaaggaggaggaggaggagactcctaaggaatctctaactgaagcagaggtggctactgaaaaggagggtgaagacggggatcagcccaccactccgccaaagccactgaaaacaagcaaagctgagactcccacagaaagcgtgtccgaacctgaggtagccaccaaacaggagctgcaggaggaggaagaacagactaagccaccaaggagagctccaaaaaccctgtcttcgttcttcactcccaggaagcctgccgtaaagaaggaagtgaaggaagaagaacctggcgcgcctggtaaagagggagctgccgaggggcctctggatccaagtggatacaatccggctaagaacaattatcatcccgtggaagacgcttgttggaagcccgggcagaaggtcccatatctggcagttgcaagaacatttgagaaaatcgaagaggtaagcgcacgcctcaggatggtggagaccctatctaatctgctgagatctgttgtagcgctctcacctcctgacctgctgccagtcttgtacctatccctgaatcatctgggccccccccagcagggactggaacttggagtaggcgatggtgtgctcctcaaagccgtcgctcaagctaccggtcgccagctggaaagtgtgagggcggaggctgctgagaaaggggacgtaggactagtggctgaaaacagtagatctacacagagattgatgttgcctccccctcctcttacggccagcggcgtattcagcaagtttagagacatcgctcgcctgaccggctctgcatccactgctaaaaagatagacattatcaaaggtctctttgtggcttgtcgccactccgaggcccggtttatcgccaggagtctcagcgggcgtctgagactgggcctggcagaacagtctgtattagcggctctgagccaggctgtgtctctcactccccctgggcaggagttccccccagccatggtagatgcaggaaagggtaagacggctgaagctcgaaagacttggctggaggagcaaggaatgattctgaagcagaccttttgcgaagtgcccgacctggatcgcatcataccggtactgctggagcacgggctggagcggttgcccgagcattgcaaactgagtcccggtattcccctcaagccaatgctggctcatccgacacgtggaatctccgaggtgctgaaacgattcgaagaagccgcattcacatgcgaatacaaatacgacggccagagggcccagatacacgccctggaaggcggggaggtgaaaatattttcaaggaatcaggaggacaacaccggcaagtatcccgacattatatctcgcatcccgaagatcaaactgccaagcgtgacaagctttatcctcgatacagaggctgtcgcttgggatagagaaaagaaacagatccaaccctttcaggtactgacaacaaggaaacgaaaggaagtcgatgcctccgagattcaggtgcaggtctgcctctatgcctttgacctgatttacctgaacggtgaatccctggtcagggagccactgtctcgaaggcgccagctgctcagagaaaatttcgtggagaccgaaggtgaatttgtgttcgccactagcctggacactaaggatatcgaacagatcgctgagttcctcgaacaaagcgtgaaggatagctgtgaggggctgatggtaaaaaccctggacgtagatgcgacttacgaaatcgcaaaacgctcacataactggctgaagctaaagaaggattacctggatggagtgggagataccctggacctggtcgtgatcggagcctatcttggaagaggaaaaagagccgggcggtacggtgggtttttgcttgctagctatgatgaggacagcgaggagctccaggctatctgcaaattggggacgggcttctcagatgaagagctggaggagcaccaccaaagccttaaggcactggttttgccatcaccacgcccctatgtccgcattgacggagcggtgatcccagaccactggctggacccttcagccgtctgggaggttaaatgcgccgacctgtccctgagcccaatctacccagcagcccggggtcttgtggacagcgacaaaggcatttcattacggtttccgagatttattcgtgtgcgggaggataagcagcccgagcaggctaccactagtgcccaggtagcgtgtctttaccgaaagcagagtcaaatacagaaccagcagggtgaggattccggctccgatcccgaggatacatactag

SEQ ID NO: 107680 - DNA, 2667 bp, Artificial Sequence
  derived and/or modified sequence
atgcagaggagcatcatggccgccctgaaggagtggaatggagtggtgtctgagagtgacagccctgtgaagaggcctggcaggaaggccgcccgggtgctgggcagcgagggggaggaggaggatgaggccctgagccctgccaagggccagaagccagccctggactgcagccaggtgagcccccccaggcctgccaccagccctgagaacaatgccagcctgagtgacaccagccccatggacagcagccccagcggcatccccaagagaagaacagccaggaagcagctgcccaagaggaccatccaggaggtgctggaggagcagagtgaagatgaggaccgggaggccaagaggaagaaggaggaggaggaggagacccccaaggagagcctgacagaggccgaggtggccacagagaaggagggagaagatggagaccagcccaccaccccacccaagcccctgaagaccagcaaggccgagacccccacagagagcgtgtctgagcctgaggtggccaccaagcaggagctgcaggaggaggaggagcagaccaagcccccaagaagagcccccaagaccctgagcagcttcttcacccccaggaagccagctgtgaagaaggaggtgaaggaggaggagcccggggcccctgggaaggagggcgctgctgagggccccctggaccccagcggctacaacccagccaagaacaactaccaccctgtggaggatgcctgctggaagccaggccagaaggtgccctacctggccgtggcccggacctttgagaagattgaggaggtgtctgcccggctgaggatggtggagaccctgagcaacctgctgcggtctgtggtggccctgagccccccagacctgctgcctgtgctgtacctgagcctgaaccacctgggccccccccagcagggcctggagctgggcgtgggagatggagtgctgctgaaggctgtggcccaggccaccggccggcagctggagagcgtgcgggcagaggccgctgagaagggagatgtgggcctggtggccgagaacagccgcagcacccagaggctgatgctgcccccaccacccctgacagccagcggggtcttcagcaagttccgggacatcgcccggctgaccggcagcgccagcacagccaagaagattgacatcatcaagggcctgtttgtggcctgccgccacagcgaggcccgcttcatcgcccggagcctgagcggccgcctgcggctgggcctggccgagcagagcgtgctggccgccctgagccaggccgtgtccctgaccccacctggccaggagttccccccagccatggtggatgctgggaagggcaagacagctgaggccaggaagacctggctggaggagcagggcatgatcctgaagcagaccttctgtgaggtgcctgacctggaccgcatcatccctgtgctgctggagcacggcctggagcggctgcctgagcactgcaagctgagccctggcatccccctgaagcccatgctggcccaccccacccggggcatcagcgaggtgctgaagagatttgaggaggccgccttcacctgtgagtacaagtatgatggccagagggcccagatccacgccctggagggcggggaggtgaagatcttcagcaggaaccaggaggacaacacaggcaagtacccagacatcatcagccgcatccccaagatcaagctgcccagcgtgaccagcttcatcctggacacagaagctgtggcctgggaccgggagaagaagcagatccagcccttccaggtgctgaccaccaggaagaggaaggaggtggatgccagcgagatccaggtgcaggtgtgcctgtatgcctttgacctgatctacctgaatggagagagcctggtgcgggagcccctgagcagaagacggcagctgctgagagaaaattttgtggagacagaaggagaatttgtgtttgccaccagcctggacaccaaggacatcgagcagattgctgagttcctggagcagagcgtgaaggacagctgtgagggcctgatggtgaagaccctggatgtggatgccacctatgagatcgccaagaggagccacaactggctgaagctgaagaaggactacctggatggagtgggggacaccctggacctggtggtgattggagcctacctgggccggggcaagagagctggccgctatggaggcttcctgctggccagctatgatgaggacagcgaggagctgcaggccatctgcaagctgggcaccggcttcagtgatgaggagctggaggagcaccaccagagcctgaaggccctggtgctgcccagcccccggccctacgtgagaattgatggagctgtgatcccagaccactggctggaccccagcgctgtgtgggaggtgaagtgtgccgacctgagcctgagccccatctacccagctgcccggggcctggtggacagcgacaagggcatcagcctgcgcttcccccgcttcatccgggtgcgggaggacaagcagcctgagcaggccaccaccagcgcccaggtggcctgcctgtacaggaagcagagccagatccagaaccagcagggcgaggacagcggcagtgaccctgaggacacctactag

SEQ ID NO: 107681 - DNA, 3027 bp, Artificial Sequence
  derived and/or modified sequence
agacgtctgcgcgcgaatgccgtggcgcgaacttgggactgcagaggcgcgcctggcggatctgagtgtgttgcccgggcagcggcgcgcgggaccaacgcaaggagcagctgacagacgaagaaaagtgctggacaggaagggagaattctgacgccaacatgcagcgaagtatcatggcggcactgaaggagtggaatggagtggtgtccgagagtgactctccggtgaagaggccagggaggaaggcggcccgggtcctgggcagcgaaggggaagaggaggatgaagcccttagccctgctaaaggccagaagcctgccctggactgctcacaggtctccccgccccgtcctgccacatctcctgagaacaatgcttccctctctgacacctctcccatggacagttccccatcagggattccgaagcgtcgcacagctcggaagcagctcccgaaacggaccattcaggaagtcctggaagagcagagtgaggacgaggacagagaagccaagaggaagaaggaggaggaagaggagaccccgaaagaaagcctcacagaggctgaagtggccacagagaaggaaggagaagacggggaccagcccaccacgcctcccaagcccctaaagacctccaaagcagagaccccgacggaaagcgtttcagagcctgaggtggccacgaagcaggaactgcaggaggaggaagagcagaccaagcctccccgcagagctcccaagacgctcagcagcttcttcaccccccggaagccagcagtcaaaaaagaagtgaaggaagaggagccaggggctccaggaaaggagggagctgctgagggacccctggatccatctggttacaatcctgccaagaacaactatcatcccgtggaagatgcctgctggaaaccgggccagaaggttccttacctggctgtggcccggacgtttgagaagatcgaggaggtgtctgctcggctccggatggtggagacgctgagcaacttgctgcgctccgtggtggccctgtcgcctccagacctcctccctgtcctctacctcagcctcaaccaccttgggccaccccagcagggcctggagcttggcgtgggtgatggtgtccttctcaaggcagtggcccaggccacaggtcggcagctggagtccgtccgggctgaggcagccgagaaaggcgacgtggggctggtggccgagaacagccgcagcacccagaggctcatgctgccaccacctccgctcactgcctccggggtcttcagcaagttccgcgacatcgccaggctcactggcagtgcttccacagccaagaagatagacatcatcaaaggcctctttgtggcctgccgccactcagaagcccggttcatcgctaggtccctgagcggacggctgcgccttgggctggcagagcagtcggtgctggctgccctctcccaggcagtgagcctcacgcccccgggccaagaattcccaccagccatggtggatgctgggaagggcaagacagcagaggccagaaagacgtggctggaggagcaaggcatgatcctgaagcagacgttctgcgaggttcccgacctggaccgaattatccccgtgctgctggagcacggcctggaacgtctcccggagcactgcaagctgagcccagggattcccctgaaaccaatgttggcccatcccacccggggcatcagcgaggtcctgaaacgctttgaggaggcagctttcacctgcgaatacaaatatgacgggcagagggcacagatccacgccctggaaggcggggaggtgaagatcttcagcaggaatcaggaagacaacactgggaagtacccggacatcatcagccgcatccccaagattaaactcccatcggtcacatccttcatcctggacaccgaagccgtggcttgggaccgggaaaagaagcagatccagccattccaagtgctcaccacccgcaaacgcaaggaggtggatgcgtctgagatccaggtgcaggtgtgtttgtacgccttcgacctcatctacctcaatggagagtccctggtacgtgagcccctttcccggcgccggcagctgctccgggagaactttgtggagacagagggcgagtttgtcttcgccacctccctggacaccaaggacatcgagcagatcgccgagttcctggagcagtcagtgaaagactcctgcgaggggctgatggtgaagaccctggatgttgatgccacctacgagatcgccaagagatcgcacaactggctcaagctgaagaaggactaccttgatggcgtgggtgacaccctggacctggtggtgatcggcgcctacctgggccgggggaagcgggccggccggtacgggggcttcctgctggcctcctacgacgaggacagtgaggagctgcaggccatatgcaagcttggaactggcttcagtgatgaggagctggaggagcatcaccagagcctcaaggcgctggtgctgcccagcccacgcccttacgtgcggatagatggcgctgtgattcccgaccactggctggaccccagcgctgtgtgggaggtgaagtgcgctgacctctccctctctcccatctaccctgctgcgcggggcctggtggatagtgacaagggcatctcccttcgcttccctcggtttattcgagtccgtgaagacaagcagccggagcaggccaccaccagtgctcaggtggcctgtttgtaccggaagcaaagtcagattcagaaccaacaaggcgaggactcaggctctgaccctgaagatacctactaagccctcgccctcctagggcctgggtacagggcatgagttggacggaccccagggttattattgcctttgctttttagcaaatctgctgtggcaggctgtggattttgagagtcaggggaggggtgtgtgtgtgagggggtggcttactccggagtctgggattcatcccgtcatttctttcaataaataattattggat

SEQ ID NO: 107682 - DNA, 2667 bp, Artificial Sequence
  derived and/or modified sequence
atgcagcggagcatcatggccgccctgaaggagtggaacggcgtggtcagcgaatcagattcacccgtcaaacgaccaggaaggaaggctgccagggtgctgggaagcgaaggcgaagaagaggatgaggccctgagcccagctaagggacaaaaaccagctctcgattgctcacaggtgagcccgccaagacctgcaacttcccctgaaaacaatgcctccctgtccgatacttcacccatggacagctcaccctcaggcatcccaaaaagacgcactgcccgtaaacagctccccaagaggacgatccaagaagtccttgaggagcagtccgaggacgaagatagggaagcaaaaagaaaaaaagaggaagaggaggagaccccaaaggaaagtttaacagaagccgaagtagctaccgaaaaggagggagaggacggagaccagcctacaaccccaccaaagcccctgaagacctccaaggccgaaacaccaacggaaagtgtgagcgaaccagaagttgcaacaaagcaggaacttcaggaagaggaggagcagacgaagcccccccgccgggcgcccaagaccctatcttccttcttcaccccacggaagccggccgtgaaaaaggaggtaaaggaagaggagccaggcgcacctggtaaagaaggagcggctgaagggcctctggacccttccggatacaaccctgcaaaaaataattatcatcccgtggaagacgcatgttggaagcccggacagaaggtgccctatttggcagtcgcacggacattcgaaaagatcgaagaggtttcggcacgcttacggatggtcgagacactttccaacttgctgagaagcgttgtagctctgtccccaccagatctgctgcccgtcctttatctgtccctgaaccacctgggtccaccacagcagggcttagagctaggggtcggcgacggagtactcctcaaagctgtggcccaagctacaggaaggcaactggaatcagtgagggccgaggctgcagagaagggagatgttggtctggtcgccgaaaactcacgaagtacacagagacttatgcttccccccccccccctgactgcatctggcgtgttctcaaagtttcgcgatatcgcccgactaacaggatctgcatctaccgcaaagaagatcgacatcattaagggattgttcgtagcttgtaggcattccgaggcaagattcatcgctagaagtttatcaggaagactgaggcttggattggctgagcagtctgtcttggcggccctatctcaggcagtatcactgaccccccctggccaggagttcccacctgctatggtcgatgccggtaagggaaaaacagctgaagcgcgcaaaacatggctggaggaacagggcatgattctaaaacagacgttttgcgaggtaccggatctggaccgcattattcccgttctgctcgagcacggcttggagaggctccccgaacactgtaaattatcaccgggaatccctcttaaaccgatgttggcacaccccactagagggatttctgaggtcctaaagagattcgaggaagcagcctttacttgtgaatataaatatgatggacagcgagcacagattcacgcgctggagggcggtgaggtcaaaattttctctcggaatcaggaagataatacaggaaagtatcctgacattatttcgagaatcccaaaaatcaaactgccatctgttactagctttattctcgatacagaggctgtcgcttgggaccgcgagaaaaagcaaatacagccctttcaggtcctaacgacgcgtaagcgaaaggaggtagatgcctcagaaatccaggtccaggtgtgcctgtacgcgtttgacttgatttatctaaatggcgagagtttagtacgcgaacccctgtcccgtcgacgtcagttgctaagggaaaatttcgtcgagacagaaggtgagttcgtcttcgccactagtctggacacaaaagatattgagcaaattgcagagttcttagagcagagcgttaaggattcttgtgagggcctgatggtcaaaacacttgatgtggatgcaacatacgagatcgctaaacggtctcataactggttgaagcttaagaaagattacctagatggggtgggcgataccctggacctggtcgtaatcggggcatacctgggcagaggcaagcgagcgggcaggtacgggggctttctactggctagttacgacgaggattctgaggaactgcaggccatatgcaagctgggcactggctttagcgacgaggaactcgaggaacaccaccagtcgttgaaagcccttgtccttccttccccccgcccgtacgtacggattgacggcgccgtcattcccgatcactggctggacccctccgcagtctgggaagtgaagtgcgcagatctcagcctctcacctatttatccggccgcacgaggactggtggatagcgacaaaggcataagcctgcggtttccgcggttcattagagtgcgggaagacaagcaacccgaacaagccaccacgagcgctcaggtggcttgcttgtatcgaaaacagtcccagatccaaaaccagcagggcgaagatagtggcagcgatcccgaggacacttactag

SEQ ID NO: 107683 - DNA, 2667 bp, Artificial Sequence
  derived and/or modified sequence
atgcagcgatcgataatggccgcattgaaggagtggaatggcgtcgtgtcggaatcagatagtccagtgaagaggcccggtcgcaaggccgctcgggtgcttggcagtgaaggagaggaagaagacgaggctctgtccccagccaagggtcagaagcccgctttagattgtagtcaggtctctcctcccaggccggcaacgtccccagaaaataatgcgtccctttcggatacaagccctatggattcctctccttctggcataccaaaacgaaggaccgctaggaaacagcttcccaagaggacaatccaggaggtgctggaggagcagtctgaagatgaggaccgcgaagcgaaaagaaaaaaagaagaagaagaggagacaccaaaagagtctctgacggaggctgaagtcgctaccgaaaaggaaggagaggatggggaccagcccactacccctcctaagcctttaaaaacatcaaaagcggagacacccacggagtccgtaagtgagcctgaagtcgccacaaagcaggagcttcaggaggaagaagaacagacgaaacctcccaggcgcgctcctaagaccctcagtagcttctttacacccagaaaaccagccgtcaagaaggaggtgaaagaggaagagcctggcgcacctggtaaggaaggagctgccgaaggtccccttgatccaagcggttacaaccccgcaaagaataattaccatcccgtcgaggatgcttgttggaaacctggccagaaagtgccatacttggccgtagcaagaacattcgagaagattgaagaggtgagtgctagactgcgaatggtggagacattgtctaatttactccgaagcgtcgtagctctaagtcctcctgatctgctgcccgtattgtacctctcccttaaccatttaggcccaccccagcagggtctagaactgggagtcggcgacggggtccttcttaaggccgtggcccaggccacgggtcgccagctggaaagcgtccgggcagaagccgcagagaaaggagatgtgggtctggtggcggagaacagcagaagcacccagcgtttgatgctccccccacctcccttgaccgcatccggggtcttcagcaagtttcgcgatattgccaggctgaccgggtccgcgtcgactgcaaaaaaaatcgatattataaaaggtttgttcgtggcttgccgtcactctgaggcaaggtttatcgcacgctccctgagcggccgtctgcggctggggctagccgagcaatccgtgttggcggcactgtcgcaggccgtgtctctcaccccacccggacaggagtttccccctgcaatggtagacgctgggaaggggaaaacggctgaggctaggaaaacctggctggaagagcagggaatgatcctcaagcagacgttttgcgaggttcctgacctggacaggattattccagtactcctggagcatggattggagcgtctgcctgaacactgcaaattatcacctggaatccccttaaaaccgatgctcgcccacccaactaggggaatatctgaagtcctgaaacgttttgaggaagcagcttttacctgtgagtacaagtacgatggacagagggctcagattcacgctttagagggcggagaggttaagatatttagccgtaatcaggaagacaacacaggcaagtacccagatatcatatcgcgaatccctaaaataaagctccccagtgttacatcttttatattggacacagaggccgtggcttgggatagagagaagaagcagattcagccgtttcaggttctaaccaccaggaagagaaaggaggtggacgcctcagaaattcaggtgcaggtatgtctatatgctttcgacttaatttacctcaacggggaatcattggtgcgggaaccgcttagcaggcgacgtcagttgctccgggagaacttcgtcgaaaccgaaggggagttcgtgttcgctacgtctttggataccaaagatatagagcagatagcggagtttctggaacaaagtgtgaaggattcttgcgagggtctgatggttaaaacactagacgttgacgcaacatacgaaatagctaagcgttcacacaactggctcaaattgaagaaagactatctcgacggcgttggggataccctggacctggtcgtgattggagcttatctgggcagggggaagagggcagggagatacggcggtttcttactggccagttacgacgaggattccgaggaactgcaggcaatttgcaagctaggaacaggcttttccgatgaggaattggaagagcaccaccagtctctgaaggctctggtactcccttcccccaggccctatgtacggattgatggagctgtgattccggatcactggctggacccgtctgccgtctgggaagtcaaatgcgccgatctttccctttcaccaatctaccctgcagcccgaggtctcgtggatagcgacaaaggcatttcattacgattcccgcgttttatccgagtgcgagaggataaacagcccgagcaggccacaacctccgcccaggtagcatgcctgtacaggaagcaatcccagattcagaatcagcagggagaggattcaggctctgatccagaggatacctattag

SEQ ID NO: 107684 - protein, 851 aa, Artificial Sequence
  derived and/or modified sequence
MQRSIMSFFHPKKEGKAKKPEKEASNSSRETEPPPKAALKEWNGVVSESDSPVKRPGRKAARVLGSEGEEEDEALSPAKGQKPALDCSQVSPPRPATSPENNASLSDTSPMDSSPSGIPKRRTEAETPTESVSEPEVATKQELQEEEEQTKPPRRAPKTLSSFFTPRKPAVKKEVKEEEPGAPGKEGAAEGPLDPSGYNPAKNNYHPVEDACWKPGQKVPYLAVARTFEKIEEVSARLRMVETLSNLLRSVVALSPPDLLPVLYLSLNHLGPPQQGLELGVGDGVLLKAVAQATGRQLESVRAEAAEKGDVGLVAENSRSTQRLMLPPPPLTASGVFSKFRDIARLTGSASTAKKIDIIKGLFVACRHSEARFIARSLSGRLRLGLAEQSVLAALSQAVSLTPPGQEFPPAMVDAGKGKTAEARKTWLEEQGMILKQTFCEVPDLDRIIPVLLEHGLERLPEHCKLSPGIPLKPMLAHPTRGISEVLKRFEEAAFTCEYKYDGQRAQIHALEGGEVKIFSRNQEDNTGKYPDIISRIPKIKLPSVTSFILDTEAVAWDREKKQIQPFQVLTTRKRKEVDASEIQVQVCLYAFDLIYLNGESLVREPLSRRRQLLRENFVETEGEFVFATSLDTKDIEQIAEFLEQSVKDSCEGLMVKTLDVDATYEIAKRSHNWLKLKKDYLDGVGDTLDLVVIGAYLGRGKRAGRYGGFLLASYDEDSEELQAICKLGTGFSDEELEEHHQSLKALVLPSPRPYVRIDGAVIPDHWLDPSAVWEVKCADLSLSPIYPAARGLVDSDKGISLRFPRFIRVREDKQPEQATTSAQVACLYRKQSQIQNQQGEDSGSDPEDTY

SEQ ID NO: 107685 - DNA, 2556 bp, Artificial Sequence
  derived and/or modified sequence
atgcagagaagcatcatgagcttcttccaccccaagaaggagggcaaggccaagaagcccgagaaggaggccagcaacagcagcagagagaccgagcccccccccaaggccgccctgaaggagtggaacggcgtggtgagcgagagcgacagccccgtgaagagacccggcagaaaggccgccagagtgctgggcagcgagggcgaggaggaggacgaggccctgagccccgccaagggccagaagcccgccctggactgcagccaggtgagcccccccagacccgccaccagccccgagaacaacgccagcctgagcgacaccagccccatggacagcagccccagcggcatccccaagagaagaaccgaggccgagacccccaccgagagcgtgagcgagcccgaggtggccaccaagcaggagctgcaggaggaggaggagcagaccaagccccccagaagagcccccaagaccctgagcagcttcttcacccccagaaagcccgccgtgaagaaggaggtgaaggaggaggagcccggcgcccccggcaaggagggcgccgccgagggccccctggaccccagcggctacaaccccgccaagaacaactaccaccccgtggaggacgcctgctggaagcccggccagaaggtgccctacctggccgtggccagaaccttcgagaagatcgaggaggtgagcgccagactgagaatggtggagaccctgagcaacctgctgagaagcgtggtggccctgagcccccccgacctgctgcccgtgctgtacctgagcctgaaccacctgggccccccccagcagggcctggagctgggcgtgggcgacggcgtgctgctgaaggccgtggcccaggccaccggcagacagctggagagcgtgagagccgaggccgccgagaagggcgacgtgggcctggtggccgagaacagcagaagcacccagagactgatgctgccccccccccccctgaccgccagcggcgtgttcagcaagttcagagacatcgccagactgaccggcagcgccagcaccgccaagaagatcgacatcatcaagggcctgttcgtggcctgcagacacagcgaggccagattcatcgccagaagcctgagcggcagactgagactgggcctggccgagcagagcgtgctggccgccctgagccaggccgtgagcctgaccccccccggccaggagttcccccccgccatggtggacgccggcaagggcaagaccgccgaggccagaaagacctggctggaggagcagggcatgatcctgaagcagaccttctgcgaggtgcccgacctggacagaatcatccccgtgctgctggagcacggcctggagagactgcccgagcactgcaagctgagccccggcatccccctgaagcccatgctggcccaccccaccagaggcatcagcgaggtgctgaagagattcgaggaggccgccttcacctgcgagtacaagtacgacggccagagagcccagatccacgccctggagggcggcgaggtgaagatcttcagcagaaaccaggaggacaacaccggcaagtaccccgacatcatcagcagaatccccaagatcaagctgcccagcgtgaccagcttcatcctggacaccgaggccgtggcctgggacagagagaagaagcagatccagcccttccaggtgctgaccaccagaaagagaaaggaggtggacgccagcgagatccaggtgcaggtgtgcctgtacgccttcgacctgatctacctgaacggcgagagcctggtgagagagcccctgagcagaagaagacagctgctgagagagaacttcgtggagaccgagggcgagttcgtgttcgccaccagcctggacaccaaggacatcgagcagatcgccgagttcctggagcagagcgtgaaggacagctgcgagggcctgatggtgaagaccctggacgtggacgccacctacgagatcgccaagagaagccacaactggctgaagctgaagaaggactacctggacggcgtgggcgacaccctggacctggtggtgatcggcgcctacctgggcagaggcaagagagccggcagatacggcggcttcctgctggccagctacgacgaggacagcgaggagctgcaggccatctgcaagctgggcaccggcttcagcgacgaggagctggaggagcaccaccagagcctgaaggccctggtgctgcccagccccagaccctacgtgagaatcgacggcgccgtgatccccgaccactggctggaccccagcgccgtgtgggaggtgaagtgcgccgacctgagcctgagccccatctaccccgccgccagaggcctggtggacagcgacaagggcatcagcctgagattccccagattcatcagagtgagagaggacaagcagcccgagcaggccaccaccagcgcccaggtggcctgcctgtacagaaagcagagccagatccagaaccagcagggcgaggacagcggcagcgaccccgaggacacctactag

SEQ ID NO: 107686 - DNA, 2556 bp, Artificial Sequence
  derived and/or modified sequence
atgcagaggtcgatcatgagttttttccatccaaagaaagaaggcaaggcaaaaaagcctgaaaaagaagcaagcaacagcagtcgcgagacagaacctccaccaaaagctgctcttaaagagtggaacggcgtggtgagtgaatcagactcacctgtgaaacgccctggtcggaaagcagctcgggtcctcggcagcgaaggggaggaggaggacgaggccctatcacccgccaaaggacaaaagccagcactggactgttctcaagtaagccctcctagaccagccacttccccggagaacaacgcatccttgtccgatacctcaccgatggattccagtccgagcggaatacctaaaagaaggaccgaagcagagacgcctacagaaagtgtaagcgagccagaagtggccaccaaacaggagttgcaagaggaggaagagcagacaaaaccacctaggcgtgcccctaagacgctgtcctccttctttaccccgcgcaagcctgccgtgaagaaagaggttaaagaagaagagcccggagctccagggaaagagggtgccgctgaaggccccttggacccctcaggctacaatcctgcaaagaataactatcatcccgtcgaggatgcttgctggaaacccggccagaaggtgccctatttggcagtggcaagaacttttgaaaagatcgaggaagtgagtgccagactgagaatggttgaaacgctgtccaatctgctccggtccgtggtggccctctccccccctgaccttctccctgtgctatatttgagcttgaaccatttgggcccgccacagcaggggctggaactgggagtgggtgatggggtgttgctgaaggcagtcgcccaggccacaggacgccagttggagagtgtgcgagcagaggcggctgaaaagggtgatgtggggctcgttgccgagaattcccggtccactcagagactgatgctcccccctccacctctcactgcgtccggagtgttttctaaattccgggatattgccagacttaccggatccgcctctaccgccaagaagatcgacattattaagggcctgttcgttgcttgccgccacagtgaggctcgattcatcgcgcgctccctgtccgggcggctgaggttagggctggctgagcagtctgtactcgccgccctgtctcaggccgtctccctgacgcccccggggcaagaattcccaccagccatggtggatgctgggaagggaaagacagccgaggctcgcaaaacctggctggaggagcaaggcatgatcctcaaacaaactttttgcgaagtcccagacttggaccgaattattcccgtgctcctggaacacgggttggaacgtctgcccgagcactgtaaactctcccccggcatccccctcaaacctatgctagcccatcctacaaggggtatatctgaggtcttgaaacgcttcgaggaggctgcttttacatgcgagtacaaatacgacgggcagcgagcccagatacacgctttagaagggggagaggtaaaaatattctccagaaatcaggaagataacaccggcaaataccccgacattattagccggatccctaagatcaaactgccatctgtgacctctttcatcttggataccgaggctgtggcatgggatcgggagaaaaaacagatccagccttttcaggtgctcaccaccaggaaacgaaaggaggtagacgcttccgagattcaggtccaggtgtgcctttacgctttcgacttaatctacctgaacggagagagcttggtgcgcgaacctttatccagaagaagacagcttttgagggagaatttcgtcgaaacggaaggagagttcgtttttgcaacctcgctggatacaaaggatattgaacagatcgcggagttcctggagcagtctgtcaaggattcttgcgaagggctgatggttaaaactctggatgtggatgcgacgtatgagatcgcaaagagatcacacaactggctgaagctgaagaaagactacctggacggggtaggcgacaccctggatttagttgttatcggtgcctatctgggcagggggaagagggccgggaggtatggaggattcttactggcctcttacgacgaagactctgaagaactccaggccatctgcaagctgggaacaggcttctccgatgaggagttagaggaacatcatcagtctctcaaagctctggtgctcccaagcccccgaccctacgtaaggatcgatggggctgtgattccggatcactggctagacccttccgcagtctgggaagtgaagtgtgccgatctgtccctatctcctatttatcccgctgcacgcggcctagtagattccgacaagggcatatccttgaggttccctcgttttattcgcgtgagggaggacaagcagcctgagcaggcaaccacctccgcccaagtggcttgtctctacagaaagcagtctcagatccaaaatcagcagggcgaggatagcgggtccgacccggaggacacatactag

SEQ ID NO: 107687 - DNA, 2556 bp, Artificial Sequence
  derived and/or modified sequence
atgcagaggagcatcatgtccttcttccaccccaagaaggagggcaaggccaagaagccagagaaggaggccagcaacagcagccgggagacagagcccccacccaaggccgccctgaaggagtggaatggagtggtgtctgagagtgacagccctgtgaagaggcctggcaggaaggccgcccgggtgctgggcagcgagggggaggaggaggatgaggccctgagccctgccaagggccagaagccagccctggactgcagccaggtgagcccccccaggcctgccaccagccctgagaacaatgccagcctgagtgacaccagccccatggacagcagccccagcggcatccccaagagaagaacagaagctgagacccccacagaatctgtgtctgagcctgaggtggccaccaagcaggagctgcaggaggaggaggagcagaccaagccaccccggcgggcccccaagaccctgagcagcttcttcacccccaggaagccagctgtgaagaaggaggtgaaggaggaggagcccggggcccctgggaaggagggcgctgctgagggccccctggaccccagcggctacaacccagccaagaacaactaccaccctgtggaggatgcctgctggaagccaggccagaaggtgccctacctggccgtggcccggacctttgagaagattgaggaggtgtctgcccggctgaggatggtggagaccctgagcaacctgctgcggtctgtggtggccctgagccccccagacctgctgcctgtgctgtacctgagcctgaaccacctgggccccccccagcagggcctggagctgggcgtgggagatggagtgctgctgaaggctgtggcccaggccaccggccggcagctggagagcgtgcgggcagaggccgctgagaagggagatgtgggcctggtggccgagaacagccgcagcacccagaggctgatgctgcccccaccacccctgacagccagcggggtcttcagcaagttccgggacatcgcccggctgactggaagtgccagcacagccaagaagattgacatcatcaagggcctgtttgtggcctgccgccacagcgaggcccgcttcatcgcccggagcctgagcggccgcctgcggctgggcctggccgagcagagcgtgctggccgccctgagccaggccgtgtccctgaccccacctggccaggagttccccccagccatggtggatgctgggaagggcaagacagctgaggccaggaagacctggctggaggagcagggcatgatcctgaagcagaccttctgtgaggtgcctgacctggaccgcatcatccctgtgctgctggagcacggcctggagcggctgcctgagcactgcaagctgagccctggcatccccctgaagcccatgctggcccaccccacccggggcatcagcgaggtgctgaagagatttgaggaggccgccttcacctgtgagtacaagtatgatggccagagggcccagatccacgccctggagggcggggaggtgaagatcttcagcaggaaccaggaggacaacacaggcaagtacccagacatcatcagccgcatccccaagatcaagctgcccagcgtgaccagcttcatcctggacacagaggccgtggcctgggaccgggagaagaagcagatccagcccttccaggtgctgaccaccaggaagaggaaggaggtggatgccagcgagatccaggtgcaggtgtgcctgtatgcctttgacctgatctacctgaatggagagagcctggtgcgggagcccctgagcagaagacggcagctgctgcgggagaactttgtggagacagaaggagaatttgtgtttgccaccagcctggacaccaaggacatcgagcagattgctgagttcctggagcagagcgtgaaggacagctgtgagggcctgatggtgaagaccctggatgtggatgccacctatgaaattgccaagaggagccacaactggctgaagctgaagaaggactacctggatggagtgggggacaccctggacctggtggtgattggagcctacctgggccggggcaagagagctggccgctatggaggcttcctgctggccagctatgatgaagattctgaggagctgcaggccatctgcaagctgggcaccggcttcagtgatgaggagctggaggagcaccaccagagcctgaaggccctggtgctgcccagcccccggccctacgtgagaattgatggagctgtgatcccagaccactggctggaccccagcgctgtgtgggaggtgaagtgtgccgacctgagcctgagccccatctacccagctgcccggggcctggtggacagcgacaagggcatcagcctgcgcttcccccgcttcatccgggtgcgggaggacaagcagcctgagcaggccaccaccagcgcccaggtggcctgcctgtacaggaagcagagccagatccagaaccagcagggagaagattctggcagtgaccctgaggacacctactag

SEQ ID NO: 107688 - DNA, 2886 bp, Artificial Sequence
  derived and/or modified sequence
acttgggactgcagaggcgcgcctggcggatctgagtgtgttgcccgggcagcggcgcgcgggaccaacgcaaggagcagctgacagacgaagaaaagtgctggacaggaagggagaattctgacgccaacatgcagcgaagtatcatgtcatttttccaccccaagaaagagggtaaagcaaagaagcctgagaaggaggcatccaatagcagcagagagacggagccccctccaaaggcggcactgaaggagtggaatggagtggtgtccgagagtgactctccggtgaagaggccagggaggaaggcggcccgggtcctgggcagcgaaggggaagaggaggatgaagcccttagccctgctaaaggccagaagcctgccctggactgctcacaggtctccccgccccgtcctgccacatctcctgagaacaatgcttccctctctgacacctctcccatggacagttccccatcagggattccgaagcgtcgcacagaagcagagaccccgacggaaagcgtttcagagcctgaggtggccacgaagcaggaactgcaggaggaggaagagcagaccaagcctccccgcagagctcccaagacgctcagcagcttcttcaccccccggaagccagcagtcaaaaaagaagtgaaggaagaggagccaggggctccaggaaaggagggagctgctgagggacccctggatccatctggttacaatcctgccaagaacaactatcatcccgtggaagatgcctgctggaaaccgggccagaaggttccttacctggctgtggcccggacgtttgagaagatcgaggaggtgtctgctcggctccggatggtggagacgctgagcaacttgctgcgctccgtggtggccctgtcgcctccagacctcctccctgtcctctacctcagcctcaaccaccttgggccaccccagcagggcctggagcttggcgtgggtgatggtgtccttctcaaggcagtggcccaggccacaggtcggcagctggagtccgtccgggctgaggcagccgagaaaggcgacgtggggctggtggccgagaacagccgcagcacccagaggctcatgctgccaccacctccgctcactgcctccggggtcttcagcaagttccgcgacatcgccaggctcactggcagtgcttccacagccaagaagatagacatcatcaaaggcctctttgtggcctgccgccactcagaagcccggttcatcgctaggtccctgagcggacggctgcgccttgggctggcagagcagtcggtgctggctgccctctcccaggcagtgagcctcacgcccccgggccaagaattcccaccagccatggtggatgctgggaagggcaagacagcagaggccagaaagacgtggctggaggagcaaggcatgatcctgaagcagacgttctgcgaggttcccgacctggaccgaattatccccgtgctgctggagcacggcctggaacgtctcccggagcactgcaagctgagcccagggattcccctgaaaccaatgttggcccatcccacccggggcatcagcgaggtcctgaaacgctttgaggaggcagctttcacctgcgaatacaaatatgacgggcagagggcacagatccacgccctggaaggcggggaggtgaagatcttcagcaggaatcaggaagacaacactgggaagtacccggacatcatcagccgcatccccaagattaaactcccatcggtcacatccttcatcctggacaccgaagccgtggcttgggaccgggaaaagaagcagatccagccattccaagtgctcaccacccgcaaacgcaaggaggtggatgcgtctgagatccaggtgcaggtgtgtttgtacgccttcgacctcatctacctcaatggagagtccctggtacgtgagcccctttcccggcgccggcagctgctccgggagaactttgtggagacagagggcgagtttgtcttcgccacctccctggacaccaaggacatcgagcagatcgccgagttcctggagcagtcagtgaaagactcctgcgaggggctgatggtgaagaccctggatgttgatgccacctacgagatcgccaagagatcgcacaactggctcaagctgaagaaggactaccttgatggcgtgggtgacaccctggacctggtggtgatcggcgcctacctgggccgggggaagcgggccggccggtacgggggcttcctgctggcctcctacgacgaggacagtgaggagctgcaggccatatgcaagcttggaactggcttcagtgatgaggagctggaggagcatcaccagagcctcaaggcgctggtgctgcccagcccacgcccttacgtgcggatagatggcgctgtgattcccgaccactggctggaccccagcgctgtgtgggaggtgaagtgcgctgacctctccctctctcccatctaccctgctgcgcggggcctggtggatagtgacaagggcatctcccttcgcttccctcggtttattcgagtccgtgaagacaagcagccggagcaggccaccaccagtgctcaggtggcctgtttgtaccggaagcaaagtcagattcagaaccaacaaggcgaggactcaggctctgaccctgaagatacctactaagccctcgccctcctagggcctgggtacagggcatgagttggacggaccccagggttattattgcctttgctttttagcaaatctgctgtggcaggctgtggattttgagagtcaggggaggggtgtgtgtgtgagggggtggcttactccggagtctgggattcatcccgtcatttctttcaataaataattattggat

SEQ ID NO: 107689 - DNA, 2556 bp, Artificial Sequence
  derived and/or modified sequence
atgcagcggagcatcatgagcttcttccaccccaagaaggagggcaaggctaaaaaaccagagaaagaggcgagcaactcctctagagaaacggagccacctcctaaagccgcccttaaggagtggaacggggtggtgtccgaatcagactcgcctgtgaaacggcctggcagaaaagcagctagggtactcggaagcgagggggaggaagaggacgaagcgttatctccagccaagggacagaagccagccctggattgttcccaagtttccccacccagacctgccacttctcccgagaacaatgcttctctttctgatactagcccaatggattctagccccagcggaatcccaaaacgacgaacggaagccgaaactccaacagagagcgtatccgagccagaggttgctaccaagcaagagctacaagaagaggaggagcagaccaagccacccagaagagcgcccaagactttaagctctttcttcacccccagaaagcccgctgtgaagaaggaagttaaagaggaggaacccggggcccctggcaaggaaggtgccgcagaggggccgttagatcccagcgggtacaaccccgcaaagaacaattaccacccggtcgaggatgcctgctggaagccaggacagaaggtcccctacctggcagtggctcggacattcgaaaaaatcgaagaagtgagtgcaaggttacggatggttgagactttatcgaaccttttaaggtcagtggtggcactgtctccgccagatctgcttcctgtgctgtatctgtctttgaaccatctgggtccacctcagcaggggctcgaactgggcgttggcgatggcgtcttgctcaaagcagtggcccaggctaccgggagacagcttgagagcgtaagagctgaagcagcagagaagggtgatgtgggtctcgttgcggagaactccagatccacccaacggttaatgctcccccctcctcctctcaccgcctctggtgtctttagtaagttcagggacattgccaggctgactggaagcgctagtactgccaagaagatagacattattaaagggctctttgtcgcgtgccgccattccgaggcccggttcattgcgagatcactgagcggccggctgcgccttggtcttgcagagcagagtgtgctggccgccctgagtcaagccgtctctctgacacccccgggtcaggagtttcctcccgccatggtggatgcaggcaaagggaaaaccgccgaagctcgcaagacctggttagaggaacaagggatgatcctgaagcagacattttgtgaggtgccagatctcgatagaattattcctgtgctgctggaacatgggctcgaacgccttccagaacactgcaaattgtcacctggcatacccctgaagcccatgcttgcacaccctacaagaggcatatctgaggtcctgaagagattcgaggaagcggcatttacgtgtgaatacaaatacgacgggcagagagctcagatccacgcgttggaaggcggagaggtaaagatcttcagtaggaatcaagaagataacaccggcaagtatccagacatcatcagcaggatccccaagatcaagctgccctcggtcacaagtttcatactggataccgaggccgtcgcgtgggaccgggagaagaagcagatacaaccttttcaggtgctgacaacaaggaagagaaaagaagtcgacgcctctgagattcaggtgcaagtctgtttgtatgcatttgacctcatttacctcaacggagagtcgttggtacgcgaacccctttcccgaagaaggcaactgctgagagaaaattttgtagaaacagaaggcgagttcgtttttgcaactagtctagatacaaaagatatcgagcagatagccgagtttcttgaacagtcagtgaaagatagctgcgagggattgatggtcaagacactcgacgtggatgccacctacgaaattgccaaacggagtcacaactggcttaaattgaagaaggactatctcgatggagtaggagatactcttgacttggtcgtaattggcgcatacttgggacgtggcaaacgtgctggccgctacggcggattcttgctggcttcttacgatgaggattctgaggaactgcaagccatatgcaagcttggtactggtttttccgacgaggagctggaggagcaccaccagtcccttaaagctctggtgctccctagtcctcgcccatatgttagaattgacggtgccgtgataccggatcactggctggatccctccgccgtgtgggaggtgaagtgtgccgacttatccctgtctccaatctatcccgctgctcgcggattggtcgactcagataaaggaatcagtcttcgtttcccccgcttcatccgtgttagggaagataaacagccagagcaggcgacaacatccgcacaggtagcctgtttgtaccgtaaacagtctcagattcagaatcagcaaggcgaggatagtggcagcgaccccgaggacacttattag

SEQ ID NO: 107690 - DNA, 2556 bp, Artificial Sequence
  derived and/or modified sequence
atgcagaggtctatcatgtccttttttcatcccaaaaaagagggtaaggccaagaagccagaaaaggaagcgtcaaatagttcacgggagaccgagccgccacctaaggcggctttaaaggagtggaacggggtcgttagcgaatcagatagccctgtaaagcggccagggaggaaagcagccagggttttagggtcggagggagaagaggaggatgaggcgctgtcgcctgccaaagggcaaaagcctgcactcgattgttcacaggtcagccctcccagaccggctactagtccagaaaataacgcatcactttctgacacctcgccgatggattctagtccatcaggcatcccaaagaggcgaacagaagccgagactcccacagagtccgtgagtgagccggaggtcgccaccaagcaggaactccaggaagaggaagagcagacaaaaccccctcgcagagcccctaaaactcttagtagctttttcacgccacgaaaaccagccgtaaaaaaagaggtcaaagaggaagagccaggagcccctggaaaagagggcgcagccgaaggaccactcgatcctagcgggtataatcctgccaaaaacaactaccatcccgtagaagatgcgtgttggaagcccggacagaaggtgccttatttggctgtggcaagaacctttgaaaagattgaggaggtgagtgcgcgtttgcgtatggtggagactctgtccaacttgcttagaagcgtggtagctctgagcccccctgacctattgcctgtgctctacctgagtctgaatcatctggggcctccgcagcagggacttgagctgggcgtcggggatggtgtgttacttaaggccgtggcacaagctacaggtaggcagctggagtccgtcagggccgaagctgccgaaaagggcgatgtaggcctggtcgcggagaacagtcgctctacccagagactgatgttacccccaccacctctcaccgcctctggagtcttttcaaagtttcgggacattgcacgccttactggcagcgccagcaccgcgaagaaaattgatattatcaagggactatttgtggcctgcagacattcagaggcaagatttattgcgcgttctctgagcggacgcttgaggctaggtttggcagagcagtcagttcttgccgcattatctcaggctgtaagccttaccccaccaggacaggaatttccgcctgcaatggtggatgctgggaaaggaaagacggccgaggcccgaaagacttggttggaggaacagggtatgatcttgaaacagacattttgcgaagtgcctgatcttgataggataatccccgtcctgctggagcacgggctggagcgcctccccgaacactgtaagttgtccccaggaattcctttgaaacccatgctggcccaccctacacgcggaatctccgaagtgctgaagcgcttcgaggaggctgcttttacgtgtgagtataaatatgatggacagagggctcagattcatgctcttgagggcggagaagtcaaaattttctctcgcaatcaagaagataacacaggtaagtatcccgacatcatttcaagaatacccaagattaaactcccctccgtgacgagctttattcttgacacagaggctgttgcttgggacagagagaaaaaacagatccaacccttccaggtcctgactacaaggaagcggaaagaagtcgacgcctcagaaatccaagtgcaggtctgcctctatgcatttgacctgatttaccttaacggcgagtctttggttagagagcccctctctcggagacggcaactgctcagagaaaacttcgtcgagaccgaaggggaattcgtcttcgcaaccagtttggatactaaggatatcgaacagatagcggagttcctggagcagtctgtgaaggatagttgcgagggtctgatggtgaagaccctggatgtagacgctacctacgaaattgccaagcgatctcacaactggctcaaactcaaaaaggattatttggatggtgtcggtgacaccctggatctggtggtcattggcgcatacctgggcagaggaaaaagagctggccgatacggaggattcttgctggcctcatacgatgaagactccgaagagctccaggccatttgtaaattaggcactggattcagtgatgaggagctggaggagcatcatcagagtctgaaagccctggtgcttccttcaccccgtccgtatgtccggatagatggagccgtaatacccgaccactggctcgaccccagtgcagtgtgggaagttaagtgtgctgatctatctctcagccctatctatcctgctgcacgaggtttagttgactcggataaagggatctccctcaggtttccaagattcatccgagttcgggaagataaacagcccgagcaagccacaacatcagcacaagtcgcttgcttataccgtaagcagtcccagattcaaaaccaacaaggcgaggactctggcagcgaccccgaggacacatattag

SEQ ID NO: 107691 - protein, 884 aa, Artificial Sequence
  derived and/or modified sequence
MPAERPAGSGGSEAPAMVEQLDTAVITPAMLEEEEQLEAAGLERERKMLEKARMSWDRESTEIRYRRLQHLLEKSNIYSKFLLTKMEQQQLEEQKKKEKLERKKESLKVKKGKNSIDASEEKPVMRKKRGREDESYNISEVMSKEEILSVAKKNKKENEDENSSSTNLCVEDLQKNKDSNSIIKDRLSETVRQNTKFFFDPVRKCNGQPVPFQQPKHFTGGVMRWYQVEGMEWLRMLWENGINGILADEMGLGKTVQCIATIALMIQRGVPGPFLVCGPLSTLPNWMAEFKRFTPDIPTMLYHGTQEERQKLVRNIYKRKGTLQIHPVVITSFEIAMRDRNALQHCYWKYLIVDEGHRIKNMKCRLIRELKRFNADNKLLLTGTPLQNNLSELWSLLNFLLPDVFDDLKSFESWFDITSLSETAEDIIAKEREQNVLHMLHQERIPRMYVSEFTDEGFFEGKLPSRKDLYDIRPYENTYLLKLHTNFEILTPFLLRRLKSDVALEVPPKREVVVYAPLSKKQEIFYTAIVNRTIANMFGSSEKETIELSPTGRPKRRTRKSINYSKIDDFPNELEKLISQIQPEVDRERAVVEVNIPVESEVNLKLQNIMMLLRKCCNHPYLIEYPIDPVTQEFKIDEELVTNSGKFLILDRMLPELKKRGHKVLLFSQMTSMLDILMDYCHLRDFNFSRLDGSMSYSEREKNMHSFNTDPEVFIFLVSTRAGGLGINLTAADTVIIYDSDWNPQSDLQAQDRCHRIGQTKPVVVYRLVTANTIDQKIVERAAAKRKLEKLIIHKNHFKGGQSGLNLSKNFLDPKELMELLKSRDYEREIKGSREKVISDKDLELLLDRSDLIDQMNASGPIKEKMGIFKILENSEDSSPECLF

SEQ ID NO: 107692 - protein, 129 aa, Artificial Sequence
  derived and/or modified sequence
MPAERPAGSGGSEAPAMVEQLDTAVITPAMLEEEEQLEAAGLERERKMLEKARMSWDRESTEIRYRRLQHLLEKSNIYSKFLLTKMEQQQLEEQKKKEKLERKKESLKVKKGKNSIDASEEKPGNFVCG

SEQ ID NO: 107693 - DNA, 70 bp, Artificial Sequence
  derived and/or modified sequence
aatggactcgaatagaattgactggaatggaatggactcgaatggaatggaatggaatggaagggactcg

SEQ ID NO: 107694 - DNA, 2655 bp, Artificial Sequence
  derived and/or modified sequence
atgcccgcagagcgcccagctggatcaggagggagcgaagcccctgcaatggtcgaacagttggacacagcagtcatcacgcccgctatgctcgaggaggaggagcagctcgaagctgctggtttagaacgggaacgcaagatgttggagaaagcgcggatgagctgggatagagagtcaacggagatcaggtatcgccggcttcagcatctactggaaaaaagtaatatttactccaagtttcttctgacgaagatggaacagcagcagttggaggagcagaagaaaaaggagaaattggagaggaagaaagaaagcctcaaagtgaagaaagggaaaaattccatagacgcctccgaagagaaaccagtgatgagaaaaaagaggggccgagaggacgaatcttacaatattagcgaagttatgtcaaaagaagaaatcctaagcgtggctaaaaaaaacaagaaggagaacgaagacgaaaacagcagtagtacaaatctgtgtgtggaagacctgcagaagaacaaggattccaactccataataaaagaccggctcagcgagaccgttcgccagaacaccaaattcttctttgatcctgtgcggaagtgtaacgggcagccagtgccttttcagcagccaaagcacttcactggaggagtgatgaggtggtatcaggttgagggtatggagtggctaaggatgctatgggagaacggcatcaatggaatactcgctgacgaaatgggccttgggaaaactgtccagtgtattgccaccattgccctgatgattcaacggggcgtgcctgggccgttcttagtgtgcggccccctgtcaacacttcctaactggatggccgaattcaagcgatttactccggacatcccaaccatgctttatcacggaacgcaggaagaaaggcagaagctagtccgaaatatctacaagcgaaaaggaactctgcagatccacccagtggtgatcacttccttcgagatcgcaatgagagataggaacgccctgcagcattgttattggaagtacctgatcgtcgatgaggggcatcggatcaagaatatgaaatgccgtcttatacgcgaattgaagcgctttaatgccgacaacaaacttctattgactggtacacctctccaaaacaatctctccgaactctggtctctgctgaatttcttgcttccggatgtcttcgatgacctgaagtccttcgaatcctggttcgatataacctctcttagtgagaccgccgaagacataattgccaaggaaagggagcagaatgtgttgcacatgcttcaccaagagcggatccctaggatgtatgtgagtgagtttacagatgagggattcttcgaagggaaacttccgtcacggaaagatctttacgacattagaccatacgaaaacacgtaccttctcaagttgcataccaacttcgaaatccttacacctttcctgttaagaaggctgaagtctgacgtcgcactggaggtcccacccaagcgggaggtagttgtgtatgcccctctgagcaaaaagcaagaaatcttttacaccgctattgtgaacagaaccattgccaacatgtttgggagttccgaaaaagaaacaattgaacttagcccaaccggaagacccaagcggaggactcgaaaatctatcaattactcaaagatagatgacttcccgaacgagctcgagaaacttatcagccaaatccagcctgaggtggaccgggagagagctgtggtcgaggtgaacatcccagtcgaaagcgaggtcaatctcaagctgcagaacatcatgatgctcctaagaaagtgctgcaaccacccttacctcatcgagtaccccatagatcccgttacccaggagtttaaaattgatgaagaacttgttaccaactcggggaaatttttaatactggatcgcatgctgcctgagctgaaaaagcgcgggcataaagtgctccttttctctcaaatgacaagtatgctggacatcttgatggactactgccacttacgggatttcaatttcagcagactcgatggaagtatgagctattcagagcgagagaaaaatatgcacagtttcaatacagatcctgaggtgtttatcttcctggtgtcgacacgggccggcggactaggcatcaacctcactgcagccgacacggtgattatctacgactccgactggaaccctcagagtgacctccaggcccaggaccgctgccacagaatcggacagaccaaacctgtcgtggtgtacagactggttactgctaacaccattgaccagaagatagttgagcgggcagccgccaagcggaaactggagaagcttattattcataagaatcatttcaaaggagggcaatctggtctaaatctctctaaaaacttcctcgaccctaaggagcttatggagttgctgaagtccagagattacgagcgggagatcaaaggctctagggagaaagttatatccgataaggacttggagttactactagacaggtctgatctgatcgatcagatgaacgctagtggaccaatcaaggagaagatggggatttttaagatcctggaaaattcagaagattcctcccccgagtgtctgttttag

SEQ ID NO: 107695 - DNA, 2655 bp, Artificial Sequence
  derived and/or modified sequence
atgccagcggaacggcccgcgggcagcggcggctcggaggctccagcaatggttgaacaactggacactgctgtgattaccccggccatgctagaagaggaagaacagcttgaagctgctggactagagagagagcggaagatgctggaaaaggctcgcatgtcttgggatagagagtcgacagaaattcggtaccgtagacttcaacatttgcttgaaaaaagcaatatatactccaaatttttattgacgaaaatggaacagcaacaattagaggaacagaagaagaaagaaaaattggagagaaaaaaggagtctttaaaagttaaaaagggtaaaaattcaattgatgcaagtgaagagaagccagttatgaggaaaaaaagaggaagagaagatgaatcatacaatatttcagaggtcatgtcaaaagaggaaattttgtctgtggctaaaaaaaataaaaaggagaatgaggatgaaaactcctcctctactaatctctgtgtggaagatcttcagaaaaataaagattcgaatagtataattaaagatagattgtctgaaacggttaggcagaatactaaattcttttttgacccagtccggaagtgtaatggtcagccagtaccttttcaacaaccaaagcacttcactggaggagtgatgcgatggtaccaagtagaaggcatggaatggcttaggatgctttgggaaaatggaattaatggcattttagcagatgaaatgggattgggtaagacagttcagtgcattgctactattgcattgatgattcagagaggagtaccaggaccttttcttgtctgtggccctttgtctacacttcctaactggatggctgaattcaaaagatttacaccagatatccctacaatgttatatcatggaacccaggaggaacgtcaaaaattggtaagaaatatttacaaacggaaagggactttgcagattcatcctgtggtaatcacgtcatttgaaatagccatgagagaccgaaatgcgttacagcattgctattggaaatacttaatagtagatgaaggacacaggattaagaatatgaagtgccgtctaatcagggagttaaaacgattcaatgctgataacaaacttcttttgactggtactcccttgcaaaacaatttatcagaactttggtcattgctaaactttttgttgccagatgtatttgatgacttgaaaagctttgagtcttggtttgacatcactagtctttctgaaactgctgaagatattattgctaaagaaagagaacagaatgtattgcatatgctgcaccaggaaagaattcctagaatgtatgtgtcagagtttacagatgagggcttctttgaaggcaaattgccctccagaaaagatttatatgatatacgtccatatgaaaatacttatttactcaagcttcataccaattttgagattttaacacctttcttattgagaagactgaagtctgatgttgctcttgaagttcctcctaaacgagaagtagtcgtttatgctccactttcaaagaagcaggagatcttttatacagccattgtgaaccgtacaattgcaaacatgtttggatccagtgagaaagaaacaattgagttaagtcctactggtcgaccaaaacgacgaactagaaaatcaataaattacagcaaaatagatgatttccctaatgaattggaaaaactgatcagtcaaatacagccagaggtggaccgagaaagagctgttgtggaagtgaatatccctgtagaatctgaagttaatctgaagctgcagaatataatgatgctacttcgtaaatgttgtaatcatccatatttgattgaatatcctatagaccctgttacacaagaatttaagatcgatgaagaattggtaacaaattctgggaagttcttgattttggatcgaatgctgccagaactaaaaaaaagaggtcacaaggtgctgcttttttcacaaatgacaagcatgttggacattttgatggattactgccatctcagagatttcaacttcagcaggcttgatgggtccatgtcttactcagagagagaaaaaaacatgcacagcttcaacacggatccagaggtgtttatcttcttagtgagtacacgagctggtggcctgggcattaatctgactgcagcagatacagttatcatttatgatagtgattggaacccccagtcggatcttcaggcccaggatagatgtcatagaattggtcagacaaagccagttgttgtttatcgccttgttacagcaaatactatcgatcagaaaattgtggaaagagcagctgctaaaaggaaactggaaaagttgatcatccataaaaatcatttcaaaggtggtcagtctggattaaatctgtctaagaatttcttagatcctaaggaattaatggaattattaaaatctagagattatgaaagggaaataaaaggatcaagagagaaggtcattagtgataaagatctagagttgttgttagatcgaagtgatcttattgatcaaatgaatgcttcaggaccaattaaagagaagatggggatattcaagatattagaaaattctgaagattccagtcctgaatgtttgttttaa

SEQ ID NO: 107696 - DNA, 2655 bp, Artificial Sequence
  derived and/or modified sequence
atgcctgctgagaggcctgctggcagcggcggcagcgaggccccagccatggtggagcagctggacacagctgtgatcaccccagccatgctggaggaggaggagcagctggaggccgccggcctggagcgggagaggaagatgctggagaaggccaggatgtcctgggaccgggagagcacagagatccgctaccgccgcctgcagcacctgctggagaagagcaacatctacagcaagttcctgctgaccaagatggagcagcagcagctggaggagcagaagaagaaggagaagctggagaggaagaaggagagcctgaaggtgaagaagggcaagaacagcattgatgccagcgaggagaagcctgtgatgaggaagaagaggggccgggaggatgagagctacaacatcagcgaggtgatgagcaaggaggagatcctgtctgtggccaagaagaacaagaaggaaaatgaagatgagaacagcagcagcaccaacctgtgtgtggaggacctgcagaagaacaaggacagcaacagcatcatcaaggaccggctgtctgagaccgtgcggcagaacaccaagttcttctttgatcctgtgaggaagtgcaatggccagcctgtgcccttccagcagcccaagcacttcaccggaggagtgatgcgctggtaccaggtggagggcatggagtggctgaggatgctgtgggagaatggcatcaatggcatcctggctgatgagatgggcctgggcaagacagtgcagtgcatcgccaccatcgccctgatgatccagaggggcgtgcccggccccttcctggtgtgtggccccctgagcaccctgcccaactggatggccgagttcaagcgcttcaccccagacatccccaccatgctgtaccacggcacccaggaggagcggcagaagctggtgaggaacatctacaagaggaagggcaccctgcagatccaccctgtggtgatcaccagctttgaaattgccatgagggacagaaatgccctgcagcactgctactggaagtacctgattgtggatgagggccaccgcatcaagaacatgaagtgccgcctcatccgggagctgaagcgcttcaatgctgacaacaagctgctgctgaccggcacccccctgcagaacaacctgtctgagctgtggagcctgctgaacttcctgctgcctgatgtgtttgatgacctgaagagctttgagagctggtttgacatcaccagcctgtctgaaacagctgaggacatcatcgccaaggagcgggagcagaatgtgctgcacatgctgcaccaggagcgcatccccaggatgtatgtgtctgagttcacagatgagggcttctttgagggcaagctgcccagcaggaaggacctgtatgacatccggccctatgagaacacctacctgctgaagctgcacaccaactttgagatcctgacccccttcctgctgcggcggctgaagagtgatgtggccctggaggtgccccccaagcgggaggtggtggtgtatgcccccctgagcaagaagcaggagatcttctacacagccatcgtgaacagaaccatcgccaacatgtttggcagcagcgagaaggagaccatcgagctgagccccaccggccggcccaagaggaggaccaggaagagcatcaactacagcaagattgatgacttccccaatgagctggagaagctgatcagccagatccagcctgaggtggaccgggagagagctgtggtggaggtgaacatccctgtggagagcgaggtgaacctgaagctgcagaacatcatgatgctgctgaggaagtgctgcaaccacccctacctgattgagtaccccattgatcctgtgacccaggagttcaagattgatgaggagctggtgaccaacagcggcaagttcctgatcctggacaggatgctgcctgagctgaagaagaggggccacaaggtgctgctcttcagccagatgacctccatgctggacatcctgatggactactgccacctgcgggacttcaacttcagccggctggatggctccatgagctacagcgagcgggagaagaacatgcacagcttcaacacagatcctgaggtgttcatcttcctggtgtccacccgggccggcggcctgggcatcaacctgacagctgctgacaccgtcatcatctatgacagcgactggaacccccagagcgacctgcaggcccaggaccgctgccacagaattggccagaccaagcctgtggtggtgtaccgcctggtgacagccaacaccatcgaccagaagatcgtggagagagctgctgccaagaggaagctggagaagctgatcatccacaagaaccacttcaagggcggccagagcggcctgaacctgagcaagaacttcctggaccccaaggagctgatggagctgctgaagagccgggactatgaaagagagatcaagggcagccgggagaaggtgatcagtgacaaggacctggagctgctgctggacagaagtgacctgattgaccagatgaatgccagcggccccatcaaggagaagatgggcatcttcaagatcctggagaacagcgaggacagcagcccagaatgtctcttctag

SEQ ID NO: 107697 - DNA, 2655 bp, Artificial Sequence
  derived and/or modified sequence
atgcccgccgagcggcccgccggcagcggcggcagcgaggcccccgccatggtagaacagctcgacaccgccgttattactccggctatgttggaggaggaagagcaactcgaggccgctggtcttgaacgagaacgaaagatgcttgaaaaagcaaggatgtcctgggacagagagtctactgaaatccgctatcggcggctgcaacacctcttggaaaaatcgaatatttattcaaagttcctgctcaccaaaatggagcagcagcaactggaagagcaaaaaaaaaaggagaaactggaacgcaaaaaagaaagtctgaaagtgaagaaagggaagaactcaattgatgccagcgaggagaagcccgttatgcgcaagaaaaggggcagagaggatgaaagttataacatttcggaggtcatgtccaaagaagagatattgtctgtggccaaaaagaacaagaaagaaaacgaagacgagaatagcagttccaccaatctctgcgtcgaagacctccaaaaaaacaaggacagtaactcaatcattaaggataggctgtctgaaactgtgagacaaaacaccaagtttttctttgatcctgtgaggaaatgcaatggccagcccgtgccattccagcaacctaagcactttaccgggggcgtcatgagatggtaccaggtagagggcatggagtggctcaggatgctgtgggagaacggtattaatgggattttagcagatgagatgggattggggaaaacagtgcaatgcatcgctaccattgcactcatgatccagcgcggagtgccgggcccattcctggtgtgtggcccactgtctaccctccctaattggatggccgagttcaagcgattcacgcctgacatccctacaatgctgtaccacggaacacaggaggagcggcaaaaacttgtacgaaatatttataagaggaaaggtaccctgcagattcatccagttgtgatcacctctttcgagattgcaatgagggatagaaatgcattgcagcactgttattggaagtacttaatcgtggacgaaggccaccgcataaaaaacatgaaatgccggcttatccgtgagctcaagcggtttaacgccgacaataaacttctgcttaccgggacccccttgcagaataatttgtcagagctttggtctctgcttaattttctgctgccagatgtatttgatgacctgaagtcttttgaatcttggtttgatatcacctcactgtccgagactgcagaagatattatagccaaggagcgggaacagaacgtgctgcacatgttacatcaggagcgaatccctagaatgtacgtgtcggaatttacagatgaaggtttcttcgagggcaaactgccatccaggaaagacctgtatgacattaggccgtacgagaacacctatctgctgaagcttcacacaaatttcgagatccttacaccctttctgcttcgaaggctgaagagtgacgtggctctcgaggtccccccaaaacgcgaggtggttgtttatgctcccctctcaaaaaagcaggagattttctacacagctattgtaaacaggaccatcgcaaacatgttcggttcaagcgagaaagaaacaatcgagctgtcccccactggcaggccgaaacgacggacccggaagtccatcaactattcaaaaatcgatgacttccctaacgagctggagaagctaatctcacaaatccaacccgaagtagatcgcgagagagctgtcgtcgaggtcaatatacctgtcgagtctgaggttaatcttaaactccagaatattatgatgctgttgaggaaatgttgcaaccatccctacttgatcgaatatcccatcgaccctgtaacacaggaattcaaaattgatgaggagctcgtgacaaattctggtaaatttctgatcttagataggatgctcccagagcttaaaaagaggggtcataaagtacttctgttctctcagatgactagcatgctcgatattttgatggactactgtcacctccgggatttcaatttcagcaggctggatgggtcaatgtcttacagtgagcgcgagaagaatatgcatagtttcaatactgaccccgaggtttttattttccttgtgtcaacacgggccggcggcttgggcattaatctcacagccgctgacacagtgatcatctacgactcagactggaaccctcagtctgacctgcaggcgcaggataggtgtcatcgcattggccagaccaagcctgtggtggtgtacaggctcgtgacggcaaacaccattgaccagaagattgtcgaacgtgccgcagccaagcggaagctggaaaagctgattattcataaaaatcatttcaaaggcggccagtctggacttaatctgtctaagaatttcttagatccaaaagaacttatggagctacttaaaagcagggattacgagcgcgagatcaaaggctctcgcgagaaggttatcagtgacaaggacctggaactgctgttagaccgttccgatctgattgaccagatgaatgcttctggaccaattaaggagaagatgggtatattcaaaattctcgaaaactccgaagacagcagcccggaatgcttattctag

SEQ ID NO: 107698 - DNA, 2655 bp, Artificial Sequence
  derived and/or modified sequence
atgccggctgaaaggccagccggatccggcggtagcgaggctccagccatggtggagcaattagatactgctgttatcacacctgcaatgcttgaagaggaagaacagctcgaggccgctggtttggagcgcgagcggaaaatgttggaaaaggctcggatgagttgggacagggagtctaccgaaatccgatacaggcggctgcagcacctgttggaaaaatcaaatatttacagtaagttcctactgaccaagatggagcagcagcagctggaggaacagaaaaaaaaggagaaacttgagcgcaagaaggaaagcctgaaggtcaagaaagggaagaattccatcgatgcctcggaagagaagcctgtaatgcgcaagaagcggggacgggaggacgagagttacaacatcagtgaagtgatgtctaaggaggagatcctctcagtcgctaagaaaaataaaaaagagaacgaggatgagaactccagctctaccaatctgtgtgtcgaggatctccaaaaaaacaaagatagtaatagcattattaaagaccgcctgtccgaaacggtaaggcagaacactaagtttttcttcgaccctgtgcgaaagtgtaacggtcagcctgtgccgttccagcagccaaaacactttaccggaggggtgatgaggtggtaccaagtcgagggaatggagtggctgagaatgctgtgggagaacgggataaatggaatcctggctgacgagatgggactcggaaagaccgtgcagtgcatcgctacgatcgcacttatgatacaacggggtgtgccagggccttttctcgtttgtggaccactgagcaccttaccaaattggatggccgagtttaagaggttcacacctgacataccgaccatgctgtatcatggcacacaagaggagcgacagaagctcgtcagaaacatttacaagagaaaaggcaccctgcaaatacatcctgtagtcattacgagctttgagatagcaatgagagacaggaacgcattgcagcattgttactggaaataccttattgtggacgaaggacaccgcattaaaaacatgaaatgtaggctcattagggagctgaaacgttttaatgcggataacaagctcctcctgacagggaccccactccagaacaatttgtctgagctgtggagcctgctcaatttcctgctgcctgatgtctttgatgatctgaagtcctttgagtcctggttcgacatcacatctctgagcgaaactgccgaagacattattgccaaggaaagagaacagaatgtgctgcatatgctccatcaggagcgaatccctcggatgtacgtgtccgagttcactgatgaaggattctttgaggggaagttaccatcccggaaagatctgtatgatattcgtccttatgaaaatacatatctcctgaagctccacaccaacttcgagatcctcactccctttctgctgaggcgactgaaaagcgacgtcgctctagaggtcccccctaaacgagaggtcgtcgtttatgccccactctccaagaagcaggagattttttatactgctatcgtgaacagaaccatcgccaatatgttcggaagttcagaaaaggagaccattgagctgtcaccaactggccgacctaagcgtcgcacgagaaagtccattaactacagcaagattgatgattttcccaatgagctggagaagctgatatcgcagatccagcccgaggtggaccgagagagggccgtggtggaagtaaacatacccgtggagtctgaggttaatctgaagctgcagaatattatgatgctcctgagaaagtgctgtaatcacccgtatctaatcgagtatcccatcgaccccgtcacccaggaattcaagatcgatgaggagctcgtgacaaactctggtaagttcctcatcctggatcgaatgctccctgaactgaagaagcggggacacaaggtcttgctcttctcacagatgacatcaatgctggatatactgatggactactgccatctgcgcgattttaacttttcaaggctggacggctcgatgtcctactccgagagagagaagaacatgcacagctttaacacagatcctgaagtgttcatctttctggtgtcgacacgagccggagggctgggcatcaacctcaccgcagccgacacagttattatttacgattctgattggaacccacaaagcgacttacaggctcaagaccgctgtcacagaataggccagacgaagcccgtggttgtttatcgcctcgtgactgcaaatacaatagatcagaaaatagttgagcgcgctgctgctaaaaggaaactcgaaaagctgataattcataaaaatcactttaaaggtgggcagtccggcctcaacctgagcaagaattttctggaccctaaggaacttatggaactgttgaagtctcgagattacgagcgtgagatcaagggctcgcgggaaaaagtcataagtgacaaggatctcgagctgctgctggaccgaagtgacctgattgaccagatgaatgccagcggccctattaaggaaaaaatgggcatttttaaaatcctagagaactcagaggattctagccctgaatgcctcttctag

SEQ ID NO: 107699 - DNA, 2655 bp, Artificial Sequence
  derived and/or modified sequence
atgcccgccgagagacccgccggcagcggcggcagcgaggcccccgccatggtggagcagctggacaccgccgtgatcacccccgccatgctggaggaggaggagcagctggaggccgccggcctggagagagagagaaagatgctggagaaggccagaatgagctgggacagagagagcaccgagatcagatacagaagactgcagcacctgctggagaagagcaacatctacagcaagttcctgctgaccaagatggagcagcagcagctggaggagcagaagaagaaggagaagctggagagaaagaaggagagcctgaaggtgaagaagggcaagaacagcatcgacgccagcgaggagaagcccgtgatgagaaagaagagaggcagagaggacgagagctacaacatcagcgaggtgatgagcaaggaggagatcctgagcgtggccaagaagaacaagaaggagaacgaggacgagaacagcagcagcaccaacctgtgcgtggaggacctgcagaagaacaaggacagcaacagcatcatcaaggacagactgagcgagaccgtgagacagaacaccaagttcttcttcgaccccgtgagaaagtgcaacggccagcccgtgcccttccagcagcccaagcacttcaccggcggcgtgatgagatggtaccaggtggagggcatggagtggctgagaatgctgtgggagaacggcatcaacggcatcctggccgacgagatgggcctgggcaagaccgtgcagtgcatcgccaccatcgccctgatgatccagagaggcgtgcccggccccttcctggtgtgcggccccctgagcaccctgcccaactggatggccgagttcaagagattcacccccgacatccccaccatgctgtaccacggcacccaggaggagagacagaagctggtgagaaacatctacaagagaaagggcaccctgcagatccaccccgtggtgatcaccagcttcgagatcgccatgagagacagaaacgccctgcagcactgctactggaagtacctgatcgtggacgagggccacagaatcaagaacatgaagtgcagactgatcagagagctgaagagattcaacgccgacaacaagctgctgctgaccggcacccccctgcagaacaacctgagcgagctgtggagcctgctgaacttcctgctgcccgacgtgttcgacgacctgaagagcttcgagagctggttcgacatcaccagcctgagcgagaccgccgaggacatcatcgccaaggagagagagcagaacgtgctgcacatgctgcaccaggagagaatccccagaatgtacgtgagcgagttcaccgacgagggcttcttcgagggcaagctgcccagcagaaaggacctgtacgacatcagaccctacgagaacacctacctgctgaagctgcacaccaacttcgagatcctgacccccttcctgctgagaagactgaagagcgacgtggccctggaggtgccccccaagagagaggtggtggtgtacgcccccctgagcaagaagcaggagatcttctacaccgccatcgtgaacagaaccatcgccaacatgttcggcagcagcgagaaggagaccatcgagctgagccccaccggcagacccaagagaagaaccagaaagagcatcaactacagcaagatcgacgacttccccaacgagctggagaagctgatcagccagatccagcccgaggtggacagagagagagccgtggtggaggtgaacatccccgtggagagcgaggtgaacctgaagctgcagaacatcatgatgctgctgagaaagtgctgcaaccacccctacctgatcgagtaccccatcgaccccgtgacccaggagttcaagatcgacgaggagctggtgaccaacagcggcaagttcctgatcctggacagaatgctgcccgagctgaagaagagaggccacaaggtgctgctgttcagccagatgaccagcatgctggacatcctgatggactactgccacctgagagacttcaacttcagcagactggacggcagcatgagctacagcgagagagagaagaacatgcacagcttcaacaccgaccccgaggtgttcatcttcctggtgagcaccagagccggcggcctgggcatcaacctgaccgccgccgacaccgtgatcatctacgacagcgactggaacccccagagcgacctgcaggcccaggacagatgccacagaatcggccagaccaagcccgtggtggtgtacagactggtgaccgccaacaccatcgaccagaagatcgtggagagagccgccgccaagagaaagctggagaagctgatcatccacaagaaccacttcaagggcggccagagcggcctgaacctgagcaagaacttcctggaccccaaggagctgatggagctgctgaagagcagagactacgagagagagatcaagggcagcagagagaaggtgatcagcgacaaggacctggagctgctgctggacagaagcgacctgatcgaccagatgaacgccagcggccccatcaaggagaagatgggcatcttcaagatcctggagaacagcgaggacagcagccccgagtgcctgttctag

SEQ ID NO: 107700 - DNA, 2561 bp, Artificial Sequence
  derived and/or modified sequence
atgccagcggaacggcccgcgggcagcggcggctcggaggctccagcaatggttgaacaactggacactgctgtgattaccccggccatgctagaagaggaagaacagcttgaagctgctggactagagagagagcggaagatgctggaaaaggctcgcatgtcttgggatagagagtcgacagaaattcggtaccgtagacttcaacatttgcttgaaaaaagcaatatatactccaaatttttattgacgaaaatggaacagcaacaattagagactgttatgaagatttaaaaacttgtgcaaattgagagaatacagaacagaagaagaaagaaaaattggagagaaaaaaggagtctttaaaagttaaaaagggtaaaaattcaattgatgcaagtgaagagaagccagttatgaggaaaaaaagaggaagagaagatgaatcatacaatatttcagaggtcatgtcaaaagaggaaattttgtctgtggctaaaaaaaataaaaaggagaatgaggatgaaaactcctcctctactaatctctgtgtggaagatcttcagaaaaataaagattcgaatagtataattaaagatagattgtctgaaacggttaggcagaatactaaattcttttttgacccagtccggaagtgtaatggtcagccagtaccttttcaacaaccaaagcacttcactggaggagtgatgcgatggtaccaagtagaaggcatggaatggcttaggatgctttgggaaaatggaattaatggcattttagcagatgaaatgggattgggtaagacagttcagtgcattgctactattgcattgatgattcagagaggagtaccaggaccttttcttgtctgtggccctttgtctacacttcctaactggatggctgaattcaaaagatttacaccagatatccctacaatgttatatcatggaacccaggaggaacgtcaaaaattggtaagaaatatttacaaacggaaagggactttgcagattcatcctgtggtaatcacgtcatttgaaatagccatgagagaccgaaatgcgttacagcattgctattggaaatacttaatagtagatgaaggacacaggattaagaatatgaagtgccgtctaatcagggagttaaaacgattcaatgctgataacaaacttcttttgactggtactcccttgcaaaacaatttatcagaactttggtcattgctaaactttttgttgccagatgtatttgatgacttgaaaagctttgagtcttggtttgacatcactagtctttctgaaactgctgaagatattattgctaaagaaagagaacagaatgtattgcatatgctgcaccagattttaacacctttcttattgagaagactgaagtctgatgttgctcttgaagttcctcctaaacgagaagtagtcgtttatgctccactttcaaagaagcaggagatcttttatacagccattgtgaaccgtacaattgcaaacatgtttggatccagtgagaaagaaacaattgagttaagtcctactggtcgaccaaaacgacgaactagaaaatcaataaattacagcaaaatagatgatttccctaatgaattggaaaaactgatcagtcaaatacagccagaggtggaccgagaaagagctgttgtggaagtgaatatccctgtagaatctgaagttaatctgaagctgcagaatataatgatgctacttcgtaaatgttgtaatcatccatatttgattgaatatcctatagaccctgttacacaagaatttaagatcgatgaagaattggtaacaaattctgggaagttcttgattttggatcgaatgctgccagaactaaaaaaaagaggtcacaaggtgctgcttttttcacaaatgacaagcatgttggacattttgatggattactgccatctcagagatttcaacttcagcaggcttgatgggtccatgtcttactcagagagagaaaaaaacatgcacagcttcaacacggatccagaggtgtttatcttcttagtgagtacacgagctggtggcctgggcattaatctgactgcagcagatacagttatcatttatgatagtgattggaacccccagtcggatcttcaggcccaggatagatgtcatagaattggtcagacaaagccagttgttgtttatcgccttgttacagcaaatactatcgatcagaaaattgtggaaagagcagctgctaaaaggaaactggaaaagttgatcatccataaaaatcatttcaaaggtggtcagtctggattaaatctgtctaagaatttcttagatcctaaggaattaatggaattattaaaatctagagattatgaaagggaaataaaaggatcaagagagaaggtcattagtgataaagatctagagttgttgttagatcgaagtgatcttattgatcaaatgaatgcttcaggaccaattaaagagaagatggggatattcaagatattagaaaattctgaagattccagtcctgaatgtttgttttaa

SEQ ID NO: 107701 - protein, 97 aa, Artificial Sequence
  derived and/or modified sequence
MPAERPAGSGGSEAPAMVEQLDTAVITPAMLEEEEQLEAAGLERERKMLEKARMSWDRESTEIRYRRLQHLLEKSNIYSKFLLTKMEQQQLETVMKI

SEQ ID NO: 107702 - protein, 315 aa, Artificial Sequence
  derived and/or modified sequence
MPAERPAGSGGSEAPAMVEQLDTAVITPAMLEEEEQLEAAGLERERKMLEKARMSWDRESTEIRYRRLQHLLEKSNIYSKFLLTKMEQQQLEEQKKKEKLERKKESLKVKKGKNSIDASEEKPVMRKKRGREDESYNISEVMSKEEILSVAKKNKKENEDENSSSTNLCVEDLQKNKDSNSIIKDRLSETVRQNTKFFFDPVRKCNGQPVPFQQPKHFTGGVMRWYQVEGMEWLRMLWENGINGILADEMGLGKTVQCIATIALMIQRGVPGPFLVCGPLSTLPNWMAEFKRFTPDIPTMLYHGTQEERQKLIYL

SEQ ID NO: 107703 - protein, 740 aa, Artificial Sequence
  derived and/or modified sequence
MPAERPAGSGGSEAPAMVEQLDTAVITPAMLEEEEQLEAAGLERERKMLEKARMSWDRESTEIRYRRLQHLLEKSNIYSKFLLTKMEQQQLEEQKKKEKLERKKESLKVKKGKNSIDASEEKPVMRKKRGREDESYNISEVMSKEEILSVAKKNKKENEDENSSSTNLCVEDLQKNKDSNSIIKDRLSETVRQNTKFFFDPVRKCNGQPVPFQQPKHFTGGVMRWYQVEGMEWLRMLWENGINGILADEMGLGKTVQCIATIALMIQRGVPGPFLVCGPLSTLPNWMAEFKRFTPDIPTMLYHGTQEERQKLVRNIYKRKGTLQIHPVVITSFEIAMRDRNALQILTPFLLRRLKSDVALEVPPKREVVVYAPLSKKQEIFYTAIVNRTIANMFGSSEKETIELSPTGRPKRRTRKSINYSKIDDFPNELEKLISQIQPEVDRERAVVEVNIPVESEVNLKLQNIMMLLRKCCNHPYLIEYPIDPVTQEFKIDEELVTNSGKFLILDRMLPELKKRGHKVLLFSQMTSMLDILMDYCHLRDFNFSRLDGSMSYSEREKNMHSFNTDPEVFIFLVSTRAGGLGINLTAADTVIIYDSDWNPQSDLQAQDRCHRIGQTKPVVVYRLVTANTIDQKIVERAAAKRKLEKLIIHKNHFKGGQSGLNLSKNFLDPKELMELLKSRDYEREIKGSREKVISDKDLELLLDRSDLIDQMNASGPIKEKMGIFKILENSEDSSPECLF

SEQ ID NO: 107704 - protein, 192 aa, Artificial Sequence
  derived and/or modified sequence
MVEQLDTAVITPAMLEEEEQLEAAGLERERKMLEKARMSWDRESTEIRYRRLQHLLEKSNIYSKFLLTKMEQQQLEEQKKKEKLERKKESLKVKKGKNSIDASEEKPVMRKKRGREDESYNISEVMSKEEILSVAKKNKKENEDENSSSTNLCVEDLQKNKDSNSIIKDRLSETVRQNTKFFFDPVRKCNGQ

SEQ ID NO: 107705 - DNA, 2223 bp, Artificial Sequence
  derived and/or modified sequence
atgcccgccgagcgtccagctgggtccggcggttcagaagctcccgcgatggtggaacagttggataccgccgtgatcactccggccatgctagaagaggaggaacaacttgaggctgctggcctggagcgcgagagaaagatgttggagaaagcgagaatgtcatgggaccgggagtctacggagatccgctacaggcggttgcagcatctgctggagaagtccaacatttacagcaagttcctcctaacgaagatggaacaacagcagctagaggagcagaaaaagaaggagaaactagagcggaagaaggaatccctaaaggtgaaaaaaggcaaaaactcgatcgacgcatctgaggagaaacctgtgatgcgcaaaaagagaggcagagaagacgaaagctacaacatcagcgaggtgatgagcaaggaggaaattctctccgtggccaaaaaaaataagaaagagaacgaggacgaaaatagctcttctacgaacctgtgtgtggaggatctgcagaaaaacaaggactctaattcaattatcaaggacaggttgagcgagaccgtacggcagaatacgaagtttttttttgatcctgttcgcaagtgcaacggccagcccgtgccttttcagcagcctaagcatttcactggtggcgtgatgaggtggtatcaagtggaaggtatggaatggctcaggatgctctgggagaacgggatcaatggcatcctggccgacgaaatgggtctcgggaagacggtgcagtgtatcgccaccattgctctgatgattcaacgtggggtgccgggcccttttctggtttgtggcccactgagcaccctccccaactggatggccgagttcaagcggttcacaccagatattcccacaatgctgtaccacggcacccaggaggaacggcagaaattagtaaggaatatctacaaaaggaagggcaccctacagatccatccagtagtgatcacttcgtttgagatagctatgcgagacaggaatgctctccagattttgacgccttttctcctgaggagactgaagtccgacgtggccttggaagttccacccaaaagggaagttgtggtgtacgcccccttgtcaaaaaagcaagagattttttacacagcaatcgtgaatcgaaccatcgctaacatgtttgggagcagtgagaaggagactatagagctctcccctacaggtaggcccaagcgcagaacccggaagagcattaattactcaaaaatcgacgactttcctaacgagctcgagaagctgattagccagattcagccggaagtcgatagagagcgagctgtcgtggaggtcaacatccccgttgagtcagaggtcaacttaaagctccagaatataatgatgttgctgcgtaagtgttgcaatcatccctacctgatcgagtacccgatcgaccctgtaacacaagagtttaaaatcgacgaagaactggtgaccaactctggcaagtttctgattctggatcgaatgctcccggaattgaaaaagcgaggccacaaagtgttgctgttcagccaaatgactagcatgttggacatattaatggattactgccatctgcgcgattttaatttcagtcgcctagacgggagcatgtcttattcagaaagggagaaaaacatgcattctttcaataccgatcccgaagttttcatctttctggtgagtaccagagctggggggctggggatcaatcttactgcagccgacacggtcatcatatacgattcagactggaatcctcagtcggacctgcaagcccaggacagatgccacaggatcggtcagaccaaaccggtggtcgtgtaccgtctcgtcacagctaacacaatagatcagaaaatagtagagagagctgccgccaagaggaaactggagaagttgatcatacataagaaccatttcaagggaggccagtccggtctgaacctgtccaagaactttctggacccgaaggaacttatggaattactcaagtctcgcgattatgagagggaaataaagggcagtcgggaaaaggtgatcagtgacaaagatttggagctcctgctggatagatctgacctcattgatcagatgaacgcctccggcccaattaaggagaagatggggatattcaagattctggaaaacagtgaagactcttcaccagagtgcctcttctag

SEQ ID NO: 107706 - DNA, 2804 bp, Artificial Sequence
  derived and/or modified sequence
ggggatttggctagaaggctgggccggcagcggttgtgaggagttagctcgcggcattgcaggctctgagaggaggggacccggttcccgggtgagtgtccaggcatgccagcggaacggcccgcgggcagcggcggctcggaggctccagcaatggttgaacaactggacactgctgtgattaccccggccatgctagaagaggaagaacagcttgaagctgctggactagagagagagcggaagatgctggaaaaggctcgcatgtcttgggatagagagtcgacagaaattcggtaccgtagacttcaacatttgcttgaaaaaagcaatatatactccaaatttttattgacgaaaatggaacagcaacaattagaggaacagaagaagaaagaaaaattggagagaaaaaaggagtctttaaaagttaaaaagggtaaaaattcaattgatgcaagtgaagagaagccagttatgaggaaaaaaagaggaagagaagatgaatcatacaatatttcagaggtcatgtcaaaagaggaaattttgtctgtggctaaaaaaaataaaaaggagaatgaggatgaaaactcctcctctactaatctctgtgtggaagatcttcagaaaaataaagattcgaatagtataattaaagatagattgtctgaaacggttaggcagaatactaaattcttttttgacccagtccggaagtgtaatggtcagccagtaccttttcaacaaccaaagcacttcactggaggagtgatgcgatggtaccaagtagaaggcatggaatggcttaggatgctttgggaaaatggaattaatggcattttagcagatgaaatgggattgggtaagacagttcagtgcattgctactattgcattgatgattcagagaggagtaccaggaccttttcttgtctgtggccctttgtctacacttcctaactggatggctgaattcaaaagatttacaccagatatccctacaatgttatatcatggaacccaggaggaacgtcaaaaattggtaagaaatatttacaaacggaaagggactttgcagattcatcctgtggtaatcacgtcatttgaaatagccatgagagaccgaaatgcgttacagattttaacacctttcttattgagaagactgaagtctgatgttgctcttgaagttcctcctaaacgagaagtagtcgtttatgctccactttcaaagaagcaggagatcttttatacagccattgtgaaccgtacaattgcaaacatgtttggatccagtgagaaagaaacaattgagttaagtcctactggtcgaccaaaacgacgaactagaaaatcaataaattacagcaaaatagatgatttccctaatgaattggaaaaactgatcagtcaaatacagccagaggtggaccgagaaagagctgttgtggaagtgaatatccctgtagaatctgaagttaatctgaagctgcagaatataatgatgctacttcgtaaatgttgtaatcatccatatttgattgaatatcctatagaccctgttacacaagaatttaagatcgatgaagaattggtaacaaattctgggaagttcttgattttggatcgaatgctgccagaactaaaaaaaagaggtcacaaggtgctgcttttttcacaaatgacaagcatgttggacattttgatggattactgccatctcagagatttcaacttcagcaggcttgatgggtccatgtcttactcagagagagaaaaaaacatgcacagcttcaacacggatccagaggtgtttatcttcttagtgagtacacgagctggtggcctgggcattaatctgactgcagcagatacagttatcatttatgatagtgattggaacccccagtcggatcttcaggcccaggatagatgtcatagaattggtcagacaaagccagttgttgtttatcgccttgttacagcaaatactatcgatcagaaaattgtggaaagagcagctgctaaaaggaaactggaaaagttgatcatccataaaaatcatttcaaaggtggtcagtctggattaaatctgtctaagaatttcttagatcctaaggaattaatggaattattaaaatctagagattatgaaagggaaataaaaggatcaagagagaaggtcattagtgataaagatctagagttgttgttagatcgaagtgatcttattgatcaaatgaatgcttcaggaccaattaaagagaagatggggatattcaagatattagaaaattctgaagattccagtcctgaatgtttgttttaaagtggagctcaagaatagcttttaaaagttcttatttacatctagtgatttccctgtattgggtttgaaatactgattgtccacttcaccttttttattatatcagttgacatgtaactagtaccatgcgtacttaaatagatggtaattttctgagccttaccaagaacaaagaagtatccatattaagtttagattttcagttaatttttgagactgagtagtattcttggatacaggctgatgtgtacttaaccacttccagatttatacagtcttcctgtggaagtttagtaaatgtctttttccctcctttcttctagtaatgcagttcatgggctttaggtacttcagttatgaagtaggcttttcatggggagagattgggattatgctctctgttgtttaagaaactgtttgattttagagtctatttctatgagatagtttaccaaataaatgttccttataagatg

SEQ ID NO: 107707 - DNA, 2223 bp, Artificial Sequence
  derived and/or modified sequence
atgcctgctgagaggcctgctggcagcggcggcagcgaggccccagccatggtggagcagctggacacagctgtgatcaccccagccatgctggaggaggaggagcagctggaggccgccggcctggagcgggagaggaagatgctggagaaggccaggatgtcctgggaccgggagagcacagagatccgctaccgccgcctgcagcacctgctggagaagagcaacatctacagcaagttcctgctgaccaagatggagcagcagcagctggaggagcagaagaagaaggagaagctggagaggaagaaggagagcctgaaggtgaagaagggcaagaacagcattgatgccagcgaggagaagcctgtgatgaggaagaagaggggccgggaggatgagagctacaacatcagcgaggtgatgagcaaggaggagatcctgtctgtggccaagaagaacaagaaggaaaatgaagatgagaacagcagcagcaccaacctgtgtgtggaggacctgcagaagaacaaggacagcaacagcatcatcaaggaccggctgtctgagaccgtgcggcagaacaccaagttcttctttgatcctgtgaggaagtgcaatggccagcctgtgcccttccagcagcccaagcacttcaccggaggagtgatgcgctggtaccaggtggagggcatggagtggctgaggatgctgtgggagaatggcatcaatggcatcctggctgatgagatgggcctgggcaagacagtgcagtgcatcgccaccatcgccctgatgatccagaggggcgtgcccggccccttcctggtgtgtggccccctgagcaccctgcccaactggatggccgagttcaagcgcttcaccccagacatccccaccatgctgtaccacggcacccaggaggagcggcagaagctggtgaggaacatctacaagaggaagggcaccctgcagatccaccctgtggtgatcaccagctttgaaattgccatgagggacagaaatgccctgcagatcctgacccccttcctgctgcggcggctgaagagtgatgtggccctggaggtgccccccaagcgggaggtggtggtgtatgcccccctgagcaagaagcaggagatcttctacacagccatcgtgaacagaaccatcgccaacatgtttggcagcagcgagaaggagaccatcgagctgagccccaccggccggcccaagaggaggaccaggaagagcatcaactacagcaagattgatgacttccccaatgagctggagaagctgatcagccagatccagcctgaggtggaccgggagagagctgtggtggaggtgaacatccctgtggagagcgaggtgaacctgaagctgcagaacatcatgatgctgctgaggaagtgctgcaaccacccctacctgattgagtaccccattgatcctgtgacccaggagttcaagattgatgaggagctggtgaccaacagcggcaagttcctgatcctggacaggatgctgcctgagctgaagaagaggggccacaaggtgctgctcttcagccagatgacctccatgctggacatcctgatggactactgccacctgcgggacttcaacttcagccggctggatggctccatgagctacagcgagcgggagaagaacatgcacagcttcaacacagatcctgaggtgttcatcttcctggtgtccacccgggccggcggcctgggcatcaacctgacagctgctgacaccgtcatcatctatgacagcgactggaacccccagagcgacctgcaggcccaggaccgctgccacagaattggccagaccaagcctgtggtggtgtaccgcctggtgacagccaacaccatcgaccagaagatcgtggagagagctgctgccaagaggaagctggagaagctgatcatccacaagaaccacttcaagggcggccagagcggcctgaacctgagcaagaacttcctggaccccaaggagctgatggagctgctgaagagccgggactatgaaagagagatcaagggcagccgggagaaggtgatcagtgacaaggacctggagctgctgctggacagaagtgacctgattgaccagatgaatgccagcggccccatcaaggagaagatgggcatcttcaagatcctggagaacagcgaggacagcagcccagaatgtctcttctag

SEQ ID NO: 107708 - DNA, 2223 bp, Artificial Sequence
  derived and/or modified sequence
atgcccgccgagcggcccgccggcagcggcggcagcgaggcccccgctatggtagaacagctggacaccgcagtgattacacctgcaatgctggaggaagaagaacagctggaggcagcaggcctcgaaagggagcgaaaaatgctcgagaaggcccggatgtcctgggatcgggagagcaccgaaatccggtaccgtcgccttcaacacctgctggaaaaaagcaatatttactctaaattccttctcactaaaatggaacagcagcaactcgaggaacagaagaaaaaggaaaagctcgaaaggaagaaggagtcactcaaagtgaaaaaagggaagaacagcatcgacgcctccgaggagaaacccgtgatgcggaaaaaaagaggtcgggaagatgaatcctataatatatccgaggttatgtcgaaggaggaaattctgagcgtagctaaaaagaataagaaggagaatgaagacgagaattcatctagtaccaacctctgcgtggaagacctgcaaaagaacaaggatagtaacagtataataaaggatagactgagcgaaacagtcagacaaaatacaaaattcttcttcgaccctgtgcgcaagtgtaatgggcagcctgtcccctttcagcagccaaagcacttcacaggtggcgtgatgcggtggtaccaggtcgaggggatggagtggctcagaatgctgtgggagaacggcataaacgggattctcgcggatgaaatgggactgggcaagacggtgcagtgtattgcaacgatcgccttgatgatccagcgaggagtgcccggaccttttttggtttgcgggcctttatctactttgcccaactggatggctgaatttaagcgatttacgcccgatattccaaccatgttatatcacggtacccaagaagagaggcagaaactggttcgcaatatatataagaggaaggggacattgcagatccaccctgtcgtgatcacctctttcgaaatcgccatgagagacaggaatgcacttcagattctgacacccttcctgctgagaagactgaaaagcgacgtggcacttgaagtcccaccaaagagagaagtggtggtgtacgcgcccctgtcaaagaaacaggaaattttttacaccgccatcgtaaatagaaccatcgcaaacatgtttgggagtagcgagaaagagactattgaattgagccccacgggacgaccaaaacggagaacaaggaaaagcatcaattactccaaaattgatgactttcccaatgagcttgaaaagttgatcagccagattcagccggaagtggacagagagagggctgttgtcgaggtcaatatcccggtggaatcagaagtcaacctaaagctgcaaaatatcatgatgctcctcaggaaatgttgcaatcatccatacctgatcgaatatcccattgatcctgtcacacaggagttcaaaatcgacgaggaacttgtgactaactctgggaagttcctgatcttggataggatgttgccagagctgaaaaagaggggccacaaagttctgcttttcagccagatgacttctatgctggacattcttatggattattgtcacctgagggactttaactttagtcgcctggatgggtcaatgtcctactctgagagggaaaagaatatgcactcctttaacacagaccctgaagttttcatcttcctcgtgagcacccgggcaggggggctcgggattaacctcacggccgctgacacagtcatcatatacgacagcgattggaacccccagtcagatttgcaggcccaagacaggtgtcatcggattggccagacaaagcctgtggtagtttacagactcgtcacagcaaacacaatcgatcagaaaatcgtggagcgagccgctgccaagcggaagctggagaagcttatcattcataagaatcatttcaaagggggccagagcggtctcaacttgtcaaaaaactttctggatccaaaggagctcatggaactcttgaagtcccgcgactatgaaagggaaatcaaaggctccagggagaaggtcatcagtgataaggacctggaactgctgctcgaccgcagcgatctgattgaccagatgaatgccagcggcccaatcaaagaaaaaatgggtatttttaaaatcttagagaacagcgaggacagtagtcccgaatgcctcttttag

SEQ ID NO: 107709 - DNA, 2223 bp, Artificial Sequence
  derived and/or modified sequence
atgccagccgagaggccagccggttccggcggatcagaggcccctgccatggtggaacagctagataccgctgtcataacacccgctatgctggaggaggaggagcagcttgaagcagcaggcctcgaaagagagcgcaaaatgctagagaaggccagaatgtcgtgggaccgagagtccacggagatccgatacaggcgtcttcaacatctgctggagaaatccaacatatattccaaatttctgctgacgaagatggagcagcagcaactggaggagcagaaaaaaaaggaaaaattggagaggaaaaaggagtctctaaaagtcaaaaaaggcaagaattctattgacgcttccgaggaaaagcccgtcatgcggaagaaaaggggaagagaagacgagtcatataacatctccgaggtgatgtcgaaagaagagatcttatcagtcgcaaaaaaaaataagaaggaaaacgaggacgagaacagcagtagtactaacttgtgcgtggaggatctccagaagaataaggacagcaatagcataattaaggaccgcctctcagagaccgtacggcagaatacaaagtttttctttgatcctgtccgcaagtgcaatgggcaacctgtgcctttccagcagccaaagcattttacgggcggagtgatgcgatggtatcaagtggaaggaatggaatggctgcgcatgctgtgggagaacggaattaacggcatcctcgccgatgaaatgggcttagggaagacagtacagtgtattgccacaatcgctctgatgattcagagaggagtaccaggccctttcctggtatgtgggccactgagtacactcccaaattggatggccgaatttaaacggttcacccccgacatcccaactatgctgtatcacggaacccaggaggagcgtcagaaactcgtgaggaacatttacaaacggaaaggcaccctgcagatccaccctgtggtcataacttctttcgaaatcgcaatgcgggatcgtaacgcacttcagattctgacaccatttctgctaaggcgactgaagtcagatgtggcacttgaagttccacctaagcgggaagtcgtggtctacgctcctcttagtaagaagcaggagatcttctacactgcaatagtgaacaggaccattgctaatatgttcggaagcagcgaaaaggaaacaattgagctatccccaactgggaggcctaagcgcaggaccaggaagtcgatcaattatagcaaaatagatgattttcctaacgaattggagaaattgatctcccagatccagccagaggtggacagggaaagggctgtggtggaggtgaatattccggtggagtccgaggtcaacctgaagctacagaatattatgatgctattgcgtaaatgctgtaatcatccgtatctgatcgagtacccaatcgacccagtgacccaggaatttaagattgatgaggaactcgtcaccaatagtggtaagtttctaatccttgaccgaatgttgccagagcttaagaagaggggccataaggtccttctgttcagtcagatgactagcatgcttgacattctaatggattactgccatctgcgcgatttcaatttctcgagactcgatggaagcatgtcctacagtgagagagaaaaaaatatgcatagctttaacactgaccctgaggttttcatattcctcgtgtccacccgcgcaggtggtctcggtatcaacctgacagccgcagacacagtgatcatctatgactccgattggaatccgcagtccgatctacaggcccaggacaggtgtcaccgcatcggccagactaagccagttgtcgtttaccggctggttacagcgaacaccattgatcagaagattgtagaacgagctgccgcaaaaagaaagctggagaagctcatcatccacaaaaatcacttcaagggcggacaaagtggactgaatctctctaagaatttcctcgacccaaaggagctgatggaactgctaaaatcccgagattatgagcgagaaatcaaaggcagcagggaaaaagtgatttcggataaagacctggaattgcttttagatcgcagcgacctaatcgatcagatgaacgccagcggccctattaaggagaaaatgggaatatttaagatcctggaaaatagtgaggattcctcacctgagtgtttattttag

SEQ ID NO: 107710 - DNA, 2223 bp, Artificial Sequence
  derived and/or modified sequence
atgcccgccgagagacccgccggcagcggcggcagcgaggcccccgccatggtggagcagctggacaccgccgtgatcacccccgccatgctggaggaggaggagcagctggaggccgccggcctggagagagagagaaagatgctggagaaggccagaatgagctgggacagagagagcaccgagatcagatacagaagactgcagcacctgctggagaagagcaacatctacagcaagttcctgctgaccaagatggagcagcagcagctggaggagcagaagaagaaggagaagctggagagaaagaaggagagcctgaaggtgaagaagggcaagaacagcatcgacgccagcgaggagaagcccgtgatgagaaagaagagaggcagagaggacgagagctacaacatcagcgaggtgatgagcaaggaggagatcctgagcgtggccaagaagaacaagaaggagaacgaggacgagaacagcagcagcaccaacctgtgcgtggaggacctgcagaagaacaaggacagcaacagcatcatcaaggacagactgagcgagaccgtgagacagaacaccaagttcttcttcgaccccgtgagaaagtgcaacggccagcccgtgcccttccagcagcccaagcacttcaccggcggcgtgatgagatggtaccaggtggagggcatggagtggctgagaatgctgtgggagaacggcatcaacggcatcctggccgacgagatgggcctgggcaagaccgtgcagtgcatcgccaccatcgccctgatgatccagagaggcgtgcccggccccttcctggtgtgcggccccctgagcaccctgcccaactggatggccgagttcaagagattcacccccgacatccccaccatgctgtaccacggcacccaggaggagagacagaagctggtgagaaacatctacaagagaaagggcaccctgcagatccaccccgtggtgatcaccagcttcgagatcgccatgagagacagaaacgccctgcagatcctgacccccttcctgctgagaagactgaagagcgacgtggccctggaggtgccccccaagagagaggtggtggtgtacgcccccctgagcaagaagcaggagatcttctacaccgccatcgtgaacagaaccatcgccaacatgttcggcagcagcgagaaggagaccatcgagctgagccccaccggcagacccaagagaagaaccagaaagagcatcaactacagcaagatcgacgacttccccaacgagctggagaagctgatcagccagatccagcccgaggtggacagagagagagccgtggtggaggtgaacatccccgtggagagcgaggtgaacctgaagctgcagaacatcatgatgctgctgagaaagtgctgcaaccacccctacctgatcgagtaccccatcgaccccgtgacccaggagttcaagatcgacgaggagctggtgaccaacagcggcaagttcctgatcctggacagaatgctgcccgagctgaagaagagaggccacaaggtgctgctgttcagccagatgaccagcatgctggacatcctgatggactactgccacctgagagacttcaacttcagcagactggacggcagcatgagctacagcgagagagagaagaacatgcacagcttcaacaccgaccccgaggtgttcatcttcctggtgagcaccagagccggcggcctgggcatcaacctgaccgccgccgacaccgtgatcatctacgacagcgactggaacccccagagcgacctgcaggcccaggacagatgccacagaatcggccagaccaagcccgtggtggtgtacagactggtgaccgccaacaccatcgaccagaagatcgtggagagagccgccgccaagagaaagctggagaagctgatcatccacaagaaccacttcaagggcggccagagcggcctgaacctgagcaagaacttcctggaccccaaggagctgatggagctgctgaagagcagagactacgagagagagatcaagggcagcagagagaaggtgatcagcgacaaggacctggagctgctgctggacagaagcgacctgatcgaccagatgaacgccagcggccccatcaaggagaagatgggcatcttcaagatcctggagaacagcgaggacagcagccccgagtgcctgttctag

SEQ ID NO: 107711 - protein, 193 aa, Artificial Sequence
  derived and/or modified sequence
MIKAILIFNNHGKPRLSKFYQPYSEDTQQQIIRETFHLVSKRDENVCNFLEGGLLIGGSDNKLIYRHYATLYFVFCVDSSESELGILDLIQVFVETLDKCFENVCELDLIFHVDKVHNILAEMVMGGMVLETNMNEIVTQIDAQNKLEKSEAGLAGAPARAVSAVKNMNLPEIPRNINIGDISIKVPNLPSFK

SEQ ID NO: 107712 - DNA, 294 bp, Artificial Sequence
  derived and/or modified sequence
atgcctgccgagaggcccgctgggagcggcggatccgaagcccctgccatggtggaacaactggacaccgccgttatcactcctgccatgctcgaagaggaggaacagttggaggccgcgggactcgaaagggagcgtaagatgttagagaaggccaggatgagctgggacagagaaagcacggaaattcgctataggagattgcaacacctgctggagaaatctaatatttattccaaatttcttttgaccaagatggagcagcagcagctagaaacagtcatgaagatctag

SEQ ID NO: 107713 - DNA, 390 bp, Artificial Sequence
  derived and/or modified sequence
atgcctgccgaacggccagccggaagtggcggcagcgaagcacccgcgatggttgagcagttagatacggcagtgatcactcccgctatgctggaagaggaggagcagcttgaagccgccggactggagagagagagaaaaatgctggaaaaagcccggatgagctgggaccgtgaaagcactgaaatcagatataggaggcttcaacacctgctcgagaagagtaacatctactcaaagtttcttctcactaagatggagcagcagcagcttgaagagcagaagaagaaagaaaagctggaacggaagaaggaaagtctgaaggttaaaaaagggaagaactcgatcgatgcttctgaagagaagccaggcaactttgtgtgtggctag

SEQ ID NO: 107714 - DNA, 948 bp, Artificial Sequence
  derived and/or modified sequence
atgcctgccgagagacctgccgggtctggtgggtccgaggcacccgccatggtcgaacagttggataccgcggtgattacccccgctatgctggaggaagaagagcaactggaggccgccggtttggagagggagcgcaagatgttggagaaggcacggatgtcctgggaccgagagagcactgagattagatataggagactgcagcacctcctggagaagtccaacatttactctaagttcctgcttaccaagatggagcaacaacagctggaagagcagaagaaaaaggagaaactcgaaagaaagaaagaatcccttaaagtcaaaaaggggaagaatagtatcgatgccagtgaagagaaaccggtaatgcgaaaaaaacggggacgggaggacgaatcttacaacataagcgaggttatgagcaaggaggaaatcttgtctgtcgcgaaaaagaataagaaggaaaatgaggatgaaaatagctcttcaaccaacctatgcgtggaagatttacagaaaaacaaagatagcaactcaatcattaaggaccgtttgagcgaaactgtgcggcaaaacacaaaattctttttcgatcctgtgagaaaatgtaatgggcagccagtgcctttccagcagccgaaacacttcacaggcggcgtgatgcgatggtatcaggtggaaggcatggaatggctgcgcatgctgtgggagaatggcattaacgggatcttggctgacgagatggggctcggtaagaccgtgcagtgcattgcgaccatagccctgatgattcagagaggggtgcctgggccatttcttgtgtgtggcccgctgagcacactgcccaactggatggcagagtttaaaaggttcaccccagacatccccactatgctttaccatggaacccaggaggaaagacagaagctcatatacctgtag

SEQ ID NO: 107715 - DNA, 579 bp, Artificial Sequence
  derived and/or modified sequence
atggtagaacagctggacactgccgtcatcacacccgccatgctggaggaggaggaacagctcgaagccgctggtctcgagcgcgagaggaagatgcttgaaaaggctagaatgtcatgggatagagagtccacagagataagatatcgcagactgcaacatttgctcgagaaatcgaacatttactcaaagttccttctgacaaagatggagcaacagcaactggaagaacagaagaagaaggagaaactggaacgcaagaaggagtcactcaaagtgaagaaaggaaagaattctatcgacgcgtctgaagaaaaaccagttatgaggaagaaacgcggtagagaggacgagtcgtacaatatttctgaggtgatgtctaaggaggagatcctgagtgttgctaaaaaaaataagaaggaaaacgaagatgagaattcctccagtactaatttgtgcgtggaagatttacagaaaaataaggactctaattctatcattaaagaccggttgtctgaaacggtacggcagaatactaagttcttttttgatccagtgcgtaagtgtaatgggcaatag

SEQ ID NO: 107716 - DNA, 1053 bp, Artificial Sequence
  derived and/or modified sequence
ggggatttggctagaaggctgggccggcagcggttgtgaggagttagctcgcggcattgcaggctctgagaggaggggacccggttcccgggtgagtgtccaggcatgccagcggaacggcccgcgggcagcggcggctcggaggctccagcaatggttgaacaactggacactgctgtgattaccccggccatgctagaagaggaagaacagcttgaagctgctggactagagagagagcggaagatgctggaaaaggctcgcatgtcttgggatagagagtcgacagaaattcggtaccgtagacttcaacatttgcttgaaaaaagcaatatatactccaaatttttattgacgaaaatggaacagcaacaattagaggaacagaagaagaaagaaaaattggagagaaaaaaggagtctttaaaagttaaaaagggtaaaaattcaattgatgcaagtgaagagaagccagttatgaggaaaaaaagaggaagagaagatgaatcatacaatatttcagaggtcatgtcaaaagaggaaattttgtctgtggctaaaaaaaataaaaaggagaatgaggatgaaaactcctcctctactaatctctgtgtggaagatcttcagaaaaataaagattcgaatagtataattaaagatagattgtctgaaacggttaggcagaatactaaattcttttttgacccagtccggaagtgtaatggtcagccagtaccttttcaacaaccaaagcacttcactggaggagtgatgcgatggtaccaagtagaaggcatggaatggcttaggatgctttgggaaaatggaattaatggcattttagcagatgaaatgggattgggtaagacagttcagtgcattgctactattgcattgatgattcagagaggagtaccaggaccttttcttgtctgtggccctttgtctacacttcctaactggatggctgaattcaaaagatttacaccagatatccctacaatgttatatcatggaacccaggaggaacgtcaaaaattgatatatttgtga

SEQ ID NO: 107717 - DNA, 711 bp, Artificial Sequence
  derived and/or modified sequence
aggagaagcgcgcttttttccctggcgggggatttggctagaaggctgggccggcagcggttgtgaggagttagctcgcggcattgcaggctctgagaggaggggacccggttcccgggctcggaggctccagcaatggttgaacaactggacactgctgtgattaccccggccatgctagaagaggaagaacagcttgaagctgctggactagagagagagcggaagatgctggaaaaggctcgcatgtcttgggatagagagtcgacagaaattcggtaccgtagacttcaacatttgcttgaaaaaagcaatatatactccaaatttttattgacgaaaatggaacagcaacaattagaggaacagaagaagaaagaaaaattggagagaaaaaaggagtctttaaaagttaaaaagggtaaaaattcaattgatgcaagtgaagagaagccagttatgaggaaaaaaagaggaagagaagatgaatcatacaatatttcagaggtcatgtcaaaagaggaaattttgtctgtggctaaaaaaaataaaaaggagaatgaggatgaaaactcctcctctactaatctctgtgtggaagatcttcagaaaaataaagattcgaatagtataattaaagatagattgtctgaaacggttaggcagaatactaaattcttttttgacccagtccggaagtgtaatggtcag

SEQ ID NO: 107718 - DNA, 294 bp, Artificial Sequence
  derived and/or modified sequence
atgcctgctgagaggcctgctggcagcggcggcagcgaggccccagccatggtggagcagctggacacagctgtgatcaccccagccatgctggaggaggaggagcagctggaggccgccggcctggagcgggagaggaagatgctggagaaggccaggatgtcctgggaccgggagagcacagagatccgctaccgccgcctgcagcacctgctggagaagagcaacatctacagcaagttcctgctgaccaagatggagcagcagcagctggagaccgtgatgaagatctag

SEQ ID NO: 107719 - DNA, 390 bp, Artificial Sequence
  derived and/or modified sequence
atgcctgctgagaggcctgctggcagcggcggcagcgaggccccagccatggtggagcagctggacacagctgtgatcaccccagccatgctggaggaggaggagcagctggaggccgccggcctggagcgggagaggaagatgctggagaaggccaggatgtcctgggaccgggagagcacagagatccgctaccgccgcctgcagcacctgctggagaagagcaacatctacagcaagttcctgctgaccaagatggagcagcagcagctggaggagcagaagaagaaggagaagctggagaggaagaaggagagcctgaaggtgaagaagggcaagaacagcattgatgccagcgaggagaagccaggcaactttgtgtgtggctag

SEQ ID NO: 107720 - DNA, 948 bp, Artificial Sequence
  derived and/or modified sequence
atgcctgctgagaggcctgctggcagcggcggcagcgaggccccagccatggtggagcagctggacacagctgtgatcaccccagccatgctggaggaggaggagcagctggaggccgccggcctggagcgggagaggaagatgctggagaaggccaggatgtcctgggaccgggagagcacagagatccgctaccgccgcctgcagcacctgctggagaagagcaacatctacagcaagttcctgctgaccaagatggagcagcagcagctggaggagcagaagaagaaggagaagctggagaggaagaaggagagcctgaaggtgaagaagggcaagaacagcattgatgccagcgaggagaagcctgtgatgaggaagaagaggggccgggaggatgagagctacaacatcagcgaggtgatgagcaaggaggagatcctgtctgtggccaagaagaacaagaaggaaaatgaagatgagaacagcagcagcaccaacctgtgtgtggaggacctgcagaagaacaaggacagcaacagcatcatcaaggaccggctgtctgagaccgtgcggcagaacaccaagttcttctttgatcctgtgaggaagtgcaatggccagcctgtgcccttccagcagcccaagcacttcaccggaggagtgatgcgctggtaccaggtggagggcatggagtggctgaggatgctgtgggagaatggcatcaatggcatcctggctgatgagatgggcctgggcaagacagtgcagtgcatcgccaccatcgccctgatgatccagaggggcgtgcccggccccttcctggtgtgtggccccctgagcaccctgcccaactggatggccgagttcaagcgcttcaccccagacatccccaccatgctgtaccacggcacccaggaggagcggcagaagctgatctacctgtag

SEQ ID NO: 107721 - DNA, 579 bp, Artificial Sequence
  derived and/or modified sequence
atggtggagcagctggacacagctgtgatcaccccagccatgctggaggaggaggagcagctggaggccgccggcctggagcgggagaggaagatgctggagaaggccaggatgtcctgggaccgggagagcacagagatccgctaccgccgcctgcagcacctgctggagaagagcaacatctacagcaagttcctgctgaccaagatggagcagcagcagctggaggagcagaagaagaaggagaagctggagaggaagaaggagagcctgaaggtgaagaagggcaagaacagcattgatgccagcgaggagaagcctgtgatgaggaagaagaggggccgggaggatgagagctacaacatcagcgaggtgatgagcaaggaggagatcctgtctgtggccaagaagaacaagaaggaaaatgaagatgagaacagcagcagcaccaacctgtgtgtggaggacctgcagaagaacaaggacagcaacagcatcatcaaggaccggctgtctgagaccgtgcggcagaacaccaagttcttctttgatcctgtgaggaagtgcaatggccagtag

SEQ ID NO: 107722 - DNA, 294 bp, Artificial Sequence
  derived and/or modified sequence
atgcccgccgagcggcccgccggcagcggcggcagcgaggcccccgcaatggtggaacagctggacacagctgtgatcacgccggccatgctggaagaggaggaacagctcgaggcggcaggcctggaaagggaaagaaagatgctggaaaaagcacggatgagttgggatcgtgaatcaaccgagatacgatacaggcggctgcagcatttgctggaaaaatcaaacatatactcaaagtttctgttgaccaaaatggaacagcagcagcttgagacagtaatgaagatatag

SEQ ID NO: 107723 - DNA, 390 bp, Artificial Sequence
  derived and/or modified sequence
atgcccgccgagcggcccgccggcagcggcggcagcgaggcccccgccatggttgagcagcttgataccgcggtcatcacaccagcgatgctcgaggaagaggaacaactggaagctgcaggcctcgagcgggagagaaagatgcttgagaaggctcggatgagttgggacagggagtcaaccgaaattaggtatagaaggctgcagcacttgctggagaaatcaaacatctactcaaagtttctgctgacaaagatggagcagcaacagcttgaggaacagaaaaagaaggaaaagctagagagaaagaaggaaagcctgaaagtgaagaaaggcaaaaactcgatcgatgccagcgaagagaagcccggaaattttgtttgcgggtag

SEQ ID NO: 107724 - DNA, 948 bp, Artificial Sequence
  derived and/or modified sequence
atgcccgccgagcggcccgccggcagcggcggcagcgaggcccccgctatggtggagcagctcgacaccgctgtcatcacacctgcaatgctggaagaggaggaacagctggaggctgcaggattggaaagggaaaggaaaatgctggaaaaagcacggatgagctgggacagagagagcaccgagattcgatatcgaaggttgcaacacctgcttgagaaatctaacatctattctaagtttttgctgacgaaaatggagcagcagcaattggaggagcagaaaaaaaaagagaaactcgagcgtaagaaggaaagcctgaaagtgaaaaagggtaaaaactccatcgacgcgtcagaagaaaaaccagtcatgagaaagaagagaggccgcgaggacgagtcttataatatctctgaggtgatgtcaaaggaagaaatcctgtccgtcgccaagaaaaacaagaaggaaaacgaggatgagaacagctccagcacgaatctctgtgttgaggaccttcagaagaataaagacagcaattccataatcaaggataggctgtctgaaactgttcgccagaatacaaaattcttctttgacccggttcgtaagtgtaacggacagcctgtaccatttcaacagcctaaacacttcaccggtggggtgatgcggtggtaccaggtcgagggcatggagtggttacggatgctctgggaaaacggaattaatggtatcctggcagatgaaatgggcctagggaagacggtccagtgtatagccactatcgccctcatgatccaaagaggagttccagggccctttttagtttgcgggccgctgagtacactcccaaactggatggctgagttcaagagatttacaccggacattcccacaatgttgtaccatggtacgcaggaggagcgccagaaactgatttacctctag

SEQ ID NO: 107725 - DNA, 579 bp, Artificial Sequence
  derived and/or modified sequence
atggtggagcagctggacaccgccgtgatcacccccgccatgctggaggaggaggagcagttggaggccgcgggtctagaacgcgagcgtaagatgttggagaaggcgaggatgtcttgggacagagaatcgacggaaattcgttatcgccggctgcaacatctgctggaaaaaagcaatatctactctaagtttctgctgacaaagatggaacagcagcagctggaggagcagaaaaaaaaggagaagctagagaggaagaaggagagcctgaaggtgaagaagggtaaaaacagcatcgatgcttcggaagagaagcccgtgatgcggaagaaaaggggccgtgaagacgagtcttataatattagtgaggtgatgagcaaagaggagattctgtcagttgcaaagaagaataagaaggagaatgaggacgagaacagtagttctacaaatttatgcgtcgaggatcttcaaaaaaacaaggacagtaactccatcatcaaggatagactctccgaaacagttaggcaaaataccaagttcttcttcgatccagtccgaaagtgcaacggacaatag

SEQ ID NO: 107726 - DNA, 294 bp, Artificial Sequence
  derived and/or modified sequence
atgccagcagaaagaccagctggcagtggcggatcagaagccccagcaatggtggaacagttggacaccgccgtcatcaccccggcaatgctagaggaagaagaacagctcgaagcagctggtctggagcgtgagagaaaaatgctcgaaaaggccagaatgtcatgggatagagaaagtaccgagattaggtacaggagattacagcatcttctggaaaagtcgaacatttactccaagttccttctgacaaaaatggaacagcagcagcttgaaacagtaatgaaaatttag

SEQ ID NO: 107727 - DNA, 390 bp, Artificial Sequence
  derived and/or modified sequence
atgcccgctgagagaccagccggaagcgggggtagcgaggcgccagctatggtggaacagctggataccgcagtgatcacccccgctatgctcgaagaggaggagcagttagaagccgcaggcctcgagagggaacgcaaaatgttggaaaaggcccgtatgtcctgggatcgggaatccacggaaatcagataccgcaggcttcagcacttgctggagaagtccaatatttatagcaagtttctgctgactaagatggagcagcaacagctcgaagagcagaagaaaaaggaaaaactcgaacggaagaaagaaagcctaaaagtaaagaagggtaagaactctatcgacgcttcagaagagaaacctggaaatttcgtctgtggatag

SEQ ID NO: 107728 - DNA, 948 bp, Artificial Sequence
  derived and/or modified sequence
atgcccgctgagcgccctgctggcagcggtgggagtgaggcccctgctatggtggagcaactagacactgccgtcattacaccagcaatgctggaggaggaggaacagctggaagcagcaggcttagagagggagcgtaaaatgctggaaaaagccaggatgagttgggacagggaatccacagagatccgatataggcggctgcagcatctgctcgagaagagcaatatttacagtaaattcctcctgacaaaaatggagcaacaacagctcgaggaacagaaaaagaaggaaaagctagagcgtaagaaagaatccctgaaagtgaagaagggcaagaacagcatagatgcaagcgaagaaaaacccgtgatgaggaagaagcggggtcgcgaggacgagagttataacatctcggaggtcatgtcaaaggaagagatcttgagtgtggccaaaaaaaataagaaagaaaacgaagatgaaaacagctcgtcaactaacctctgtgtggaagacctccagaagaacaaggactcgaacagcattatcaaagataggctgtcagaaacagtgagacagaacaccaagttcttctttgatcctgtgaggaagtgtaacggtcagcctgtgccattccagcaacctaagcacttcacagggggagtcatgcgatggtatcaggtagaaggtatggagtggctgcgaatgctgtgggaaaatgggatcaacgggatcctggcagacgagatgggcctgggtaagacagtgcagtgtatcgcgactattgccctaatgatacaacgaggggttccagggccattcttagtgtgcggcccattgtcaacactccctaattggatggcagagttcaaacgattcacaccggacattccaacaatgctgtaccacggcacacaggaggagcgccaaaagctcatctacctgtag

SEQ ID NO: 107729 - DNA, 579 bp, Artificial Sequence
  derived and/or modified sequence
atggtggaacaactagatacggccgtcatcacacctgccatgttagaggaggaggagcaattagaggcagcgggtttggagagggaacgaaaaatgctggagaaggcaaggatgagctgggatcgagaatctacagagatccgttaccgcagacttcagcacctattagagaagagtaacatttactccaagtttctgttaactaagatggagcagcagcagctagaggaacagaaaaagaaggagaagctggaacggaaaaaggagtctctgaaggtcaaaaagggtaaaaatagtatcgacgcgagcgaggagaaacccgtgatgcgaaaaaaaagaggtagagaagacgaaagttacaatatttccgaggtgatgtccaaagaagagattctctctgtagccaagaagaacaaaaaggaaaacgaggatgaaaactcatcctccacaaacctatgcgttgaagatttacaaaagaacaaggattcgaactcgatcattaaagatcgcttatcggaaactgtcagacagaacacaaagtttttcttcgaccctgtacggaagtgcaatggccaatag

SEQ ID NO: 107730 - DNA, 294 bp, Artificial Sequence
  derived and/or modified sequence
atgcccgccgagagacccgccggcagcggcggcagcgaggcccccgccatggtggagcagctggacaccgccgtgatcacccccgccatgctggaggaggaggagcagctggaggccgccggcctggagagagagagaaagatgctggagaaggccagaatgagctgggacagagagagcaccgagatcagatacagaagactgcagcacctgctggagaagagcaacatctacagcaagttcctgctgaccaagatggagcagcagcagctggagaccgtgatgaagatctag

SEQ ID NO: 107731 - DNA, 390 bp, Artificial Sequence
  derived and/or modified sequence
atgcccgccgagagacccgccggcagcggcggcagcgaggcccccgccatggtggagcagctggacaccgccgtgatcacccccgccatgctggaggaggaggagcagctggaggccgccggcctggagagagagagaaagatgctggagaaggccagaatgagctgggacagagagagcaccgagatcagatacagaagactgcagcacctgctggagaagagcaacatctacagcaagttcctgctgaccaagatggagcagcagcagctggaggagcagaagaagaaggagaagctggagagaaagaaggagagcctgaaggtgaagaagggcaagaacagcatcgacgccagcgaggagaagcccggcaacttcgtgtgcggctag

SEQ ID NO: 107732 - DNA, 948 bp, Artificial Sequence
  derived and/or modified sequence
atgcccgccgagagacccgccggcagcggcggcagcgaggcccccgccatggtggagcagctggacaccgccgtgatcacccccgccatgctggaggaggaggagcagctggaggccgccggcctggagagagagagaaagatgctggagaaggccagaatgagctgggacagagagagcaccgagatcagatacagaagactgcagcacctgctggagaagagcaacatctacagcaagttcctgctgaccaagatggagcagcagcagctggaggagcagaagaagaaggagaagctggagagaaagaaggagagcctgaaggtgaagaagggcaagaacagcatcgacgccagcgaggagaagcccgtgatgagaaagaagagaggcagagaggacgagagctacaacatcagcgaggtgatgagcaaggaggagatcctgagcgtggccaagaagaacaagaaggagaacgaggacgagaacagcagcagcaccaacctgtgcgtggaggacctgcagaagaacaaggacagcaacagcatcatcaaggacagactgagcgagaccgtgagacagaacaccaagttcttcttcgaccccgtgagaaagtgcaacggccagcccgtgcccttccagcagcccaagcacttcaccggcggcgtgatgagatggtaccaggtggagggcatggagtggctgagaatgctgtgggagaacggcatcaacggcatcctggccgacgagatgggcctgggcaagaccgtgcagtgcatcgccaccatcgccctgatgatccagagaggcgtgcccggccccttcctggtgtgcggccccctgagcaccctgcccaactggatggccgagttcaagagattcacccccgacatccccaccatgctgtaccacggcacccaggaggagagacagaagctgatctacctgtag

SEQ ID NO: 107733 - DNA, 579 bp, Artificial Sequence
  derived and/or modified sequence
atggtggagcagctggacaccgccgtgatcacccccgccatgctggaggaggaggagcagctggaggccgccggcctggagagagagagaaagatgctggagaaggccagaatgagctgggacagagagagcaccgagatcagatacagaagactgcagcacctgctggagaagagcaacatctacagcaagttcctgctgaccaagatggagcagcagcagctggaggagcagaagaagaaggagaagctggagagaaagaaggagagcctgaaggtgaagaagggcaagaacagcatcgacgccagcgaggagaagcccgtgatgagaaagaagagaggcagagaggacgagagctacaacatcagcgaggtgatgagcaaggaggagatcctgagcgtggccaagaagaacaagaaggagaacgaggacgagaacagcagcagcaccaacctgtgcgtggaggacctgcagaagaacaaggacagcaacagcatcatcaaggacagactgagcgagaccgtgagacagaacaccaagttcttcttcgaccccgtgagaaagtgcaacggccagtag

SEQ ID NO: 107734 - DNA, 3033 bp, Artificial Sequence
  derived and/or modified sequence
ggggatttggctagaaggctgggccggcagcggttgtgaggagttagctcgcggcattgcaggctctgagaggaggggacccggttcccgggtgagtgtccaggcatgccagcggaacggcccgcgggcagcggcggctcggaggctccagcaatggttgaacaactggacactgctgtgattaccccggccatgctagaagaggaagaacagcttgaagctgctggactagagagagagcggaagatgctggaaaaggctcgcatgtcttgggatagagagtcgacagaaattcggtaccgtagacttcaacatttgcttgaaaaaagcaatatatactccaaatttttattgacgaaaatggaacagcaacaattagaggaacagaagaagaaagaaaaattggagagaaaaaaggagtctttaaaagttaaaaagggtaaaaattcaattgatgcaagtgaagagaagccaggaaattttgtctgtggctaaaaaaaataaaaaggagaatgaggatgaaaactcctcctctactaatctctgtgtggaagatcttcagaaaaataaagattcgaatagtataattaaagatagattgtctgaaacggttaggcagaatactaaattcttttttgacccagtccggaagtgtaatggtcagccagtaccttttcaacaaccaaagcacttcactggaggagtgatgcgatggtaccaagtagaaggcatggaatggcttaggatgctttgggaaaatggaattaatggcattttagcagatgaaatgggattgggtaagacagttcagtgcattgctactattgcattgatgattcagagaggagtaccaggaccttttcttgtctgtggccctttgtctacacttcctaactggatggctgaattcaaaagatttacaccagatatccctacaatgttatatcatggaacccaggaggaacgtcaaaaattggtaagaaatatttacaaacggaaagggactttgcagattcatcctgtggtaatcacgtcatttgaaatagccatgagagaccgaaatgcgttacagcattgctattggaaatacttaatagtagatgaaggacacaggattaagaatatgaagtgccgtctaatcagggagttaaaacgattcaatgctgataacaaacttcttttgactggtactcccttgcaaaacaatttatcagaactttggtcattgctaaactttttgttgccagatgtatttgatgacttgaaaagctttgagtcttggtttgacatcactagtctttctgaaactgctgaagatattattgctaaagaaagagaacagaatgtattgcatatgctgcaccagattttaacacctttcttattgagaagactgaagtctgatgttgctcttgaagttcctcctaaacgagaagtagtcgtttatgctccactttcaaagaagcaggagatcttttatacagccattgtgaaccgtacaattgcaaacatgtttggatccagtgagaaagaaacaattgagttaagtcctactggtcgaccaaaacgacgaactagaaaatcaataaattacagcaaaatagatgatttccctaatgaattggaaaaactgatcagtcaaatacagccagaggtggaccgagaaagagctgttgtggaagtgaatatccctgtagaatctgaagttaatctgaagctgcagaatataatgatgctacttcgtaaatgttgtaatcatccatatttgattgaatatcctatagaccctgttacacaagaatttaagatcgatgaagaattggtaacaaattctgggaagttcttgattttggatcgaatgctgccagaactaaaaaaaagaggtcacaaggtgctgcttttttcacaaatgacaagcatgttggacattttgatggattactgccatctcagagatttcaacttcagcaggcttgatgggtccatgtcttactcagagagagaaaaaaacatgcacagcttcaacacggatccagaggtgtttatcttcttagtgagtacacgagctggtggcctgggcattaatctgactgcagcagatacagttatcatttatgatagtgattggaacccccagtcggatcttcaggcccaggatagatgtcatagaattggtcagacaaagccagttgttgtttatcgccttgttacagcaaatactatcgatcagaaaattgtggaaagagcagctgctaaaaggaaactggaaaagttgatcatccataaaaatcatttcaaaggtggtcagtctggattaaatctgtctaagaatttcttagatcctaaggaattaatggaattattaaaatctagagattatgaaagggaaataaaaggatcaagagagaaggtcattagtgataaagatctagagttgttgttagatcgaagtgatcttattgatcaaatgaatgcttcaggaccaattaaagagaagatggggatattcaagatattagaaaattctgaagattccagtcctgaatgtttgttttaaagtggagctcaagaatagcttttaaaagttcttatttacatctagtgatttccctgtattgggtttgaaatactgattgtccacttcaccttttttattatatcagttgacatgtaactagtaccatgcgtacttaaatagatggtaattttctgagccttaccaagaacaaagaagtatccatattaagtttagattttcagttaatttttgagactgagtagtattcttggatacaggctgatgtgtacttaaccacttccagatttatacagtcttcctgtggaagtttagtaaatgtctttttccctcctttcttctagtaatgcagttcatgggctttaggtacttcagttatgaagtaggcttttcatggggagagattgggattatgctctctgttgtttaagaaactgtttgattttagagtctatttctatgagatagtttaccaaataaatgttccttataagatg

SEQ ID NO: 107735 - protein, 956 aa, Artificial Sequence
  derived and/or modified sequence
MSYHYRLDGGSLAINSPHTDQDIGMYQCLATNLLGTILSRKAKLQFAYIEDFETKTRSTVSVREGQGVVLLCGPPPHFGDLSYAWTFNDNPLYVQEDNRRFVSQETGNLYIAKVEPSDVGNYTCFITNKEAQRSVQGPPTPLVQRTDGVMGEYEPKIEVRFPETIQAAKDSSVKLECFALGNPVPDISWRRLDGSPLPGKVKYSKSQAILEIPNFQQEDEGFYECIASNLRGRNLAKGQLIFYAPPEWEQKIQNTHLSIYDNLLWECKASGKPNPWYTWLKNGERLNPEERIQIENGTLIITMLNVSDSGVYQCAAENKYQIIYANAELRVLASAPDFSKSPVKKKSFVQVGGDIVIGCKPNAFPRAAISWKRGTETLRQSKRIFLLEDGSLKIYNITRSDAGSYTCIATNQFGTAKNTGSLIVKERTVITVPPSKMDVTVGESIVLPCQVSHDPSIEVVFVWFFNGDVIDLKKGVAHFERIGGESVGDLMIRNIQLHHSGKYLCTVQTTLESLSAVADIIVRGPPGPPEDVQVEDISSTTSQLSWRAGPDNNSPIQIFTIQTRTPFSVGWQAVATVPEILNGKTYNATVVGLSPWVEYEFRVVAGNSIGIGEPSEPSELLRTKASVPVVAPVNIHGGGGSRSELVITWESIPEELQNGEGFGYIIMFRPVGSTTWSKEKVSSVESSRFVYRNESIIPLSPFEVKVGVYNNEGEGSLSTVTIVYSGEDEPQLAPRGTSLQSFSASEMEVSWNAIAWNRNTGRVLGYEVLYWTDDSKESMIGKIRVSGNVTTKNITGLKANTIYFASVRAYNTAGTGPSSPPVNVTTKKSPPSQPPANIAWKLTNSKLCLNWEHVKTMENESEVLGYKILYRQNRQSKTHILETNNTSAELLVPFEEDYLIEIRTVSDGGDGSSSEEIRIPKMSSLSSRGIQFLEPSTHFLSIVIVIFHCFAIQPLI

SEQ ID NO: 107736 - protein, 194 aa, Artificial Sequence
  derived and/or modified sequence
MWLPQLDLMRVISAKSQGYSIVTQITGPTTVNGLERGSLTVQCVYRSGWETYLKWWCRGAIWRDCKILVKTSGSEQEVKRDRVSIKDNQKNRTFTVTMEDLMKTDADTYWCGIEKTGNDLGVTVQVTIDPAPVTQEETSSSPTLTGHHLDNSSRDVPRAGTAAPGGRPLLCRPDPAAGRNLPAKGYHEAFLCPG

SEQ ID NO: 107737 - DNA, 585 bp, Artificial Sequence
  derived and/or modified sequence
atgtggctgcctcaacttgatctcatgagagttattagtgccaaaagccagggttattcaatagtgacccagattacaggacctaccactgtgaacggcctggaaagggggtcactgacagtgcaatgcgtttatagaagcgggtgggagacatatctgaagtggtggtgtcgcggtgccatctggcgggattgcaaaatcctggtgaaaacctcaggcagcgaacaggaggtcaagcgtgacagagtgtccattaaagataaccagaaaaatcgcactttcacagtgacaatggaggacctgatgaaaactgatgctgacacatattggtgcggcattgaaaagacagggaacgacctgggggtaacagtgcaagtgaccatcgatccagcccccgtaacccaagaggaaacctccagttcccccacacttactggacatcaccttgacaatagtagcagagatgtgccccgtgcgggcaccgccgcccccggtggcaggcctctgctgtgccggcctgaccctgccgccggcaggaatctcccagccaaagggtatcacgaagctttcctgtgtcctggctag

SEQ ID NO: 107738 - DNA, 585 bp, Artificial Sequence
  derived and/or modified sequence
atgtggctgccccagctggacctgatgagggtcatcagcgccaagagccagggctacagcatcgtgacccagatcaccggccccaccaccgtgaatggcctggagcggggcagcctgactgtgcagtgtgtgtacagaagtggctgggagacctacctgaagtggtggtgccgcggggccatctggagggactgcaagatcctggtgaagaccagcggcagcgagcaggaggtgaagagggacagagtgtccatcaaggacaaccagaagaacagaaccttcaccgtgaccatggaggacctgatgaagacagatgctgacacctactggtgtggcatcgagaagacaggaaatgacctgggcgtgacagtgcaggtgaccatcgaccctgcccctgtgacccaggaggagaccagcagcagccccaccctgaccggccaccacctggacaacagcagcagagatgtgcccagggctggaacagctgcccctgggggccggcccctgctgtgcaggccagaccctgctgctggaagaaacctgcctgccaagggctaccacgaggccttcctgtgccctggatag

SEQ ID NO: 107739 - DNA, 585 bp, Artificial Sequence
  derived and/or modified sequence
atgtggctgccccagctggacctgatgcgggtgatcagcgccaagagtcagggctattcaatagtgacacagataacgggaccaacaaccgttaacgggctggaacgtggctccttaaccgtgcaatgcgtgtaccgctctggctgggagacatacctcaaatggtggtgccggggcgcaatatggagggattgcaaaatcctggtgaaaaccagcggatccgagcaggaggtgaagcgggatcgagtgagcatcaaggacaaccaaaagaatagaacctttaccgtcacgatggaggacctaatgaagacagacgctgatacctactggtgcgggatcgagaagaccggaaacgacctgggagtgacggtgcaggtgaccattgatccagcaccagtcacgcaggaggaaacgtcaagcagccccacccttacgggtcaccacctggataactcctcacgcgacgttccacgcgcaggaacagccgcccccggggggaggcccctgctgtgtagaccagaccctgccgccggccgaaacctcccagcaaaggggtaccatgaagcttttttatgccctgggtag

SEQ ID NO: 107740 - DNA, 585 bp, Artificial Sequence
  derived and/or modified sequence
atgtggctccctcagctggacttgatgcgggtaattagcgcaaaatcccagggatattccatagtaacacagataaccgggcctacaaccgtaaatggactggagagaggaagtctgacagtccagtgcgtataccgtagcggttgggaaacatatttgaagtggtggtgtcgaggcgcaatatggagagactgcaaaatccttgtgaagacttcgggcagcgaacaggaggtcaaacgtgaccgcgtctcgatcaaagacaatcagaagaacagaaccttcaccgtgaccatggaggatctgatgaagaccgatgccgatacctattggtgtggcattgagaagacaggcaacgatctgggcgttaccgtgcaggtcacgatagatccggcaccggtcacccaagaggaaacaagctcatcccctacgttgaccgggcaccatctagacaattcatcccgagacgtgccgagagccggtaccgccgctcctgggggtcggcctcttctatgtcggccagaccctgccgctggcaggaacctgccagcaaagggttatcatgaagcttttttgtgccccggatag

SEQ ID NO: 107741 - DNA, 585 bp, Artificial Sequence
  derived and/or modified sequence
atgtggctgccccagctggacctgatgagagtgatcagcgccaagagccagggctacagcatcgtgacccagatcaccggccccaccaccgtgaacggcctggagagaggcagcctgaccgtgcagtgcgtgtacagaagcggctgggagacctacctgaagtggtggtgcagaggcgccatctggagagactgcaagatcctggtgaagaccagcggcagcgagcaggaggtgaagagagacagagtgagcatcaaggacaaccagaagaacagaaccttcaccgtgaccatggaggacctgatgaagaccgacgccgacacctactggtgcggcatcgagaagaccggcaacgacctgggcgtgaccgtgcaggtgaccatcgaccccgcccccgtgacccaggaggagaccagcagcagccccaccctgaccggccaccacctggacaacagcagcagagacgtgcccagagccggcaccgccgcccccggcggcagacccctgctgtgcagacccgaccccgccgccggcagaaacctgcccgccaagggctaccacgaggccttcctgtgccccggctag

SEQ ID NO: 107742 - protein, 244 aa, Artificial Sequence
  derived and/or modified sequence
MPLLTLYLLLFWLSGYSIVTQITGPTTVNGLERGSLTVQCVYRSGWETYLKWWCRGAIWRDCKILVKTSGSEQEVKRDRVSIKDNQKNRTFTVTMEDLMKTDADTYWCGIEKTGNDLGVTVQVTIDPAPVTQEETSSSPTLTGHHLDNRSEGSQAANYRPAAHQAQAPEAQCPPAPHLHHIAAAFGGRLTLGLEDDEVPAESSRDVPRAGTAAPGGRPLLCRPDPAAGRNLPAKGYHEAFLCPG

SEQ ID NO: 107743 - DNA, 735 bp, Artificial Sequence
  derived and/or modified sequence
atgccccttctgacattgtacctgcttctcttttggctaagtggctattctatagtcactcagatcacgggcccaaccacagtcaatggcttagaacgcggctcactaacggtgcagtgcgtgtacaggtcgggttgggaaacctacttgaaatggtggtgccgaggagcaatatggagggattgcaagattctggttaagacctctggctctgaacaggaagtgaagagggacagggtctcaatcaaggacaatcaaaaaaatagaacctttacagttactatggaagaccttatgaaaacagacgcagatacatactggtgtggcatcgagaaaaccggtaacgacctcggtgtgactgtgcaggtgaccattgatcccgcccctgttacacaggaggagactagctcctcacctactctcacaggccatcacctagataatcgaagcgagggatcccaggctgccaattacagacctgccgcgcaccaggcacaggcacctgaggcacaatgcccacccgcccctcatctccaccatattgccgccgctttcggcggtaggctgaccctgggactggaggatgacgaagttccagccgagtccagtcgggatgtgcctagggccgggaccgcagcgcctggagggcgtcccctgctttgccggccagatccggccgctggaagaaatctgcccgcaaaaggctaccacgaggccttcctgtgtcctggttag

SEQ ID NO: 107744 - DNA, 735 bp, Artificial Sequence
  derived and/or modified sequence
atgcccctgctgaccctgtacctgctgctcttctggctgagcggctacagcatcgtgacccagatcaccggccccaccaccgtgaatggcctggagcggggcagcctgactgtgcagtgtgtgtaccgcagcggctgggagacctacctgaagtggtggtgccgcggggccatctggagggactgcaagatcctggtgaagaccagcggcagcgagcaggaggtgaagagggacagagtgtccatcaaggacaaccagaagaacagaaccttcaccgtgaccatggaggacctgatgaagacagatgctgacacctactggtgtggcatcgagaagacaggaaatgacctgggcgtgacagtgcaggtgaccattgatcctgcccctgtgacccaggaggagaccagcagcagccccaccctgaccggccaccacctggacaacagaagtgagggcagccaggccgccaactacagacctgctgcccaccaggcccaggcccctgaggcccagtgccccccagccccccacctgcaccacatcgctgctgcctttggaggccgcctgaccctgggcctggaggatgatgaggtgcctgctgagagcagcagagatgtgcccagggctggaacagctgcccctgggggccggcccctgctgtgcaggccagaccctgctgctggaagaaacctgcctgccaagggctaccacgaggccttcctgtgccctggatag

SEQ ID NO: 107745 - DNA, 735 bp, Artificial Sequence
  derived and/or modified sequence
atgcccctgctgaccctgtacctgctgctgttctggctgagcggctactcaatagtaacccaaattaccgggcccacaaccgtgaatgggctggagcgcggatcactgactgttcagtgcgtctatcggtctggttgggaaacctatctgaagtggtggtgccgcggagcgatctggagagactgcaagatattggtaaaaacctccggcagcgagcaagaagtgaagagagaccgggtctctataaaagacaaccagaaaaatcggactttcaccgtaactatggaagatttgatgaagaccgatgcggatacctattggtgtggcattgagaaaactggcaatgacctcggcgtgaccgtacaggttaccatagatcccgccccggtgacacaggaagaaacttcctctagtcccactctcaccgggcatcatctggacaacaggtcggaggggtcacaagctgccaattatcgcccagcggcccaccaagcgcaggctcctgaggcgcagtgtccaccagccccacacctacaccatatcgctgccgcattcggaggacgattgaccctggggttagaggatgacgaagtgcctgcggagtctagtcgcgatgtgccgcgtgctggaaccgcggctcctggagggaggcctctcctgtgccggcctgaccctgctgctggacgaaatctcccagccaagggttatcacgaggcattcctgtgccctgggtag

SEQ ID NO: 107746 - DNA, 735 bp, Artificial Sequence
  derived and/or modified sequence
atgccactcctcaccctctatctcttacttttctggctgtccggatactccatcgttactcagatcactgggccaaccacagtgaacgggctggaacggggttctcttactgtgcagtgcgtgtacagatcagggtgggagacgtaccttaagtggtggtgccgaggggcaatttggcgcgattgtaaaatactggttaaaaccagtggcagcgagcaggaggttaaacgtgatagagtgagtataaaagataaccagaaaaacaggacattcaccgtaacaatggaagacctgatgaagacggatgccgacacttattggtgcgggattgaaaaaacgggaaacgacctcggagtgactgtgcaggttacgatcgatcctgctccagtgactcaagaagagacatccagctcacccacccttactgggcaccatttggacaacaggtctgagggctctcaagctgcaaactaccggcctgcagcacatcaggcacaagcccctgaggcccagtgcccacccgctcctcatctacatcacatcgccgctgccttcggtggtagactgacccttggtttagaggacgacgaggtgccagcagagtcgtcacgagacgtgcccagggccggaactgctgcaccaggtggaaggcctctcctgtgtagacccgacccagccgctggaagaaatctgcctgcaaaaggctaccacgaagcattcttgtgccccggatag

SEQ ID NO: 107747 - DNA, 1805 bp, Artificial Sequence
  derived and/or modified sequence
aagttcaagggcgagagtgagtaccagcagaaggctgggagtctgtagtttgttcctgctgccaggctccactgaggggaacggggacctgtctgaagagaagatgcccctgctgacactctacctgctcctcttctggctctcaggctactccattgtcactcaaatcaccggtccaacaacagtgaatggcttggagcggggctccttgaccgtgcagtgtgtttacagatcaggctgggagacctacttgaagtggtggtgtcgaggagctatttggcgtgactgcaagatccttgttaaaaccagtgggtcagagcaggaggtgaagagggaccgggtgtccatcaaggacaatcagaaaaaccgcacgttcactgtgaccatggaggatctcatgaaaactgatgctgacacttactggtgtggaattgagaaaactggaaatgaccttggggtcacagttcaagtgaccattgacccagcaccagtcacccaagaagaaactagcagctccccaactctgaccggccaccacttggacaacaggagtgagggttcccaggctgcaaactacagacctgcagctcatcaggcacaagctcctgaagctcagtgtcctcctgcccctcatcttcaccatattgctgctgcttttggtggccgcctcactcttggcttggaggatgatgaagtaccagcagaaagcagccgggatgtccccagagcaggtactgcagcccctggagggcgacctctgctatgcagacctgaccctgcagctggccggaacctccccgcaaaaggctaccacgaagctttcctctgcccaggttgaccaggtggaagtggaatatgtcaccatggcttccttgccgaaggaggacatttcctatgcatctctgaccttgggtgctgaggatcaggaaccgacctactgcaacatgggccacctcagtagccacctccccggcaggggccctgaggagcccacggaatacagcaccatcagcaggccttagcctgcactccaggctccttcttggaccccaggctgtgagcacactcctgcctcatcgaccgtctgccccctgctcccctcatcaggaccaacccggggactggtgcctctgcctgatcagccagcattgcccctagctctgggttgggcttggggccaagtctcagggggcttctaggagttggggttttctaaacgtcccctcctctcctacatagttgaggagggggctagggatatgctctggggctttcatgggaatgatgaagatgataatgagaaaaatgttatcattattatcatgaagtaccattatcgtaatacaatgaacctttatttattgcctaccacatgttatgggctgaataatggcccccaaagatatctgtgtcctaatcctcagaacctgtgactgttaccttctgtggcagaaagggacagtgcagatgtatgtaagttaaggactttgagatagagaggttattcttgctgattcaggtgggcccaaaatatcaccacaagggtcctcataagaaagaggccagaaggtcaaagaggtagagacaaagtgatgatggaagtggacgtgggtgtgacgtgagcaggggccatgaatgccgcagccttcagatgccagaaagggaaaggaatggattcccctgcctggagcctccaaaagaaaccagccctgcccacgccttgacttgagcccattgaaactgatcttgagctcctggcctccagaattgcaggagaataaatttgtgttgtttttaatgagcca

SEQ ID NO: 107748 - DNA, 735 bp, Artificial Sequence
  derived and/or modified sequence
atgcccctgctgaccctgtacctgctgctgttctggctgagcggctacagcatcgtgacccagatcaccggccccaccaccgtgaacggcctggagagaggcagcctgaccgtgcagtgcgtgtacagaagcggctgggagacctacctgaagtggtggtgcagaggcgccatctggagagactgcaagatcctggtgaagaccagcggcagcgagcaggaggtgaagagagacagagtgagcatcaaggacaaccagaagaacagaaccttcaccgtgaccatggaggacctgatgaagaccgacgccgacacctactggtgcggcatcgagaagaccggcaacgacctgggcgtgaccgtgcaggtgaccatcgaccccgcccccgtgacccaggaggagaccagcagcagccccaccctgaccggccaccacctggacaacagaagcgagggcagccaggccgccaactacagacccgccgcccaccaggcccaggcccccgaggcccagtgcccccccgccccccacctgcaccacatcgccgccgccttcggcggcagactgaccctgggcctggaggacgacgaggtgcccgccgagagcagcagagacgtgcccagagccggcaccgccgcccccggcggcagacccctgctgtgcagacccgaccccgccgccggcagaaacctgcccgccaagggctaccacgaggccttcctgtgccccggctag

SEQ ID NO: 107749 - DNA, 1552 bp, Artificial Sequence
  derived and/or modified sequence
atgtggctgcctcagctcgacctcatgagggtcatcagtgctaagagtcaaggctactccattgtcactcaaatcaccggtccaacaacagtgaatggcttggagcggggctccttgaccgtgcagtgtgtttacagatcaggctgggagacctacttgaagtggtggtgtcgaggagctatttggcgtgactgcaagatccttgttaaaaccagtgggtcagagcaggaggtgaagagggaccgggtgtccatcaaggacaatcagaaaaaccgcacgttcactgtgaccatggaggatctcatgaaaactgatgctgacacttactggtgtggaattgagaaaactggaaatgaccttggggtcacagttcaagtgaccattgacccagcaccagtcacccaagaagaaactagcagctccccaactctgaccggccaccacttggacaacagcagccgggatgtccccagagcaggtactgcagcccctggagggcgacctctgctatgcagacctgaccctgcagctggccggaacctccccgcaaaaggctaccacgaagctttcctctgcccaggttgaccaggtggaagtggaatatgtcaccatggcttccttgccgaaggaggacatttcctatgcatctctgaccttgggtgctgaggatcaggaaccgacctactgcaacatgggccacctcagtagccacctccccggcaggggccctgaggagcccacggaatacagcaccatcagcaggccttagcctgcactccaggctccttcttggaccccaggctgtgagcacactcctgcctcatcgaccgtctgccccctgctcccctcatcaggaccaacccggggactggtgcctctgcctgatcagccagcattgcccctagctctgggttgggcttggggccaagtctcagggggcttctaggagttggggttttctaaacgtcccctcctctcctacatagttgaggagggggctagggatatgctctggggctttcatgggaatgatgaagatgataatgagaaaaatgttatcattattatcatgaagtaccattatcgtaatacaatgaacctttatttattgcctaccacatgttatgggctgaataatggcccccaaagatatctgtgtcctaatcctcagaacctgtgactgttaccttctgtggcagaaagggacagtgcagatgtatgtaagttaaggactttgagatagagaggttattcttgctgattcaggtgggcccaaaatatcaccacaagggtcctcataagaaagaggccagaaggtcaaagaggtagagacaaagtgatgatggaagtggacgtgggtgtgacgtgagcaggggccatgaatgccgcagccttcagatgccagaaagggaaaggaatggattcccctgcctggagcctccaaaagaaaccagccctgcccacgccttgacttgagcccattgaaactgatcttgagctcctggcctccagaattgcaggagaataaatttgtgttgtttttaatgagcca

SEQ ID NO: 107750 - protein, 239 aa, Artificial Sequence
  derived and/or modified sequence
MWLPQLDLMRVISAKSQGYSIVTQITGPTTVNGLERGSLTVQCVYRSGWETYLKWWCRGAIWRDCKILVKTSGSEQEVKRDRVSIKDNQKNRTFTVTMEDLMKTDADTYWCGIEKTGNDLGVTVQVTIDPASTPAPTTPTSTTFTAPVTQEETSSSPTLTGHHLDNRHKLLKLSVLLPLIFTILLLLLVAASLLAWRMMKYQQKGTAAPGGRPLLCRPDPAAGRNLPAKGYHEAFLCPG

SEQ ID NO: 107751 - DNA, 720 bp, Artificial Sequence
  derived and/or modified sequence
atgtggctccctcagttggacctgatgagagtgatatcggctaaaagccaggggtactctatcgtgactcagattacagggccgacaacggttaacggacttgaacggggatctctaaccgttcagtgcgtttatcggtctggatgggagacctacttaaagtggtggtgtaggggagcaatttggcgtgattgcaagattctcgtgaagacttccgggagtgagcaggaggtgaaacgggatagggtgagcatcaaagataatcaaaagaacagaacatttaccgtgaccatggaagatctcatgaagactgatgctgacacttactggtgtgggatcgaaaagactggaaatgatctcggagtgaccgttcaggtcactatcgaccccgcctccactcccgcccccactacccccacatccacaacctttacggctccagtaactcaggaggagacttcttcttcccctaccctcacgggccatcacctcgacaatagacataagcttctgaaacttagtgtcctcttgcccctgattttcaccatactgctgttgctgcttgtggctgcctccttactggcgtggcggatgatgaaataccagcagaagggaactgcggccccaggtgggaggccattgttatgtagaccggacccagccgcaggccggaacctgcctgcaaaggggtaccatgaggcatttctgtgcccaggatag

SEQ ID NO: 107752 - DNA, 720 bp, Artificial Sequence
  derived and/or modified sequence
atgtggctgccccagctggacctgatgagggtcatcagcgccaagagccagggctacagcatcgtgacccagatcaccggccccaccaccgtgaatggcctggagcggggcagcctgactgtgcagtgtgtgtacagaagtggctgggagacctacctgaagtggtggtgccgcggggccatctggagggactgcaagatcctggtgaagaccagcggcagcgagcaggaggtgaagagggacagagtgtccatcaaggacaaccagaagaacagaaccttcaccgtgaccatggaggacctgatgaagacagatgctgacacctactggtgtggcatcgagaagacaggaaatgacctgggcgtgacagtgcaggtgaccatcgaccctgccagcaccccagcccccaccacccccaccagcaccaccttcaccgcccctgtgacccaggaggagaccagcagcagccccaccctgaccggccaccacctggacaacagacacaagctgctgaagctgtctgtgctgctgcccctcatcttcaccatcctgctgctgctgctggtggccgccagcctgctggcctggaggatgatgaagtaccagcagaagggcacagctgcccctgggggccggcccctgctgtgcaggccagaccctgctgctggcaggaacctgcctgccaagggctaccacgaggccttcctgtgccccggctag

SEQ ID NO: 107753 - DNA, 720 bp, Artificial Sequence
  derived and/or modified sequence
atgtggctgccccagctggacctgatgcgggtgatcagcgccaagtctcagggctattcgatagtgacacagattaccggccctactacagtgaacggtctggaacggggatccctgaccgtacagtgtgtgtaccgatctggctgggagacctatctgaagtggtggtgcaggggagccatatggagggactgcaagattctcgttaaaacatccggctccgagcaagaggtcaaaagggaccgcgtgagtattaaagataatcaaaagaaccgcaccttcactgtgacaatggaagacctcatgaagacggacgctgacacctactggtgcggtattgaaaaaaccgggaatgatctcggggtcacggtgcaagtcaccatcgaccctgcaagcactccagcccccacgacacctaccagcacaactttcacggcccccgttacgcaggaagagacctcaagcagtcctacgctgacagggcaccatcttgacaatcgtcataagctcctgaagctgtcagttctgctccctctgattttcacaatccttctgttgctgctggtggcagcctccctgctggcgtggaggatgatgaaataccaacagaagggaacagccgcaccaggcgggcgacctctgctctgccgaccagatccagcagcagggaggaacttgccagccaaaggatatcatgaggcctttctgtgccctggttag

SEQ ID NO: 107754 - DNA, 720 bp, Artificial Sequence
  derived and/or modified sequence
atgtggttgccgcaattagacctcatgagggtgatttcagcaaaatcacaggggtacagtatagtgacacagatcaccggccctaccacagtcaatggcctagagcgagggagcctcactgtgcaatgtgtatacagaagcggatgggaaacttacctcaaatggtggtgtaggggggcaatttggagagattgcaaaattctggtaaagacttccggcagcgagcaggaggtgaagagggaccgtgtatctatcaaagacaatcagaagaatcggaccttcactgtgactatggaggacctgatgaaaaccgacgctgatacgtattggtgcgggatcgagaaaaccggtaatgatctgggagtgacggtccaggttacaatcgatccagcaagcactcccgctccaaccactccaacctccacaacttttaccgcaccggttactcaagaggagacaagctcttcacctacgctgaccggacatcacctggacaatagacacaaattgctgaaattatctgttctgctgcccctaatctttacaatcctgttgttgctccttgtagccgcatcattgctggcatggcggatgatgaagtaccagcagaaaggcacggccgcacccggtggacgccctctcctctgtcgccctgaccctgctgccggacggaatctcccggcaaaaggttaccacgaggctttcctttgtccaggttag

SEQ ID NO: 107755 - DNA, 720 bp, Artificial Sequence
  derived and/or modified sequence
atgtggctgccccagctggacctgatgagagtgatcagcgccaagagccagggctacagcatcgtgacccagatcaccggccccaccaccgtgaacggcctggagagaggcagcctgaccgtgcagtgcgtgtacagaagcggctgggagacctacctgaagtggtggtgcagaggcgccatctggagagactgcaagatcctggtgaagaccagcggcagcgagcaggaggtgaagagagacagagtgagcatcaaggacaaccagaagaacagaaccttcaccgtgaccatggaggacctgatgaagaccgacgccgacacctactggtgcggcatcgagaagaccggcaacgacctgggcgtgaccgtgcaggtgaccatcgaccccgccagcacccccgcccccaccacccccaccagcaccaccttcaccgcccccgtgacccaggaggagaccagcagcagccccaccctgaccggccaccacctggacaacagacacaagctgctgaagctgagcgtgctgctgcccctgatcttcaccatcctgctgctgctgctggtggccgccagcctgctggcctggagaatgatgaagtaccagcagaagggcaccgccgcccccggcggcagacccctgctgtgcagacccgaccccgccgccggcagaaacctgcccgccaagggctaccacgaggccttcctgtgccccggctag

SEQ ID NO: 107756 - protein, 435 aa, Artificial Sequence
  derived and/or modified sequence
MAERAALEELVKLQGERVRGLKQQKASAELIEEEVAKLLKLKAQLGPDESKQKFVLKTPKGTRDYSPRQMAVREKVFDVIIRCFKRHGAEVIDTPVFELKDFDIAGNFDPMIPDAECLKIMCEILSSLQIGDFLVKVNDRRILDGMFAICGVSDSKFRTICSSVDKLDKVSWEEVKNEMVGEKGLAPEVADRIGDYVQQHGGVSLVEQLLQDPKLSQNKQALEGLGDLKLLFEYLTLFGIDDKISFDLSLARGLDYYTGVIYEAVLLQTPAQAGEEPLGVGSVAAGGRYDGLVGMFDPKGRKVPCVGLSIGVERIFSIVEQRLEALEEKIRTTETQVLVASAQKKLLEERLKLVSELWDAGIKAELLYKKNPKLLNQLQYCEEAGIPLVAIIGEQELKDGVIKLRSVTSREEVDVRREDLVEEIKRRTGQPLCIC

SEQ ID NO: 107757 - protein, 288 aa, Artificial Sequence
  derived and/or modified sequence
MAERAALEELVKLQGERVRGLKQQKASAELIEEEVAKLLKLKAQLGPDESKQKFVLKTPKGTRDYSPRQMAVREKVFDVIIRCFKRHGAEVIDTPVFELKVNDRRILDGMFAICGVSDSKFRTICSSVDKLDKVSWEEVKNEMVGEKGLAPEVADRIGDYVQQHGGVSLVEQLLQDPKLSQNKQALEGLGDLKLLFEYLTLFGIDDKISFDLSLARGLDYYTGVIYEAVLLQTPAQAGEEPLGVGSVAAGGRYDGLVGMFDPKGRKVPCVGLSIGVERIFSIVEQRLE

SEQ ID NO: 107758 - DNA, 1308 bp, Artificial Sequence
  derived and/or modified sequence
atggctgaacgcgcagcacttgaagaactggtgaagctgcagggtgaaagggttaggggtctaaagcagcaaaaggcaagtgccgaacttatcgaggaagaagttgcaaagcttctgaagttgaaagcacagcttgggcctgatgagtccaaacagaaatttgtgcttaagacgcccaagggaacacgcgattattccccaagacagatggccgtccgagagaaggtgttcgacgtgatcattagatgtttcaaaaggcacggcgccgaagttatcgatacgcccgtgttcgagctgaaggatttcgacatcgccggtaactttgatcccatgataccagatgctgagtgcctgaaaatcatgtgcgagatcctgtcctcactgcagatcggcgattttctggttaaagtcaatgatcgcaggatacttgacgggatgttcgccatttgcggcgtgtctgattctaagtttcgtactatctgctcttccgtggataagttggacaaagtgtcttgggaggaggtgaaaaacgagatggttggggagaaagggctggcacctgaagtagcggacaggataggcgactacgttcagcagcacggcggcgtgtccttggtggagcagctgctgcaggacccgaagctgagccagaataagcaggccctggagggattgggggatttgaaactgttatttgagtatctcactttattcggaatcgacgataagatcagttttgacctttctctggcccgtggactggattactacaccggagtaatttacgaggccgtactgctgcaaacacctgcccaggccggggaagagcccttgggggtcgggagtgtggctgccggcgggcggtacgatggccttgtcggcatgtttgacccaaagggtagaaaagtgccttgcgtgggtctgtccatcggggtagagcgtattttctcgatagtcgagcagaggttggaggccctagaggaaaagatacgaacaaccgagacccaagtgctggtggcttccgctcagaaaaaactgctggaggaacgtcttaagcttgtcagtgagttatgggatgccggaattaaggctgagctgctctataagaagaatccaaaactactgaatcaattgcagtattgtgaagaagccgggatcccactggttgccatcatcggggagcaagagctcaaagacggagttatcaagctgaggagcgtgacctctcgcgaggaggtggacgttcggcgagaggacttggtggaagaaatcaagcgtcggactggacagcccctttgtatttgctag

SEQ ID NO: 107759 - DNA, 867 bp, Artificial Sequence
  derived and/or modified sequence
atggctgaacgcgccgctctagaggagctggtcaaacttcaaggtgagcgcgttaggggactgaagcagcaaaaagcatcagcggagctaattgaagaggaagtggcaaagctgctgaaactcaaggctcagctcggtcccgatgaatctaagcagaaatttgtgctgaaaacaccgaagggcactagggattattcccccaggcaaatggcggtgagggagaaggtattcgatgtcattatccgctgcttcaagcgtcatggggctgaagtcatcgataccccagttttcgagctgaaggtcaacgaccgcagaattctggatggaatgttcgctatctgtggggtgagtgatagcaaattccgaacaatatgctcgagcgttgataaactggataaagtgtcttgggaggaagtgaaaaatgagatggtgggggagaagggcctggcccccgaggtagcagataggattggagattacgtacagcagcacggcggagtgagcctggtagagcagcttctgcaggatcctaagctctctcagaataagcaagccctggaggggcttggcgaccttaaactgctttttgaatacctaaccctgtttggcattgacgacaagatctcttttgacctaagcctggcacgaggcttggactattacacaggcgtgatttatgaagccgtcctgcttcaaacgcctgcccaagcgggggaggagccacttggcgtgggttccgtcgccgctggcggtcgatacgacggcctggtcggtatgttcgacccaaagggaagaaaagtgccgtgcgtgggcctgtccatcggcgtagaacggatcttctctatcgtggagcagcgcctggaatag

SEQ ID NO: 107760 - DNA, 1401 bp, Artificial Sequence
  derived and/or modified sequence
aggtcgagacagcaggcggctcaagtggacagccgggatggcagagcgtgcggcgctggaggagctggtgaaacttcagggagagcgcgtgcgaggcctcaagcagcagaaggccagcgccgagctgatcgaggaggaggtggcgaaactcctgaaactgaaggcacagctgggtcctgatgaaagcaaacagaaatttgtgctcaaaacccccaagggcacaagagactatagtccccggcagatggcagttcgcgagaaggtgtttgacgtaatcatccgttgcttcaagcgccacggtgcagaagtcattgatacacctgtatttgaactaaaggattttgacattgctgggaactttgatcccatgatccctgatgcagagtgcctgaagatcatgtgcgagatcctgagttcacttcagataggcgacttcctggtcaaggtaaacgatcgacgcattctagatgggatgtttgctatctgtggtgtttctgacagcaagttccgtaccatctgctcctcagtagacaagctggacaaggtgtcctgggaagaggtgaagaatgagatggtgggagagaagggccttgcacctgaggtggctgaccgcattggggactatgtccagcaacatggtggggtatccctggtggaacagctgctccaggatcctaaactatcccaaaacaagcaggccttggagggcctgggagacctgaagttgctctttgagtacctgaccctatttggcattgatgacaaaatctcctttgacctgagccttgctcgagggctggattactacactggggtgatctatgaggcagtgctgctacagaccccagcccaggcaggggaagagcccctgggtgtgggcagtgtggctgctggaggacgctatgatgggctagtgggcatgttcgaccccaaagggcgcaaggtgccatgtgtggggctcagcattggggtggagcggattttctccatcgtggaacagagactagaggctttggaggagaagatacggaccacggagacacaggtgcttgtggcatctgcacagaagaagctgctagaggaaagactaaagcttgtctcagaactgtgggatgctgggatcaaggctgagctgctgtacaagaagaacccaaagctactgaaccagttacagtactgtgaggaggcaggcatcccactggtggctatcatcggcgagcaggaactcaaggatggggtcatcaagctccgttcagtgacgagcagggaagaggtggatgtccgaagagaagaccttgtggaggaaatcaaaaggagaacaggccagcccctctgcatctgctgaactgaacaaactatcagaggaaaggaagtgggactggcactatttgaggttaagac

SEQ ID NO: 107761 - DNA, 950 bp, Artificial Sequence
  derived and/or modified sequence
gactcgatagccggaagtcatccttgctgaggctggggcaaccaccgcaggtcgagacagcaggcggctcaagtggacagccgggatggcagagcgtgcggcgctggaggagctggtgaaacttcagggagagcgcgtgcgaggcctcaagcagcagaaggccagcgccgagctgatcgaggaggaggtggcgaaactcctgaaactgaaggcacagctgggtcctgatgaaagcaaacagaaatttgtgctcaaaacccccaagggcacaagagactatagtccccggcagatggcagttcgcgagaaggtgtttgacgtaatcatccgttgcttcaagcgccacggtgcagaagtcattgatacacctgtatttgaactaaaggtaaacgatcgacgcattctagatgggatgtttgctatctgtggtgtttctgacagcaagttccgtaccatctgctcctcagtagacaagctggacaaggtgtcctgggaagaggtgaagaatgagatggtgggagagaagggccttgcacctgaggtggctgaccgcattggggactatgtccagcaacatggtggggtatccctggtggaacagctgctccaggatcctaaactatcccaaaacaagcaggccttggagggcctgggagacctgaagttgctctttgagtacctgaccctatttggcattgatgacaaaatctcctttgacctgagccttgctcgagggctggattactacactggggtgatctatgaggcagtgctgctacagaccccagcccaggcaggggaagagcccctgggtgtgggcagtgtggctgctggaggacgctatgatgggctagtgggcatgttcgaccccaaagggcgcaaggtgccatgtgtggggctcagcattggggtggagcggattttctccatcgtggaacagagactagagg

SEQ ID NO: 107762 - DNA, 1308 bp, Artificial Sequence
  derived and/or modified sequence
atggccgagagagctgccctggaggagctggtgaagctgcagggcgagcgggtgcggggcctgaagcagcagaaggccagcgctgagctgattgaggaggaggtggccaagctgctgaagctgaaggcccagctgggcccagatgagagcaagcagaagtttgtgctgaagacccccaagggcacccgggactacagcccccggcagatggctgtgcgggagaaggtgtttgatgtgatcatccgctgcttcaagagacatggagctgaggtgattgacacccctgtgtttgagctgaaggactttgatattgctggcaactttgaccccatgatcccagatgctgagtgcctgaagatcatgtgtgagatcctgagcagcctgcagatcggggacttcctggtgaaggtgaatgaccggcgcatcctggatggcatgtttgccatctgtggggtgtctgacagcaagttccgcaccatctgcagctctgtggacaagctggacaaggtgtcctgggaggaggtgaagaatgagatggtgggggagaagggcctggcccctgaggtggccgacagaattggagactatgtgcagcagcacggcggcgtgtccctggtggagcagctgctgcaggaccccaagctgagccagaacaagcaggccctggagggcctgggggacctgaagctgctgtttgagtacctgaccctgtttggaattgatgacaagatcagctttgacctgagcctggcccggggcctggactactacacaggagtcatctatgaggccgtgctgctgcagaccccagcccaggccggggaggagcccctgggcgtgggctctgtggccgccggcggccgctatgatggcctggtgggcatgtttgaccccaagggcaggaaggtgccctgtgtgggcctgagcattggagtggagcgcatcttcagcatcgtggagcagaggctggaggccctggaggagaagatccgcaccacagagacccaggtgctggtggccagcgcccagaagaagctgctggaggagcggctgaagctggtgtctgagctgtgggatgctggcatcaaggccgagctgctgtacaagaagaaccccaagctgctgaaccagctgcagtactgtgaggaggccggcatccccctggtggccatcatcggggagcaggagctgaaggatggagtcatcaagctgcggtctgtgaccagccgggaggaggtggatgtgcggcgggaggacctggtggaggagatcaagagaagaacaggccagcccctgtgcatctgctag

SEQ ID NO: 107763 - DNA, 867 bp, Artificial Sequence
  derived and/or modified sequence
atggccgagagagctgccctggaggagctggtgaagctgcagggcgagcgggtgcggggcctgaagcagcagaaggccagcgctgagctgattgaggaggaggtggccaagctgctgaagctgaaggcccagctgggcccagatgagagcaagcagaagtttgtgctgaagacccccaagggcacccgggactacagcccccggcagatggctgtgcgggagaaggtgtttgatgtgatcatccgctgcttcaagagacatggagctgaggtgattgacacccctgtgtttgagctgaaggtgaatgaccggcgcatcctggatggcatgtttgccatctgtggggtgtctgacagcaagttccgcaccatctgcagctctgtggacaagctggacaaggtgtcctgggaggaggtgaagaatgagatggtgggggagaagggcctggcccctgaggtggccgacagaattggagactatgtgcagcagcacggcggcgtgtccctggtggagcagctgctgcaggaccccaagctgagccagaacaagcaggccctggagggcctgggggacctgaagctgctgtttgagtacctgaccctgtttggaattgatgacaagatcagctttgacctgagcctggcccggggcctggactactacacaggagtcatctatgaggccgtgctgctgcagaccccagcccaggccggggaggagcccctgggcgtgggctctgtggccgccggcggccgctatgatggcctggtgggcatgtttgaccccaagggcaggaaggtgccctgtgtgggcctgagcattggagtggagcgcatcttcagcatcgtggagcagaggctggagtag

SEQ ID NO: 107764 - DNA, 1308 bp, Artificial Sequence
  derived and/or modified sequence
atggccgagcgggccgccctggaggagctggtgaagctgcagggcgagcgcgttcgcgggctcaaacagcagaaggcctccgccgagctgatcgaggaagaggtggcaaagctgctcaagctgaaggcccagctcggacccgacgagtcaaaacaaaagtttgtattgaagactcctaagggaactagagactatagtcctaggcagatggccgttcgagagaaagtgttcgacgtgatcatcaggtgttttaagcgccatggcgctgaggtgattgacactcccgtttttgagttaaaggacttcgatattgccgggaactttgatcctatgattcccgacgcggagtgcctaaagatcatgtgcgagatactgtcgagcttgcagatcggcgactttctggtgaaagtgaatgatagaaggatcctcgatggcatgttcgcgatctgcggcgtctccgatagcaagttcagaaccatttgctcctctgtagataagcttgataaagtgtcctgggaagaagttaagaacgaaatggtcggagaaaaggggttagccccagaagtcgccgacagaatcggagattatgttcagcagcacggcggcgttagcctcgtggaacagttgctgcaggaccctaaattgtcccagaacaagcaggccttggaaggattgggagatttgaagctcttgttcgaatacctgacccttttcggaattgatgacaaaatttcttttgacttatccctggctcgcgggctggactattacacaggagttatctatgaagctgtgctcttgcagactcccgcgcaggcaggagaagaacccctcggcgtcggatctgtggccgccggaggacgctatgacgggctcgttggtatgtttgatcccaaaggtcgaaaagtgccctgcgtgggcctgagcatcggagtggaacgtatctttagcattgtggagcagcgcttggaagctttggaagagaagatccggaccactgaaacccaggttctggtcgcttctgcccagaaaaagcttcttgaagagaggctgaaattggtgagcgagttgtgggacgcgggtataaaggcagagctgctatacaaaaaaaacccaaagttgctgaaccagctgcaatactgcgaagaagctggaattcccctcgttgcaatcattggggagcaggagctgaaagatggcgtaattaaactcagatctgtgacttcccgagaagaggtggatgtcagacgcgaagacctcgttgaagaaatcaagcggagaaccggacagcctctatgtatctgttag

SEQ ID NO: 107765 - DNA, 867 bp, Artificial Sequence
  derived and/or modified sequence
atggccgagcgggccgccctggaggagctggtgaagctgcagggcgagagggtcaggggcctgaagcagcagaaggcttcagcagagttgatcgaagaagaagtggcaaagctgttaaagcttaaggcgcaactggggcccgacgagtctaaacagaagtttgttctgaagacccccaaaggtactcgtgattactctccccgccagatggccgtccgggagaaagtcttcgacgtgattatccgctgttttaagcgccacggcgccgaagtaatcgacaccccagtcttcgagttgaaagtgaatgatcggcggatcctcgacggaatgttcgctatctgtggagtctccgattctaagtttcggacgatatgttccagtgtcgacaagctcgataaggtttcttgggaggaagttaaaaacgaaatggtgggggaaaaggggctggcaccagaagtggccgaccgcatcggcgactatgttcaacagcacgggggtgtgagcctggtggagcaactcctgcaggatcccaagctctctcaaaataagcaggctctggagggtctgggcgacctgaagctgctgtttgagtatttgaccctctttggcattgacgataagatctctttcgacctttctctagctagggggctcgactattatactggcgtaatctacgaggccgtcttgctgcagacccctgcccaggccggggaagagcccctcggcgtgggcagcgtggcagcaggcggcaggtatgacgggctcgtcggaatgttcgaccctaaaggccgaaaagtgccctgtgtggggcttagcatcggggtagagaggattttctccatcgtcgagcagcgattggagtag

SEQ ID NO: 107766 - DNA, 1308 bp, Artificial Sequence
  derived and/or modified sequence
atggcagagagagccgctctagaggagctggtgaaactgcagggggaaagagtccggggactgaaacagcagaaggccagtgccgagctcatagaagaggaagttgctaagctgttaaaactaaaagctcagctggggcctgatgaatctaagcaaaagttcgtgctaaaaacccccaagggcaccagagactacagcccacggcaaatggcagtacgggaaaaggtgttcgacgttatcatcagatgttttaaacgccacggggctgaggtgatcgacacgccagtgttcgagctcaaagacttcgacatcgctggtaatttcgaccccatgattcccgacgccgaatgccttaaaattatgtgcgaaattctttcaagcctccagatcggcgacttcttggtgaaggtgaatgatcgacgaattttagatgggatgttcgccatatgcggggtgagcgactccaaatttcgtacaatctgctcttccgtcgacaagttagataaggtgtcatgggaggaagtcaaaaacgagatggtgggtgaaaagggactggccccagaggtggccgaccggatcggggactacgtccaacagcacgggggagtcagtctagttgaacagcttctgcaggaccccaagttgtctcagaacaagcaagccctggaggggctgggggatcttaagctcctgtttgagtacttaacactcttcggcatagatgacaaaatttctttcgacctgagcctggcgagggggctcgactactacactggcgtcatttacgaggctgtgctgttgcagaccccagctcaagcaggcgaggagccgttgggcgtaggttcagtggccgcaggtggcaggtatgatgggctggtcggcatgtttgacccaaaaggcaggaaagtaccatgcgtaggcctgagcataggtgtcgaaagaatattcagcattgtggaacaacgcctggaggcccttgaggagaagataaggactactgagacacaggtgctcgtggctagtgcacagaagaaactcctagaggagcgcctgaaactggtctcggaactgtgggatgcaggcatcaaagccgaacttctgtacaagaaaaaccccaaactgctgaaccagttgcagtactgcgaagaagccggtattccactggtggcaatcataggggagcaagaactgaaagatggggtaatcaagctgcggtctgttaccagccgcgaggaggtcgacgttcgcagggaagatctcgttgaggaaattaagcggagaacaggtcagcctctctgcatttgctag

SEQ ID NO: 107767 - DNA, 867 bp, Artificial Sequence
  derived and/or modified sequence
atggcagaaagggccgcactagaggaactggtcaagctgcagggtgagagggtccggggactgaaacagcagaaagcttctgccgagctgatagaagaggaggtcgcaaaactgttgaagctaaaggcccaactgggacctgacgagtccaagcagaagtttgtgcttaagacccccaagggcacacgggactacagcccaaggcagatggcggtcagagaaaaggttttcgacgttatcattcggtgttttaagcggcacggtgctgaagtaatcgatacccccgttttcgaattgaaggtgaacgacaggcgcatccttgacggcatgttcgccatctgcggcgtgagcgatagcaaatttcgcactatatgttccagtgtggataaattggataaggtgtcttgggaagaagtgaaaaatgaaatggtgggggaaaagggactcgctccagaggtggctgatagaatcggagactatgtgcagcaacacggaggagtgtcgctcgtggaacagctcctgcaggaccccaaactgtcacagaacaagcaagcattagaagggctcggggatcttaagctacttttcgagtatctgaccctgttcgggatcgatgataagatctcctttgatctgagcctggccagaggtctagactattatactggcgtaatctacgaggccgtccttcttcaaacacctgcccaggctggggaagaacccctcggtgtgggcagcgttgccgctgggggacgctatgacggcctggtcggcatgttcgatccaaaagggagaaaagtgccatgcgtcggcctctccatcggggttgagcgaatcttcagcatcgtggaacagcgattagagtag

SEQ ID NO: 107768 - DNA, 1308 bp, Artificial Sequence
  derived and/or modified sequence
atggccgagagagccgccctggaggagctggtgaagctgcagggcgagagagtgagaggcctgaagcagcagaaggccagcgccgagctgatcgaggaggaggtggccaagctgctgaagctgaaggcccagctgggccccgacgagagcaagcagaagttcgtgctgaagacccccaagggcaccagagactacagccccagacagatggccgtgagagagaaggtgttcgacgtgatcatcagatgcttcaagagacacggcgccgaggtgatcgacacccccgtgttcgagctgaaggacttcgacatcgccggcaacttcgaccccatgatccccgacgccgagtgcctgaagatcatgtgcgagatcctgagcagcctgcagatcggcgacttcctggtgaaggtgaacgacagaagaatcctggacggcatgttcgccatctgcggcgtgagcgacagcaagttcagaaccatctgcagcagcgtggacaagctggacaaggtgagctgggaggaggtgaagaacgagatggtgggcgagaagggcctggcccccgaggtggccgacagaatcggcgactacgtgcagcagcacggcggcgtgagcctggtggagcagctgctgcaggaccccaagctgagccagaacaagcaggccctggagggcctgggcgacctgaagctgctgttcgagtacctgaccctgttcggcatcgacgacaagatcagcttcgacctgagcctggccagaggcctggactactacaccggcgtgatctacgaggccgtgctgctgcagacccccgcccaggccggcgaggagcccctgggcgtgggcagcgtggccgccggcggcagatacgacggcctggtgggcatgttcgaccccaagggcagaaaggtgccctgcgtgggcctgagcatcggcgtggagagaatcttcagcatcgtggagcagagactggaggccctggaggagaagatcagaaccaccgagacccaggtgctggtggccagcgcccagaagaagctgctggaggagagactgaagctggtgagcgagctgtgggacgccggcatcaaggccgagctgctgtacaagaagaaccccaagctgctgaaccagctgcagtactgcgaggaggccggcatccccctggtggccatcatcggcgagcaggagctgaaggacggcgtgatcaagctgagaagcgtgaccagcagagaggaggtggacgtgagaagagaggacctggtggaggagatcaagagaagaaccggccagcccctgtgcatctgctag

SEQ ID NO: 107769 - DNA, 867 bp, Artificial Sequence
  derived and/or modified sequence
atggccgagagagccgccctggaggagctggtgaagctgcagggcgagagagtgagaggcctgaagcagcagaaggccagcgccgagctgatcgaggaggaggtggccaagctgctgaagctgaaggcccagctgggccccgacgagagcaagcagaagttcgtgctgaagacccccaagggcaccagagactacagccccagacagatggccgtgagagagaaggtgttcgacgtgatcatcagatgcttcaagagacacggcgccgaggtgatcgacacccccgtgttcgagctgaaggtgaacgacagaagaatcctggacggcatgttcgccatctgcggcgtgagcgacagcaagttcagaaccatctgcagcagcgtggacaagctggacaaggtgagctgggaggaggtgaagaacgagatggtgggcgagaagggcctggcccccgaggtggccgacagaatcggcgactacgtgcagcagcacggcggcgtgagcctggtggagcagctgctgcaggaccccaagctgagccagaacaagcaggccctggagggcctgggcgacctgaagctgctgttcgagtacctgaccctgttcggcatcgacgacaagatcagcttcgacctgagcctggccagaggcctggactactacaccggcgtgatctacgaggccgtgctgctgcagacccccgcccaggccggcgaggagcccctgggcgtgggcagcgtggccgccggcggcagatacgacggcctggtgggcatgttcgaccccaagggcagaaaggtgccctgcgtgggcctgagcatcggcgtggagagaatcttcagcatcgtggagcagagactggagtag

SEQ ID NO: 107770 - protein, 395 aa, Artificial Sequence
  derived and/or modified sequence
MAERAALEELVKLQGERVRGLKQQKASAELIEEEVAKLLKLKAQLGPDESKQKFVLKTPKDFDIAGNFDPMIPDAECLKIMCEILSSLQIGDFLVKVNDRRILDGMFAICGVSDSKFRTICSSVDKLDKVSWEEVKNEMVGEKGLAPEVADRIGDYVQQHGGVSLVEQLLQDPKLSQNKQALEGLGDLKLLFEYLTLFGIDDKISFDLSLARGLDYYTGVIYEAVLLQTPAQAGEEPLGVGSVAAGGRYDGLVGMFDPKGRKVPCVGLSIGVERIFSIVEQRLEALEEKIRTTETQVLVASAQKKLLEERLKLVSELWDAGIKAELLYKKNPKLLNQLQYCEEAGIPLVAIIGEQELKDGVIKLRSVTSREEVDVRREDLVEEIKRRTGQPLCIC

SEQ ID NO: 107771 - DNA, 1188 bp, Artificial Sequence
  derived and/or modified sequence
atggcagagcgcgcagcattagaggagctggtgaagttgcagggcgagagagtgcggggccttaagcagcagaaggcatccgccgagctgatcgaggaagaggtggccaagctgctgaagttgaaggcccaactgggtcccgacgagtccaagcaaaagtttgtgctgaagacaccaaaagatttcgacatagctggcaacttcgaccccatgattcccgacgctgagtgcttaaaaatcatgtgcgagattctttcaagcttacaaattggcgattttctggtgaaggtgaatgacaggcgaatccttgatgggatgtttgctatctgcggcgtgtctgattccaaattccggaccatttgcagctccgtggacaaactggacaaggtctcatgggaagaggtgaagaacgaaatggtaggggagaagggactagcgcctgaggttgccgaccgtattggtgattatgtacagcagcacgggggagtttcactggtggagcagctactgcaagatccaaagctatcgcagaataagcaagcccttgaaggtctgggagatctaaagttgcttttcgaatatttgactctttttgggattgacgataagattagcttcgatttgtccttggcaagagggctggattactacacaggcgtgatctacgaagctgtcctgctccagacgcccgcccaagccggagaggagcccttgggcgtgggctcagtggccgctggggggagatacgatgggctggtgggaatgttcgatccgaagggccgtaaagtgccctgtgtgggtctgagtattggcgtagagaggattttttctatcgtggagcagcgtctggaggccttggaggaaaagattcggacaaccgaaacccaggtgctggtggcttcagcgcagaaaaaacttctggaagagcgcctgaaactggtctccgaactatgggacgccggcatcaaagctgagctgctgtacaaaaagaaccctaagctgctgaatcagctgcagtattgtgaagaggcaggtatcccgctggttgctataatcggcgaacaggagctaaaggacggagtcattaagctccgatcggtgacatcccgcgaagaggtggacgtacggagggaggacctggtggaggagatcaaacggcgtactggacagccactctgcatttgctag

SEQ ID NO: 107772 - DNA, 1774 bp, Artificial Sequence
  derived and/or modified sequence
gaaaactcgggcgtttgcgcacctcactagtcacgaaggctgaggtgggatcctcccaagttcccttagtagccagcttcggcacttccgggaggagccggaaataatttttgtgctcggcggaggctctctaggcgtgcgacccagcgactcgatagccggaagtcatccttgctgaggctggggcaaccaccgcaggtcgagacagcaggcggctcaagtggacagccgggatggcagagcgtgcggcgctggaggagctggtgaaacttcagggagagcgcgtgcgaggcctcaagcagcagaaggccagcgccgagctgatcgaggaggaggtggcgaaactcctgaaactgaaggcacagctgggtcctgatgaaagcaaacagaaatttgtgctcaaaacccccaaggattttgacattgctgggaactttgatcccatgatccctgatgcagagtgcctgaagatcatgtgcgagatcctgagttcacttcagataggcgacttcctggtcaaggtaaacgatcgacgcattctagatgggatgtttgctatctgtggtgtttctgacagcaagttccgtaccatctgctcctcagtagacaagctggacaaggtgtcctgggaagaggtgaagaatgagatggtgggagagaagggccttgcacctgaggtggctgaccgcattggggactatgtccagcaacatggtggggtatccctggtggaacagctgctccaggatcctaaactatcccaaaacaagcaggccttggagggcctgggagacctgaagttgctctttgagtacctgaccctatttggcattgatgacaaaatctcctttgacctgagccttgctcgagggctggattactacactggggtgatctatgaggcagtgctgctacagaccccagcccaggcaggggaagagcccctgggtgtgggcagtgtggctgctggaggacgctatgatgggctagtgggcatgttcgaccccaaagggcgcaaggtgccatgtgtggggctcagcattggggtggagcggattttctccatcgtggaacagagactagaggctttggaggagaagatacggaccacggagacacaggtgcttgtggcatctgcacagaagaagctgctagaggaaagactaaagcttgtctcagaactgtgggatgctgggatcaaggctgagctgctgtacaagaagaacccaaagctactgaaccagttacagtactgtgaggaggcaggcatcccactggtggctatcatcggcgagcaggaactcaaggatggggtcatcaagctccgttcagtgacgagcagggaagaggtggatgtccgaagagaagaccttgtggaggaaatcaaaaggagaacaggccagcccctctgcatctgctgaactgaacaaactatcagaggaaaggaagtgggactggcactatttgaggttaagacaaactgcatatgtacttcaattgctttgcacttttccgtttcagcggaagacctgaagagtggtcagaacagagcctttgatttttattatggttattttattgattattactggcaaaaacggccaggtacaacacctttttcatacaaggcccaggaggcttagtccagtctgtgctcctgggctacaaggacccagcctgagatggtcccatctgcagggccccgcaccagttggagcagatgcctccccaccaccaattgccaaaggtccaataaaatgcctcaaccacggag

SEQ ID NO: 107773 - DNA, 1188 bp, Artificial Sequence
  derived and/or modified sequence
atggccgagagagctgccctggaggagctggtgaagctgcagggcgagcgggtgcggggcctgaagcagcagaaggccagcgctgagctgattgaggaggaggtggccaagctgctgaagctgaaggcccagctgggcccagatgagagcaagcagaagtttgtgctgaagacccccaaggactttgatattgctggcaactttgaccccatgatcccagatgctgagtgcctgaagatcatgtgtgagatcctgagcagcctgcagatcggggacttcctggtgaaggtgaatgaccggcgcatcctggatggcatgtttgccatctgtggggtgtctgacagcaagttccgcaccatctgcagctctgtggacaagctggacaaggtgtcctgggaggaggtgaagaatgagatggtgggggagaagggcctggcccctgaggtggccgacagaattggagactatgtgcagcagcacggcggcgtgtccctggtggagcagctgctgcaggaccccaagctgagccagaacaagcaggccctggagggcctgggggacctgaagctgctgtttgagtacctgaccctgtttggaattgatgacaagatcagctttgacctgagcctggcccggggcctggactactacacaggagtcatctatgaggccgtgctgctgcagaccccagcccaggccggggaggagcccctgggcgtgggctctgtggccgccggcggccgctatgatggcctggtgggcatgtttgaccccaagggcaggaaggtgccctgtgtgggcctgagcattggagtggagcgcatcttcagcatcgtggagcagaggctggaggccctggaggagaagatccgcaccacagagacccaggtgctggtggccagcgcccagaagaagctgctggaggagcggctgaagctggtgtctgagctgtgggatgctggcatcaaggccgagctgctgtacaagaagaaccccaagctgctgaaccagctgcagtactgtgaggaggccggcatccccctggtggccatcatcggggagcaggagctgaaggatggagtcatcaagctgcggtctgtgaccagccgggaggaggtggatgtgcggcgggaggacctggtggaggagatcaagagaagaacaggccagcccctgtgcatctgctag

SEQ ID NO: 107774 - DNA, 1188 bp, Artificial Sequence
  derived and/or modified sequence
atggccgagcgggccgccctggaggagctggtgaagctgcagggcgagcgtgtccgagggctcaagcagcagaaggcttcggccgagctaattgaagaagaagtggcaaaactactgaaactgaaagcccagctgggcccggacgagagtaagcagaagttcgtgctgaaaactccaaaagattttgacatcgcgggaaactttgatcccatgattcctgacgccgaatgtctgaagattatgtgcgaaatcttgtccagcctccagatcggggacttcctggtgaaagtaaatgaccgtaggatcctagacggcatgttcgccatttgtggagtgagtgactcaaaatttcgcaccatctgtagttctgtggacaagctcgataaggtgtcctgggaagaagtgaagaatgagatggtcggggagaagggactggctccagaagtggcagacagaataggcgactatgtgcaacaacacggcggagtcagcctggtggagcagctgttgcaggacccgaagttgtcgcagaacaagcaggccctcgaggggctgggcgatctgaaattgctcttcgaatatttaacgctgtttggcattgacgacaagatctcatttgatctgtccctggcaagaggactggactattatactggtgtgatttacgaagcagttctgctccagacaccggcccaagctggcgaagagcctctcggagtaggatcagtagctgctgggggtcgatacgacgggctggtgggcatgttcgacccaaaaggacgtaaggtgccgtgtgtggggcttagcatcggcgtggagcgaattttctcgatcgtggaacagcgactggaagccctcgaagagaaaataaggacaaccgaaactcaagttctggtggcctctgcccagaagaagctccttgaagaacgcctgaaactggtgagcgaactttgggacgccggcatcaaagcggagctcctgtataaaaaaaatcctaaattactcaaccagctgcagtattgtgaggaagccggtatccccctggtggccatcatcggagaacaggagttgaaagacggcgtgattaaactgcggagcgtcacctcccgggaagaagtagatgtccgacgggaagatctcgtggaggagataaagcggaggactgggcagccactttgtatttgctag

SEQ ID NO: 107775 - DNA, 1188 bp, Artificial Sequence
  derived and/or modified sequence
atggctgaacgtgcagctctcgaagaattggtcaagctgcagggtgagagagtaagagggttaaaacagcaaaaagccagcgctgagttaatcgaggaagaagtcgctaaactcctgaagctcaaggcacaactgggaccagatgagtccaagcagaaattcgtcttaaagacccccaaggattttgatatcgctggtaacttcgatcccatgatcccagatgccgaatgtctgaaaataatgtgtgaaatcttatcttctctacagataggtgacttcctcgttaaggtgaacgatcgtaggatcctggatggcatgtttgctatctgtggggtgtcagattccaaatttaggaccatctgttcttctgtagataagctggataaagtgtcttgggaagaagttaagaatgaaatggtgggggaaaaagggcttgcacctgaggtcgccgatcggatcggagattatgtccagcagcacggcggagtgtccctggtcgaacagttgttacaagaccccaagttgagccagaataaacaggccctggaggggctgggagacctgaagttactctttgagtacttgacgctgtttggcattgacgacaaaattagcttcgacctgtctctggcccgtggcctcgactactatacgggagtcatatacgaagcagtcctattgcagacccccgctcaagcgggtgaagaacccctgggcgtcgggagcgtagcagctggcggtagatatgacgggttagtgggcatgttcgatcccaaggggaggaaggtgccctgtgtggggctgtctatcggcgtggagaggattttctctatagtcgagcagcgcctggaggcgcttgaggaaaagatacgtactacagagacacaagtcctcgttgcaagcgcccagaaaaagctgctggaggaacggctgaaactcgtgtccgagctgtgggacgccggaattaaggccgagttgctctacaaaaagaatccgaagctcctgaatcagctgcagtattgtgaggaagccggtatccccttagtggccatcattggcgagcaagaactcaaggatggtgtaattaagctgagaagcgtgaccagtagagaggaggtagacgttcgcagggaggacctggtagaggagatcaagaggaggactggacaacccctctgcatctgttag

SEQ ID NO: 107776 - DNA, 1188 bp, Artificial Sequence
  derived and/or modified sequence
atggccgagagagccgccctggaggagctggtgaagctgcagggcgagagagtgagaggcctgaagcagcagaaggccagcgccgagctgatcgaggaggaggtggccaagctgctgaagctgaaggcccagctgggccccgacgagagcaagcagaagttcgtgctgaagacccccaaggacttcgacatcgccggcaacttcgaccccatgatccccgacgccgagtgcctgaagatcatgtgcgagatcctgagcagcctgcagatcggcgacttcctggtgaaggtgaacgacagaagaatcctggacggcatgttcgccatctgcggcgtgagcgacagcaagttcagaaccatctgcagcagcgtggacaagctggacaaggtgagctgggaggaggtgaagaacgagatggtgggcgagaagggcctggcccccgaggtggccgacagaatcggcgactacgtgcagcagcacggcggcgtgagcctggtggagcagctgctgcaggaccccaagctgagccagaacaagcaggccctggagggcctgggcgacctgaagctgctgttcgagtacctgaccctgttcggcatcgacgacaagatcagcttcgacctgagcctggccagaggcctggactactacaccggcgtgatctacgaggccgtgctgctgcagacccccgcccaggccggcgaggagcccctgggcgtgggcagcgtggccgccggcggcagatacgacggcctggtgggcatgttcgaccccaagggcagaaaggtgccctgcgtgggcctgagcatcggcgtggagagaatcttcagcatcgtggagcagagactggaggccctggaggagaagatcagaaccaccgagacccaggtgctggtggccagcgcccagaagaagctgctggaggagagactgaagctggtgagcgagctgtgggacgccggcatcaaggccgagctgctgtacaagaagaaccccaagctgctgaaccagctgcagtactgcgaggaggccggcatccccctggtggccatcatcggcgagcaggagctgaaggacggcgtgatcaagctgagaagcgtgaccagcagagaggaggtggacgtgagaagagaggacctggtggaggagatcaagagaagaaccggccagcccctgtgcatctgctag

SEQ ID NO: 107777 - DNA, 1323 bp, Artificial Sequence
  derived and/or modified sequence
atggcagtgagagaaaaggtctttgacgttataatccggtgttttaaaagacatggggcagaggtgattgacacgcccgtttttgagcttaaagaaacactgatgggaaaatacggcgaggattctaaactcatatacgatctgaaagaccaaggtggggaactgctgagtctgcgttacgacctcactgtgcccttcgcccgatacttagccatgaataaactgaccaacattaagaggtaccatattgctaaggtctacaggcgagataatccagctatgactagggggagatatcgggagttttaccaatgtgacttcgatatcgccggtaatttcgaccctatgattcccgacgctgaatgtctgaagataatgtgtgaaatactctcctccttacaaattggagactttcttgtgaaagtgaacgatagacgtatcctggacggtatgttcgcaatctgcggtgtgagcgacagcaagttccgcactatctgctcctccgttgacaaactggacaaggtgagttgggaggaggtcaagaatgagatggtcggagaaaagggactggcgccagaggtagccgaccgcatcggtgattatgttcaacagcatggaggggtgtccctcgtcgagcagctcttgcaggaccccaaattgagccagaacaagcaagcacttgagggcctcggggacctgaagctgctgtttgagtacttaacccttttcggcatcgatgataagattagctttgatctctccctggctcggggtcttgattactacacaggggtcatatacgaagccgtcctcttgcaaacgccagcccaagctggcgaagaaccactgggggtgggttcagttgctgccggcggccggtacgatggtttagttggtatgtttgatcccaagggtcggaaagtgccgtgcgtgggcctatcaataggcgtagaacggatcttttcaatcgtggagcagagactcgaggccctggaggagaaaattaggaccaccgagacacaagttctggtcgctagcgcccaaaaaaaactgcttgaggaacgtctgaagctggtgtccgaattatgggacgccgggatcaaggctgaactgctctataaaaaaaatcctaagctcctgaaccagctgcagtactgtgaggaagcgggtataccactcgtggccattataggcgaacaagaactgaaagacggtgtgataaaacttagatctgtgaccagtcgcgaggaggtcgacgtgcgaagggaagatttagtggaagagatcaagcgccggactggacagcccctctgcatctgttag

SEQ ID NO: 107778 - DNA, 3494 bp, Artificial Sequence
  derived and/or modified sequence
ttgaaactctgtacccattaaacaataactccccacttcaccctccctccagcccctggtaactgctatcctactttctactttctgtctctatggatttgactattctaggtactagataagtgagagactaattgttctttttttttttttttaagttcattgatctagctttcaaattccacattgcaaccaatctttaagaaacaaccacttgttggattctgatgtagtaccaaagaaaaatatccacagttagctgaaaagtttgttaaaatactcttccttttacaactacatatctgtgtaaggttagattttcgttatatacttcaaccagcacgacatatcacgacagattgaatgcaaaaatcacatatgagaatcctgctgtcttctattcagtcagacattaaagatttgcaaagatgtaaatcagtgccactcttctcactaaattgttttggaaaacagttacctttttctaaaatattatttgcgttaacatataatagatatattatttgtgttaacatatgttatttgttaaatgaataaatattttaaaatttttgccgttctaattctaatacagtaaatattgataggtataatccactttggggtcttgaatacatagtaagagtgtaaagaggtcctgaaaccaaagactttggagtagggtataaaagcccagattggaagctctgacctggaaggacaacacagttctagtcctgactgccacgaacatgctgaatggccttaagaaatgacttaacttctcaacatcctgtacttcatctgtaaaatttatctgcctagcctatgtcatagagttgttaccagaaacaaattagagaacaaacagttgtaactaagatttaaaagaaaagttatattgggagagaaacgttgcttataaaatttggaattcaattagttgagccagtttgagttggttatattgcctataatcatgtaggtatttttttgttgttattatttttgtttgtttggttgggtttgtttttgtttttgtttttgttttgacagagtcttgctctgtctcccaggctggagtgcagtggcactatctcagctcactgcaagctccacctgccgggttcacgccattctcctgcctcagcctcccaagtagctgggactacaggcacctgccaccacgcccggctaatttttttgtatttttagtagagacggggtttcacagtgttcgccaggatggtcttgatctcctgacttcgtgatccgcccgcctcggcctccccaagtgctggcattacaggtgtgagccaccgcgcccggctggttggtttgttttgtttttgagacagagtctcgctctgtctctcagtctggagtgcagtggtgcaatcttggctcactgcaacctccgcctcccaggttcaagtgattctccctgccttgagcctcctgagtagctgggattacaggcacctgccaccaccatttgtttgttttattgagacagtctcactctgttgcccaggctggagtgcagtggcacaatctcggctcactgcaacctccacctcccaggttcaaggatcctcatgcatcagcctcccaagtagctgggactacaaggggcgtgtcgtcgcacccggctaatttctgtatttttagtagagacgaggtttcaccatgttggccaggctggtctcgaacccctgacctcaggcaatccatctgccttggcctcccgaagtgctgggattacaggcgtgagccactgtgcctggcctcagggcacaagagactatagtccccggcagatggcagttcgcgagaaggtgtttgacgtaatcatccgttgcttcaagcgccacggtgcagaagtcattgatacacctgtatttgaactaaaggaaacactgatgggaaagtatggggaagactccaagcttatctatgacctgaaggaccagggcggggagctcctgtcccttcgctatgacctcactgttccttttgctcggtatttggcaatgaataaactgaccaacattaaacgctaccacatagcaaaggtatatcggcgggataacccagccatgacccgtggccgataccgggaattctaccagtgtgattttgacattgctgggaactttgatcccatgatccctgatgcagagtgcctgaagatcatgtgcgagatcctgagttcacttcagataggcgacttcctggtcaaggtaaacgatcgacgcattctagatgggatgtttgctatctgtggtgtttctgacagcaagttccgtaccatctgctcctcagtagacaagctggacaaggtgtcctgggaagaggtgaagaatgagatggtgggagagaagggccttgcacctgaggtggctgaccgcattggggactatgtccagcaacatggtggggtatccctggtggaacagctgctccaggatcctaaactatcccaaaacaagcaggccttggagggcctgggagacctgaagttgctctttgagtacctgaccctatttggcattgatgacaaaatctcctttgacctgagccttgctcgagggctggattactacactggggtgatctatgaggcagtgctgctacagaccccagcccaggcaggggaagagcccctgggtgtgggcagtgtggctgctggaggacgctatgatgggctagtgggcatgttcgaccccaaagggcgcaaggtgccatgtgtggggctcagcattggggtggagcggattttctccatcgtggaacagagactagaggctttggaggagaagatacggaccacggagacacaggtgcttgtggcatctgcacagaagaagctgctagaggaaagactaaagcttgtctcagaactgtgggatgctgggatcaaggctgagctgctgtacaagaagaacccaaagctactgaaccagttacagtactgtgaggaggcaggcatcccactggtggctatcatcggcgagcaggaactcaaggatggggtcatcaagctccgttcagtgacgagcagggaagaggtggatgtccgaagagaagaccttgtggaggaaatcaaaaggagaacaggccagcccctctgcatctgctgaactgaacaaactatcagaggaaaggaagtgggactggcactatttgaggttaagacaaactgcatatgtacttcaattgctttgcacttttccgtttcagcggaagacctgaagagtggtcagaacagagcctttgatttttattatggttattttattgattattactggcaaaaacggccaggtacaacacctttttcatacaaggcccaggaggcttagtccagtctgtgctcctgggctacaaggacccagcctgagatggtcccatctgcagggccccgcaccagttggagcagatgcctccccaccaccaattgccaaaggtccaataaaatgcctcaaccacgg

SEQ ID NO: 107779 - DNA, 1323 bp, Artificial Sequence
  derived and/or modified sequence
atggctgtgcgggagaaggtgtttgatgtgatcatccgctgcttcaagagacatggagctgaggtgattgacacccctgtgtttgagctgaaggagaccctgatgggcaagtacggggaggacagcaagctgatctatgacctgaaggaccagggcggggagctgctgagcctgcgctatgacctgactgtgccctttgcccgctacctggccatgaacaagctgaccaacatcaagcgctaccacatcgccaaggtgtaccgccgggacaacccagccatgacccggggccgctaccgggagttctaccagtgtgactttgatattgctggcaactttgaccccatgatcccagatgctgaatgtctgaagatcatgtgtgagatcctgagcagcctgcagattggagacttcctggtgaaggtgaatgaccggcgcatcctggatggcatgtttgccatctgtggggtgtctgacagcaagttccgcaccatctgcagctctgtggacaagctggacaaggtgtcctgggaggaggtgaagaatgagatggtgggggagaagggcctggcccctgaggtggccgaccgcatcggggactatgtgcagcagcacggcggcgtgtccctggtggagcagctgctgcaggaccccaagctgagccagaacaagcaggccctggagggcctgggggacctgaagctgctgtttgagtacctgaccctgtttggaattgatgacaagatcagctttgacctgagcctggcccggggcctggactactacacaggagtcatctatgaagctgtgctgctgcagaccccagcccaggccggggaggagcccctgggcgtgggctctgtggccgccggcggccgctatgatggcctggtgggcatgtttgaccccaagggcaggaaggtgccctgtgtgggcctgagcattggagtggagcgcatcttcagcatcgtggagcagaggctggaggccctggaggagaagatccgcaccacagagacccaggtgctggtggccagcgcccagaagaagctgctggaggagcggctgaagctggtgtctgagctgtgggatgctggcatcaaggccgagctgctgtacaagaagaaccccaagctgctgaaccagctgcagtactgtgaggaggccggcatccccctggtggccatcattggagagcaggagctgaaggatggagtcatcaagctgcggtctgtgaccagccgggaggaggtggatgtgagaagagaggacctggtggaggagatcaagagaagaacaggccagcccctgtgcatctgctag

SEQ ID NO: 107780 - DNA, 1323 bp, Artificial Sequence
  derived and/or modified sequence
atggccgtgcgggagaaggtgttcgacgtgatcatccggtgcttcaagagacacggcgccgaagtgattgacaccccagtattcgagttaaaggaaaccttgatgggtaagtacggagaagacagcaaactcatatacgacctcaaggatcaagggggtgaactgctgtctcttcgatatgacctgaccgtgccttttgcacggtacctggccatgaacaagctgacaaacattaagcgatatcacatcgcgaaagtataccgccgggacaaccccgctatgacaagaggtagataccgagaattttaccagtgtgacttcgatatcgcaggaaactttgatcccatgattcccgatgccgaatgcttaaagatcatgtgtgaaatcctatcttcccttcagatcggggactttttggtgaaggtcaatgacaggcggatcttggatggaatgtttgcaatatgcggcgtgtccgatagcaagtttagaacaatctgcagttctgtcgacaaattagataaggtgagctgggaggaggtgaaaaatgaaatggtcggggaaaaaggccttgcaccggaggtggccgatcggattggggattatgtgcaacaacacggcggagtgtctcttgtggagcagctcctgcaagaccctaaactctcacagaacaagcaggcactggagggcctaggagacctgaagctgctgtttgagtacctgaccctctttggaatcgatgataaaatctcattcgatctgtcgctcgcaagggggctggactactatactggcgttatttacgaagcagtactgctgcagacgcccgcgcaggcaggggaggagccgctgggcgtaggatccgtggccgctggtggaagatacgacggcctagttggcatgttcgatcccaagggtaggaaggtgccgtgcgtcgggcttagcatcggcgtagagcgtatcttttcaatcgttgagcagaggctcgaagcgctcgaagaaaaaattaggacgaccgagacacaagtcctggttgcttcggcacagaagaaactcctggaagaaagactgaagttagtgagtgaactctgggacgccggaatcaaggccgaactgttgtacaaaaaaaatcccaaattgctaaaccaactgcagtattgcgaggaggcagggatccccctggttgcaatcataggtgagcaggagctgaaagacggggtgatcaaactcagaagcgtgacttctagggaggaagtcgacgttagacgggaagatctagtcgaagaaattaaacgcagaactgggcagcctctgtgtatttgttag

SEQ ID NO: 107781 - DNA, 1323 bp, Artificial Sequence
  derived and/or modified sequence
atggcggtgcgagagaaggtgtttgacgttatcattcgctgcttcaagcggcacggcgctgaggtgatcgatacccccgtgttcgagcttaaagagaccttgatgggcaagtatggcgaggatagcaaactaatttacgatctgaaggaccagggaggtgagcttctctcccttcggtacgaccttaccgttccttttgccagatatcttgcaatgaacaaactgaccaacatcaaaagatatcatatcgccaaggtgtacaggcgggataacccagctatgacaaggggtaggtatcgtgagttctaccaatgcgactttgatatagcaggcaacttcgatccaatgatcccagatgcggagtgtctgaagattatgtgcgagattctttcatcgttgcaaatcggtgactttttagtcaaggtgaacgaccgacggatcctggatggaatgttcgccatttgtggggtgagtgactccaagtttcgcaccatctgtagtagcgtcgacaaacttgacaaagtgtcttgggaggaggttaaaaacgaaatggtgggagagaaaggccttgctccggaggttgctgatcgcatcggcgattatgtccagcaacacggtggcgtctcactggtggaacagcttttacaggacccgaaattgtcccaaaacaaacaagccctggaggggctcggcgacttgaaactcttgttcgaatacctcaccctgttcggcattgatgataagatcagctttgacctcagcttggctcggggtttagattactacaccggggttatctatgaggcggtcctcctgcaaactcccgctcaggctggcgaagaacccctcggggtgggctccgtagctgcaggcggacggtacgatgggctggtgggtatgtttgatcccaagggaagaaaagttccgtgtgtgggactcagcataggggtcgaaaggatatttagcattgttgagcagaggttggaggctttggaagagaagattcgcacaaccgaaacccaggtgctggtggcttctgctcagaagaaattgctggaagaacggttaaagttggtgtctgagctctgggatgctggaataaaagctgaactgctctacaaaaaaaaccccaaactcctgaaccagctgcagtactgtgaggaagctgggatcccacttgtagccattatcggggagcaggaactcaaggatggagtgattaaactgagaagtgtgacaagcagggaagaagtagatgtacgcagagaggatcttgtggaagaaatcaaaaggcggacagggcaacctttatgtatctgttag

SEQ ID NO: 107782 - DNA, 1323 bp, Artificial Sequence
  derived and/or modified sequence
atggccgtgagagagaaggtgttcgacgtgatcatcagatgcttcaagagacacggcgccgaggtgatcgacacccccgtgttcgagctgaaggagaccctgatgggcaagtacggcgaggacagcaagctgatctacgacctgaaggaccagggcggcgagctgctgagcctgagatacgacctgaccgtgcccttcgccagatacctggccatgaacaagctgaccaacatcaagagataccacatcgccaaggtgtacagaagagacaaccccgccatgaccagaggcagatacagagagttctaccagtgcgacttcgacatcgccggcaacttcgaccccatgatccccgacgccgagtgcctgaagatcatgtgcgagatcctgagcagcctgcagatcggcgacttcctggtgaaggtgaacgacagaagaatcctggacggcatgttcgccatctgcggcgtgagcgacagcaagttcagaaccatctgcagcagcgtggacaagctggacaaggtgagctgggaggaggtgaagaacgagatggtgggcgagaagggcctggcccccgaggtggccgacagaatcggcgactacgtgcagcagcacggcggcgtgagcctggtggagcagctgctgcaggaccccaagctgagccagaacaagcaggccctggagggcctgggcgacctgaagctgctgttcgagtacctgaccctgttcggcatcgacgacaagatcagcttcgacctgagcctggccagaggcctggactactacaccggcgtgatctacgaggccgtgctgctgcagacccccgcccaggccggcgaggagcccctgggcgtgggcagcgtggccgccggcggcagatacgacggcctggtgggcatgttcgaccccaagggcagaaaggtgccctgcgtgggcctgagcatcggcgtggagagaatcttcagcatcgtggagcagagactggaggccctggaggagaagatcagaaccaccgagacccaggtgctggtggccagcgcccagaagaagctgctggaggagagactgaagctggtgagcgagctgtgggacgccggcatcaaggccgagctgctgtacaagaagaaccccaagctgctgaaccagctgcagtactgcgaggaggccggcatccccctggtggccatcatcggcgagcaggagctgaaggacggcgtgatcaagctgagaagcgtgaccagcagagaggaggtggacgtgagaagagaggacctggtggaggagatcaagagaagaaccggccagcccctgtgcatctgctag

SEQ ID NO: 107783 - protein, 545 aa, Artificial Sequence
  derived and/or modified sequence
MAFMEKPPAGKVLLDDTVPLTAAIEASQSLQSHTIAGLSLPLPPKKLIGNMDREFIAERQKGLQNYLNVITTNHILSNCELVKKFLDPNNYSANYTEIALQQVSMFFRSEPKWEVVEPLKDIGWRIRKKYFLMKIKNQPKERLVLSWADLGPDKYLSDKDFQCLIKLLPSCLHPYIYRVTFATANESSALLIRMFNEKGTLKDLIYKAKPKDPFLKKYCNPKKIQGLELQQIKTYGRQILEVLKFLHDKGFPYGHLHASNVMLDGDTCRLLDLENSLLGLPSFYRSYFSQFRKINTLESVDVHCFGHLLYEMTYGRPPDSVPVDSFPPAPSMAVVAVLESTLSCEACKNGMPTISRLLQMPLFSDVLLTTSEKPQFKIPTKLKEALRIAKECIEKRLIEEQKQIHQHRRLTRAQSHHGSEEERKKRKILARKKSKRSALENSEEHSAKYSNSNNSAGSGASSPLTSPSSPTPPSTSGISALPPPPPPPPPPAAPLPPASTEAPAQLSSQAVNGMSRGALLSSIQNFQKGTLRKAKTCDHSAPKIG

SEQ ID NO: 107784 - DNA, 1638 bp, Artificial Sequence
  derived and/or modified sequence
atggcctttatggagaagccccccgcaggaaaggtcctgctagacgacacagtgccactcacagcagctattgaggcgagccagagcctccagagtcacaccattgcgggactgtccttgcccctgccacctaagaagctgatcggcaatatggacagagaatttattgctgagcggcagaagggcctccaaaattatcttaacgtgatcaccactaaccacatactgagcaactgtgaactggtgaagaagttcctcgacccaaacaattattctgcaaactatacggagatagccctccagcaggtctcaatgttctttcgtagcgagccgaaatgggaggtagtggagcctctcaaagacatagggtggaggatcagaaagaaatacttcctgatgaagattaaaaatcagcccaaagagcgacttgtcctgtcttgggcggacctgggacccgacaaatacctgtcagacaaggatttccagtgtttaataaaactactcccctcttgtcttcacccatacatctaccgcgttacgttcgcaaccgctaacgagagtagcgcactattaatcagaatgtttaacgagaagggtacactgaaagatctgatttataaagccaaacccaaggacccattcttgaagaagtactgtaatccaaagaagatccagggactggaacttcagcaaatcaagacctatgggcgccagattttggaagtgcttaaatttttgcatgataaggggttcccctacggtcatctccatgcttcgaatgttatgctcgacggcgacacatgtaggttgctggaccttgaaaatagccttcttgggctgccctcattctaccgctcctacttcagccagttccggaaaatcaacaccctcgagtcagtggacgtgcactgctttgggcacctcctgtatgagatgacttatggccgacccccggattccgtccctgtagacagcttccccccagctcctagcatggccgttgtggccgtacttgaatcaaccctatcttgcgaggcctgcaagaatggcatgcccacgatctctcgcctgctgcagatgcccctgtttagcgacgtgttactgacaacaagcgaaaaaccacagttcaagatccctactaaactcaaagaagcccttagaatcgcaaaggaatgtatagagaagagactgatcgaggagcagaagcagattcaccagcatcgacgacttacccgggcacagtctcaccacggctcagaggaagaacgcaaaaagagaaagatccttgcaagaaagaaatcgaagcgttctgccctcgagaactccgaagaacactccgccaaatattcgaactctaacaatagcgccggttctggtgcttccagtccattgacaagcccttcttcccctactccaccctccacctccggcatatcagcactcccaccgccccccccacctccccctccgccagctgccccattgccccctgctagtactgaagctcctgcccaactgtcctcacaggccgtcaacgggatgtcccgcggagctctccttagcagcattcagaacttccaaaaaggcactttgaggaaagccaagacgtgcgatcactctgctcccaagattggatag

SEQ ID NO: 107785 - DNA, 1638 bp, Artificial Sequence
  derived and/or modified sequence
atggccttcatggagaagcccccagctgggaaggtgctgctggatgacacagtgcccctgacagctgccatcgaggccagccagagcctgcagagccacaccatcgccggcctgagcctgcccctgccccccaagaagctgattggcaacatggaccgggagttcatcgccgagcggcagaagggcctgcagaactacctgaatgtcatcaccaccaaccacatcctgagcaactgtgagctggtgaagaagttcctggaccccaacaactacagcgccaactacacagagatcgccctgcagcaggtgtccatgttcttccgctctgagcccaagtgggaggtggtggagcccctgaaggacatcggctggaggatcaggaagaagtacttcctgatgaagatcaagaaccagcccaaggagcggctggtgctgtcctgggccgacctgggccctgacaagtacctgagtgacaaggacttccagtgcctgatcaagctgctgcccagctgcctgcacccctacatctacagagtgacctttgccacagccaatgaaagcagcgccctgctgatccgcatgtttaatgagaagggcaccctgaaggacctgatctacaaggccaagcccaaggaccccttcctgaagaagtactgcaaccccaagaagatccagggcctggagctgcagcagatcaagacctacggccggcagatcctggaggtgctgaagttcctgcatgacaagggcttcccctacggccacctgcacgccagcaatgtgatgctggatggagacacctgccgcctgctggacctggagaacagcctgctgggcctgcccagcttctaccgcagctacttcagccagttcaggaagatcaacaccctggagagcgtggatgtgcactgcttcggccacctgctgtatgagatgacctacggccggcccccagacagcgtgcctgtggacagcttccccccagcccccagcatggctgtggtggccgtgctggagagcaccctgagctgtgaggcctgcaagaatggcatgcccaccatcagccggctgctgcagatgcccctcttcagtgatgtgctgctgaccaccagcgagaagccccagttcaagatccccaccaagctgaaggaggccctgcgcatcgccaaggaatgtattgagaagaggctcatcgaggagcagaagcagatccaccagcaccggcggctgacccgggcccagagccaccacggcagcgaggaggagaggaagaagaggaagatcctggccaggaagaagagcaagaggtctgccctggagaacagcgaggagcacagcgccaagtacagcaacagcaacaacagcgctggcagcggggccagcagccccctgaccagccccagcagccccaccccacccagcaccagcggcatcagcgccctgcccccacctcctcctcctcctcctcctcctgctgcccccctgcccccagccagcacagaggccccagcccagctgagcagccaggccgtgaatggcatgagcagaggagccctgctgagcagcatccagaacttccagaagggcaccctgaggaaggccaagacctgtgaccacagcgcccccaagattggatag

SEQ ID NO: 107786 - DNA, 1638 bp, Artificial Sequence
  derived and/or modified sequence
atggccttcatggagaagccccccgccggcaaggtgctgctggacgacaccgtgccattaaccgccgccattgaggctagccagtctttgcagtcgcataccatcgctggtctgtctctgccactccctccaaaaaagctcatcggcaatatggatcgagagttcatcgccgagaggcagaaaggactccaaaactatctgaacgttatcactactaatcacattctctctaactgcgaacttgtcaagaaattcttagatcccaacaattactccgctaactatactgagatcgctttgcagcaagtctccatgttcttcaggtcagagccaaaatgggaggtcgtggagccactcaaggatataggctggcgcattcggaagaagtatttcctaatgaaaattaagaatcagcctaaggagcgcctggttctttcatgggccgatttgggcccagataaatacctctccgacaaggatttccaatgcctgatcaagctccttccctcttgtttacatccatacatttatagagtgacattcgctaccgctaacgaatcttctgctctgctgatacggatgtttaacgaaaagggcactctgaaggacctgatttacaaagccaaacccaaagatcctttcctgaagaagtactgtaatccaaagaagatccaggggcttgaactgcaacagattaagacttacggtcgacagatcctggaggtgctgaagtttttgcacgataaaggtttcccttatgggcacctgcatgcttctaacgttatgctggacggtgatacctgccggctgcttgatctggaaaattctctattgggcttgcccagcttctatcgctcttatttttcccaattcaggaaaattaacactctggagagtgtggacgtgcattgcttcgggcacttgctgtacgaaatgacttacggccgaccacccgattccgtacctgtggattctttccctccagccccttcgatggccgtggtggccgttctggagtccacattatcatgtgaggcctgcaagaatgggatgcccaccatctccagactcctgcaaatgccactttttagcgacgtgctgctgaccacatcagagaaaccacagttcaaaatccctacaaagctaaaagaggctctcagaatcgctaaggagtgtattgagaagcgtttgattgaagaacaaaagcagatccaccagcaccggagactgacgagggcccagagccaccacggcagtgaggaggaacgcaagaagaggaaaattcttgccaggaagaaatccaagcgctctgccctggagaactccgaagagcatagtgcaaagtattccaactccaataattcagccggaagtggagccagcagcccgctgaccagccccagctccccaactcccccgtcgacctcaggcatctcagctctcccgcctccccctccacctcccccgccccccgctgcccctctaccacctgcttccaccgaagccccagcccagctctcatcccaggcggtgaacggcatgtccagaggagctctgttgtcaagcatccaaaattttcagaaagggacactcagaaaagctaagacttgcgatcactcagcacccaaaatcggctag

SEQ ID NO: 107787 - DNA, 1638 bp, Artificial Sequence
  derived and/or modified sequence
atggcctttatggagaaacctcccgctggcaaagtcctgctggatgacacagtacctctcaccgccgctatcgaggcttctcaatctctacagtctcacacgattgccggactgtccctccctcttcctcctaaaaagctgatcgggaatatggaccgggaatttattgccgagcgccagaagggacttcagaactatctgaatgtgattaccactaaccatatcctctccaactgcgaacttgtgaaaaagttcctggaccctaacaattattcagcgaactataccgagatcgccctgcagcaagtttctatgtttttcaggtccgagcctaagtgggaggtagtggaacctctgaaagatatcgggtggcgcattagaaaaaaatacttcttaatgaagattaagaatcagccaaaagagagattagtgttgagttgggctgacttgggaccagataaatatctctcagacaaagacttccagtgtctgattaagttactccctagttgtctccatccctatatctacagggttacttttgcaacagctaacgaatctagcgctttactgattcgcatgtttaacgaaaagggcaccctaaaagatctgatttataaagcaaaacccaaggacccttttctaaaaaaatattgcaaccccaagaaaattcagggcctcgaactgcagcaaatcaaaacctacgggaggcagatactcgaggtcctgaagttcctgcacgataagggttttccctacgggcatctgcacgcttcaaacgtgatgcttgacggcgatacttgcagactgcttgatctggagaactcactcctgggcctgccctcattctatagatcttacttttcccagtttaggaagataaacaccttagagtcagttgacgttcactgttttggacacctgttgtacgagatgacatatggccgtccaccggacagcgttcctgttgacagcttcccccctgccccatccatggcagtcgtagccgtcctggaatctactctgagttgtgaagcatgcaagaatggaatgccgaccatctctagactgctccagatgcccctgtttagcgatgtgctccttaccacatccgaaaagccacaatttaaaatccccacaaaacttaaggaagctctaagaatcgccaaagaatgcatcgaaaagcgcttgatcgaggagcagaaacagattcatcagcatcggcgactcacccgagcccagagtcatcacggttcagaggaagagcggaagaagaggaagatcctggcaaggaagaagagtaaacgcagtgcactggaaaacagcgaggaacattccgctaagtattctaactctaataatagtgccggaagcggagcttcctcccccctaacgtccccttcatctccgaccccgccaagcacatccgggatctcagccctgcctcccccaccacctcccccacccccacctgcggcacccctgccacctgcttccacagaagcccctgctcaattgtcgtctcaagcagtaaacgggatgtctcggggtgcacttcttagttccattcagaatttccaaaagggcactcttaggaaggccaagacatgcgaccatagcgctcctaaaattggctag

SEQ ID NO: 107788 - DNA, 1928 bp, Artificial Sequence
  derived and/or modified sequence
gtgttgacagcggcggcggtggaaccgggcgggcggcgggagtcggcgcctcgggttcctacctcgcgtccctaggcggcggcggccgggcgtcccgggatggccttcatggagaagccgccagccggcaaggtgctgctggacgacacggtgccgctgacagcagccatcgaggcgagccagagcctgcagtcccacacgattgcaggcctaagtctacctcttcctcccaaaaaattgattggtaacatggatcgtgaattcatagctgaaaggcagaaaggtcttcagaactatctcaacgtgatcacaacaaatcatatcttgtctaattgtgagctggttaagaagtttttagatccaaacaactattccgcaaactatactgagattgccttgcaacaggtttccatgttcttccgatcagaaccaaagtgggaggtggtggaacctttgaaagacataggttggagaataaggaagaaatatttcttgatgaagattaaaaatcagccaaaggaacggctagtgttaagctgggctgaccttggcccagacaagtatttgtcagataaagattttcagtgtctaatcaaacttctgccttcttgtttgcacccttacatctatcgggttacctttgccacagctaatgaatcctcagcgttgctaattaggatgtttaacgaaaagggaacattgaaggatctgatctacaaggcaaaaccaaaagacccatttctaaagaagtactgcaaccctaagaagattcagggcctggaactccagcaaataaaaacatatggacggcaaatattagaggtactgaagtttcttcatgacaagggattcccttatgggcatcttcacgcctccaatgtgatgctcgatggggacacttgccggctgctggaccttgagaattccttattgggcctgccttccttctaccgatcttatttttcacaattcaggaaaatcaatacattggaaagtgtggatgtccactgctttggccacttactgtatgaaatgacttatggacgaccgccagactcggtgcctgtggactccttccctcctgccccgtccatggctgtggtggccgtgttggagtctacgctgtcttgtgaagcctgtaaaaatggcatgcctaccatctcccggctcttacagatgccattattcagcgatgttttactaaccacttctgaaaaaccacagtttaagatccctacaaagttaaaagaggcattgagaattgccaaagaatgtatagagaagagactaattgaggaacagaaacagattcaccagcatcgaagactgacaagagctcagtcccaccatggatctgaggaggaaagaaaaaaaagaaagattttagctcgaaagaagtcaaaacgatctgctcttgaaaatagtgaagagcattcagcgaagtacagcaactccaataattcagcaggatctggggccagctcacctctcacgtccccgtcatcgccaactccaccctctacatcagggatatctgcattacctccacctcctccacctccaccaccaccagcagctcccttgcctcctgcgagcaccgaggcacctgcccagctctcgtctcaggctgtgaatggcatgagccgaggggccttgctcagctccatccagaatttccaaaaaggaactttgaggaaagccaaaacctgtgatcacagtgctccgaagatcggctgaagcttcctgtttacacttggagggaaaagttcttttttattcctactcacccctaccccccaaactaccctcttcctgggaaagtaattgctgagccagtacagccacaaacagtactattttgcagatgctcatgtaagcagcttttcgagagaaataattctttaagcagaataaagttaggctggcat

SEQ ID NO: 107789 - DNA, 1638 bp, Artificial Sequence
  derived and/or modified sequence
atggccttcatggagaagccccccgccggcaaggtgctgctggacgacaccgtgcccctgaccgccgccatcgaggccagccagagcctgcagagccacaccatcgccggcctgagcctgcccctgccccccaagaagctgatcggcaacatggacagagagttcatcgccgagagacagaagggcctgcagaactacctgaacgtgatcaccaccaaccacatcctgagcaactgcgagctggtgaagaagttcctggaccccaacaactacagcgccaactacaccgagatcgccctgcagcaggtgagcatgttcttcagaagcgagcccaagtgggaggtggtggagcccctgaaggacatcggctggagaatcagaaagaagtacttcctgatgaagatcaagaaccagcccaaggagagactggtgctgagctgggccgacctgggccccgacaagtacctgagcgacaaggacttccagtgcctgatcaagctgctgcccagctgcctgcacccctacatctacagagtgaccttcgccaccgccaacgagagcagcgccctgctgatcagaatgttcaacgagaagggcaccctgaaggacctgatctacaaggccaagcccaaggaccccttcctgaagaagtactgcaaccccaagaagatccagggcctggagctgcagcagatcaagacctacggcagacagatcctggaggtgctgaagttcctgcacgacaagggcttcccctacggccacctgcacgccagcaacgtgatgctggacggcgacacctgcagactgctggacctggagaacagcctgctgggcctgcccagcttctacagaagctacttcagccagttcagaaagatcaacaccctggagagcgtggacgtgcactgcttcggccacctgctgtacgagatgacctacggcagaccccccgacagcgtgcccgtggacagcttcccccccgcccccagcatggccgtggtggccgtgctggagagcaccctgagctgcgaggcctgcaagaacggcatgcccaccatcagcagactgctgcagatgcccctgttcagcgacgtgctgctgaccaccagcgagaagccccagttcaagatccccaccaagctgaaggaggccctgagaatcgccaaggagtgcatcgagaagagactgatcgaggagcagaagcagatccaccagcacagaagactgaccagagcccagagccaccacggcagcgaggaggagagaaagaagagaaagatcctggccagaaagaagagcaagagaagcgccctggagaacagcgaggagcacagcgccaagtacagcaacagcaacaacagcgccggcagcggcgccagcagccccctgaccagccccagcagccccaccccccccagcaccagcggcatcagcgccctgccccccccccccccccccccccccccccccgccgcccccctgccccccgccagcaccgaggcccccgcccagctgagcagccaggccgtgaacggcatgagcagaggcgccctgctgagcagcatccagaacttccagaagggcaccctgagaaaggccaagacctgcgaccacagcgcccccaagatcggctag

SEQ ID NO: 107790 - protein, 515 aa, Artificial Sequence
  derived and/or modified sequence
MAFMEKPPAGKVLLDDTVPLTAAIEASQSLQSHTEYIIRVQRGISVENSWQIVRRYSDFDLLNNSLQIAGLSLPLPPKKLIGNMDREFIAERQKGLQNYLNVITTNHILSNCELVKKFLDPNNYSANYTEIALQQVSMFFRSEPKWEVVEPLKDIGWRIRKKYFLMKIKNQPKERLVLSWADLGPDKYLSDKDFQCLIKLLPSCLHPYIYRVTFATANESSALLIRMFNEKGTLKDLIYKAKPKDPFLKKYCNPKKIQGLELQQIKTYGRQILEVLKFLHDKGFPYGHLHASNVMLDGDTCRLLDLENSLLGLPSFYRSYFSQFRKINTLESVDVHCFGHLLYEMTYGRPPDSVPVDSFPPAPSMAVVAVLESTLSCEACKNGMPTISRLLQMPLFSDVLLTTSEKPQFKIPTKLKEALRIAKECIEKRLIEEQKQIHQHRRLTRAQSHHGSEEERKKRKILARKKSKRSALENSEEHSAKYSNSNNSAGSGASSPLTSPSSPTPPSTSVEHAPF

SEQ ID NO: 107791 - DNA, 1548 bp, Artificial Sequence
  derived and/or modified sequence
atggctttcatggagaagcccccagcggggaaagtcctgctggacgacacggtgccactgactgccgcaatcgaggcctcccagagcttacagtcccatactgaatacatcattcgcgttcagcgtggaattagtgtggaaaactcatggcagattgttcgccgatattccgatttcgacctgttgaataacagtctccagatcgcaggtctgtccctccctctgccacccaagaagctaatcggaaacatggaccgggagtttattgccgagagacaaaaaggcctgcagaattacctgaacgtgatcaccacaaaccacatactttccaattgtgagctggttaagaaattcttggatccaaacaattactctgcaaattatacagaaatcgccctgcagcaggtcagcatgttttttcgaagtgagcccaagtgggaagtggtggaaccactgaaagatattggttggcgcatccggaaaaagtattttttgatgaagatcaaaaaccagcccaaggagagactggttctcagctgggccgaccttgggcccgataagtatctctccgacaaagattttcaatgtttgatcaagctcctcccctcttgtctgcacccctacatctaccgggtgacatttgctaccgcaaatgagagttctgccttgttaatccgcatgttcaacgagaagggcacactgaaagatctaatttataaggcaaagccaaaagatccttttttgaaaaaatattgtaaccccaagaagattcagggtctggagttgcagcaaataaagacgtacggaagacaaatattggaagtgctgaagttcctacacgataaaggctttccctatggtcacctgcacgcctctaatgtgatgctggatggagacacctgccgcctgctcgacctggaaaactctttgcttgggctcccaagtttctataggtcatatttcagccagttccgtaagatcaacacactagagtccgttgacgtgcattgcttcgggcacctgttgtacgaaatgacctacggccgcccgcctgacagtgttccagtggatagcttccctcccgcacctagtatggctgtggtagctgtcctggaaagcacgctgagttgtgaagcttgtaagaatggcatgcccaccattagcaggctcctccagatgcctttgttttcggatgtgttgctcacaacgtcagaaaaacctcagtttaagataccaactaagctgaaagaggctcttcgaattgcaaaagagtgcatcgaaaaacgtctgatagaggaacagaagcaaatccaccaacacaggcgccttacgagggctcagtcgcaccatgggagcgaagaagagcgaaagaagaggaagatcctcgcaaggaagaaatccaagcgcagcgctctggagaactccgaggaacactctgccaaatattccaactcaaacaattcagctgggtccggcgcttcttcacctcttacctcgccttcctcgcccacgcctccgagcacctccgttgagcacgcacccttttag

SEQ ID NO: 107792 - DNA, 1548 bp, Artificial Sequence
  derived and/or modified sequence
atggccttcatggagaagcccccagctgggaaggtgctgctggatgacacagtgcccctgacagctgccatcgaggccagccagagcctgcagagccacacagagtacatcatccgggtgcagaggggcatctctgtggagaacagctggcagatcgtgcggcgctacagcgactttgacctgctgaacaacagcctgcagattgctggcctgagcctgcccctgccccccaagaagctgattggcaacatggaccgggagttcatcgccgagcggcagaagggcctgcagaactacctgaatgtcatcaccaccaaccacatcctgagcaactgtgagctggtgaagaagttcctggaccccaacaactacagcgccaactacacagaaattgccctgcagcaggtgtccatgttcttccgctctgagcccaagtgggaggtggtggagcccctgaaggacatcggctggaggatcaggaagaagtacttcctgatgaagatcaagaaccagcccaaggagcggctggtgctgtcctgggccgacctgggccctgacaagtacctgagtgacaaggacttccagtgcctgatcaagctgctgcccagctgcctgcacccctacatctacagagtgacctttgccacagccaatgaatcttctgccctgctgatccgcatgtttaatgagaagggcaccctgaaggacctgatctacaaggccaagcccaaggaccccttcctgaagaagtactgcaaccccaagaagatccagggcctggagctgcagcagatcaagacctacggccggcagatcctggaggtgctgaagttcctgcatgacaagggcttcccctacggccacctgcacgccagcaatgtgatgctggatggagacacctgccgcctgctggacctggagaacagcctgctgggcctgcccagcttctaccgcagctacttcagccagttcaggaagatcaacaccctggagagcgtggatgtgcactgcttcggccacctgctgtatgagatgacctacggccggcccccagattctgtgcctgtggacagcttccccccagcccccagcatggctgtggtggccgtgctggagagcaccctgagctgtgaggcctgcaagaatggcatgcccaccatcagccggctgctgcagatgcccctcttcagtgatgtgctgctgaccaccagcgagaagccccagttcaagatccccaccaagctgaaggaggccctgagaattgccaaggagtgcatcgagaagaggctgattgaggagcagaagcagatccaccagcaccggcggctgacccgggcccagagccaccacggcagcgaggaggagaggaagaagaggaagatcctggccaggaagaagagcaagaggtctgccctggagaacagcgaggagcacagcgccaagtacagcaacagcaacaacagcgctggcagcggggccagcagccccctgaccagccccagcagccccaccccacccagcacctctgtggagcacgcccccttctag

SEQ ID NO: 107793 - DNA, 1548 bp, Artificial Sequence
  derived and/or modified sequence
atggccttcatggagaagccccccgccggcaaggtgctgctggacgacaccgtgcctctcaccgctgccatcgaggcctcccagtcgctgcaaagtcacactgaatacatcatcagggtgcagaggggaatcagtgtggagaatagttggcagatcgtccggcgatattctgacttcgatctcctgaacaactccctgcagatcgccgggctgtccttgccattaccccctaagaaactgatcggaaacatggatagggagttcatcgcagaaagacagaagggactccagaattacctcaatgttatcacgaccaaccacatcctctctaactgtgaactagtgaagaagttcttggatcctaataattactctgccaactacaccgaaattgcactgcagcaggtgtctatgttctttcgcagcgagcccaaatgggaggtggtggagcccctgaaggatatcggctggaggattagaaagaagtacttcctcatgaagattaagaatcagcccaaggaacgactggttctttcctgggcagacctgggacctgataagtacctgagtgacaaggatttccagtgccttatcaagttactgcctagctgtctacacccttatatttacagggtaaccttcgcgacagctaacgagtcatcagctctactgatcagaatgttcaacgaaaagggcaccctcaaggacttaatctataaagccaagcccaaagatccattcctcaagaagtactgcaatccaaagaaaattcagggcctggagctgcagcagattaagacatatggccggcaaattctcgaagtcctcaaatttctgcacgataaagggttcccctacggacatctgcacgcatccaatgtcatgctcgacggggacacatgcaggttgctagaccttgaaaattccctgttaggactcccaagcttctaccggtcatatttctcccagtttcgaaagataaacaccctcgaatcagttgacgtacactgttttgggcacctattatatgagatgacttacggtcgacctcccgatagtgtgccagtggactcattcccccccgccccaagtatggccgtggttgcggtattagaaagcacattgtcctgcgaggcctgcaaaaatggcatgccaacaatcagcagactgctgcagatgcctctgttcagtgacgtgctcctgaccacttctgagaagccccaatttaagatccctacgaaactgaaggaggccctcaggattgccaaggagtgcatcgagaaacgcctgatcgaggaacagaagcagatccaccagcaccgccgcctgactcgcgctcagtcacatcacggatctgaagaggaacgaaaaaaaaggaagatcctcgctcgtaaaaaatcgaaacggagtgccctggagaacagcgaggaacacagtgcaaagtactcaaactccaataactctgccgggagtggcgccagcagcccgcttacctccccaagtagccccactccaccatctacgagcgtggagcacgcacctttctag

SEQ ID NO: 107794 - DNA, 1548 bp, Artificial Sequence
  derived and/or modified sequence
atggctttcatggaaaagccccctgcagggaaggttctgctcgatgacactgtccctctgacagcggcaatcgaggcttcccagagtttgcagtctcatactgagtacatcatacgcgtgcagcggggaatcagcgtggagaactcctggcagatcgttagaagatatagtgactttgatctcctgaataattccctgcagattgctgggttgtctcttccgctccctcccaaaaagctcattggcaacatggaccgcgaattcatcgcggaacgccaaaagggtttacagaattatttgaacgttatcaccaccaaccatattctttcgaactgcgagctggtgaaaaagtttttagacccaaataactattctgcaaactacacagaaattgctctccagcaggtgagcatgtttttccgctctgagccaaaatgggaggtggtggagcccctaaaagacatcggatggcggatcaggaaaaagtacttcctaatgaaaatcaagaaccaacctaaggagcgcttagtcctctcctgggccgacctcggtcctgacaaatacttgagtgacaaagatttccaatgcttgatcaaactgttgcccagctgtctgcacccatacatttaccgcgtgacctttgccacggcaaacgagagctcagccctgctcatcaggatgttcaatgaaaagggcacactgaaggacctgatatacaaggccaaacccaaggacccattcctgaaaaagtattgtaatcccaagaaaattcagggcctggaactgcagcagatcaaaacttatggcaggcagatcctcgaagttctcaagttcttacatgacaagggctttccttacggccacctgcatgcaagcaatgtgatgctggacggagatacatgccggcttctcgaccttgagaatagcctgctgggtttgccaagcttctaccgaagctactttagccagtttcggaagatcaacaccttagaatcagtggacgtacactgcttcgggcacctgctttatgaaatgacctatgggagaccacccgacagtgtacccgtggattctttcccccctgccccatctatggctgtggtggctgtgttagagtccaccttaagttgcgaggcctgtaagaatggtatgccaacgatatccaggctcctgcaaatgccgctcttttccgatgtgctacttaccacgagtgaaaaaccccagttcaagattcctactaagctgaaggaggccctcaggattgccaaagagtgtatcgaaaaaagacttatcgaagaacaaaaacagattcaccagcacagaagactcacccgtgctcagagtcatcacggatcggaagaggagcgaaagaaacgcaagatcctggccagaaaaaagagtaaacgaagtgcgctggagaattccgaggagcattccgccaagtattcaaacagcaacaattccgccggaagcggtgcctcttcgcctcttacgagcccgtccagtccaaccccgccttccacctctgtggaacacgccccattctag

SEQ ID NO: 107795 - DNA, 2031 bp, Artificial Sequence
  derived and/or modified sequence
gaaccgggcgggcggcgggagtcggcgcctcgggttcctacctcgcgtccctaggcggcggcggccgggcgtcccgggatggccttcatggagaagccgccagccggcaaggtgctgctggacgacacggtgccgctgacagcagccatcgaggcgagccagagcctgcagtcccacacggaatatattattcgagtgcaaagaggaatttctgtggaaaacagctggcagattgttagaagatacagtgactttgatttgcttaacaacagcttacagattgcaggcctaagtctacctcttcctcccaaaaaattgattggtaacatggatcgtgaattcatagctgaaaggcagaaaggtcttcagaactatctcaacgtgatcacaacaaatcatatcttgtctaattgtgagctggttaagaagtttttagatccaaacaactattccgcaaactatactgagattgccttgcaacaggtttccatgttcttccgatcagaaccaaagtgggaggtggtggaacctttgaaagacataggttggagaataaggaagaaatatttcttgatgaagattaaaaatcagccaaaggaacggctagtgttaagctgggctgaccttggcccagacaagtatttgtcagataaagattttcagtgtctaatcaaacttctgccttcttgtttgcacccttacatctatcgggttacctttgccacagctaatgaatcctcagcgttgctaattaggatgtttaacgaaaagggaacattgaaggatctgatctacaaggcaaaaccaaaagacccatttctaaagaagtactgcaaccctaagaagattcagggcctggaactccagcaaataaaaacatatggacggcaaatattagaggtactgaagtttcttcatgacaagggattcccttatgggcatcttcacgcctccaatgtgatgctcgatggggacacttgccggctgctggaccttgagaattccttattgggcctgccttccttctaccgatcttatttttcacaattcaggaaaatcaatacattggaaagtgtggatgtccactgctttggccacttactgtatgaaatgacttatggacgaccgccagactcggtgcctgtggactccttccctcctgccccgtccatggctgtggtggccgtgttggagtctacgctgtcttgtgaagcctgtaaaaatggcatgcctaccatctcccggctcttacagatgccattattcagcgatgttttactaaccacttctgaaaaaccacagtttaagatccctacaaagttaaaagaggcattgagaattgccaaagaatgtatagagaagagactaattgaggaacagaaacagattcaccagcatcgaagactgacaagagctcagtcccaccatggatctgaggaggaaagaaaaaaaagaaagattttagctcgaaagaagtcaaaacgatctgctcttgaaaatagtgaagagcattcagcgaagtacagcaactccaataattcagcaggatctggggccagctcacctctcacgtccccgtcatcgccaactccaccctctacatcagtagagcatgcaccattttgaacgtgaattttcggtaaagtaaactatgctgatttctcagactttaaagatgctctgtttctgtgtgtgaaataggacccaaagtgtctcgattgctgaagtgatgaacaagtgggaaagcagatttgagactatttccttatctgaatatttaaatgaaatacagcatctttaaaaagcacccagtgacttcatctatattcatttcattttcatcatgaccttcaaaatcttcattttcactctgatttcagttttaaaatacagctctaaaacctgcaaatcaactgcatggcattttggtatattttaattttggaaaccataactctcaaagtcccgttgctgcaaaaatgttgattcctagttactctgatgaagaggaaagagtgttaggcacttgag

SEQ ID NO: 107796 - DNA, 1548 bp, Artificial Sequence
  derived and/or modified sequence
atggccttcatggagaagccccccgccggcaaggtgctgctggacgacaccgtgcccctgaccgccgccatcgaggccagccagagcctgcagagccacaccgagtacatcatcagagtgcagagaggcatcagcgtggagaacagctggcagatcgtgagaagatacagcgacttcgacctgctgaacaacagcctgcagatcgccggcctgagcctgcccctgccccccaagaagctgatcggcaacatggacagagagttcatcgccgagagacagaagggcctgcagaactacctgaacgtgatcaccaccaaccacatcctgagcaactgcgagctggtgaagaagttcctggaccccaacaactacagcgccaactacaccgagatcgccctgcagcaggtgagcatgttcttcagaagcgagcccaagtgggaggtggtggagcccctgaaggacatcggctggagaatcagaaagaagtacttcctgatgaagatcaagaaccagcccaaggagagactggtgctgagctgggccgacctgggccccgacaagtacctgagcgacaaggacttccagtgcctgatcaagctgctgcccagctgcctgcacccctacatctacagagtgaccttcgccaccgccaacgagagcagcgccctgctgatcagaatgttcaacgagaagggcaccctgaaggacctgatctacaaggccaagcccaaggaccccttcctgaagaagtactgcaaccccaagaagatccagggcctggagctgcagcagatcaagacctacggcagacagatcctggaggtgctgaagttcctgcacgacaagggcttcccctacggccacctgcacgccagcaacgtgatgctggacggcgacacctgcagactgctggacctggagaacagcctgctgggcctgcccagcttctacagaagctacttcagccagttcagaaagatcaacaccctggagagcgtggacgtgcactgcttcggccacctgctgtacgagatgacctacggcagaccccccgacagcgtgcccgtggacagcttcccccccgcccccagcatggccgtggtggccgtgctggagagcaccctgagctgcgaggcctgcaagaacggcatgcccaccatcagcagactgctgcagatgcccctgttcagcgacgtgctgctgaccaccagcgagaagccccagttcaagatccccaccaagctgaaggaggccctgagaatcgccaaggagtgcatcgagaagagactgatcgaggagcagaagcagatccaccagcacagaagactgaccagagcccagagccaccacggcagcgaggaggagagaaagaagagaaagatcctggccagaaagaagagcaagagaagcgccctggagaacagcgaggagcacagcgccaagtacagcaacagcaacaacagcgccggcagcggcgccagcagccccctgaccagccccagcagccccaccccccccagcaccagcgtggagcacgcccccttctag

SEQ ID NO: 107797 - DNA, 1635 bp, Artificial Sequence
  derived and/or modified sequence
gcgtccctaggcggcggcggccgggcgtcccgggatggccttcatggagaagccgccagccggcaaggtgctgctggacgacacggtgccgctgacagcagccatcgaggcgagccagagcctgcagtcccacacgagattgccttgcaacaggtttccatgttcttccgatcagaaccaaagtgggaggtggtggaacctttgaaagacataggttggagaataaggaagaaatatttcttgatgaagattaaaaatcagccaaaggaacggctagtgttaagctgggctgaccttggcccagacaagtatttgtcagataaagattttcagtgtctaatcaaacttctgccttcttgtttgcacccttacatctatcgggttacctttgccacagctaatgaatcctcagcgttgctaattaggatgtttaacgaaaagggaacattgaaggatctgatctacaaggcaaaaccaaaagacccatttctaaagaagtactgcaaccctaagaagattcagggcctggaactccagcaaataaaaacatatggacggcaaatattagaggtactgaagtttcttcatgacaagggattcccttatgggcatcttcacgcctccaatgtgatgctcgatggggacacttgccggctgctggaccttgagaattccttattgggcctgccttccttctaccgatcttatttttcacaattcaggaaaatcaatacattggaaagtgtggatgtccactgctttggccacttactgtatgaaatgacttatggacgaccgccagactcggtgcctgtggactccttccctcctgccccgtccatggctgtggtggccgtgttggagtctacgctgtcttgtgaagcctgtaaaaatggcatgcctaccatctcccggctcttacagatgccattattcagcgatgttttactaaccacttctgaaaaaccacagtttaagatccctacaaagttaaaagaggcattgagaattgccaaagaatgtatagagaagagactaattgaggaacagaaacagattcaccagcatcgaagactgacaagagctcagtcccaccatggatctgaggaggaaagaaaaaaaagaaagattttagctcgaaagaagtcaaaacgatctgctcttgaaaatagtgaagagcattcagcgaagtacagcaactccaataattcagcaggatctggggccagctcacctctcacgtccccgtcatcgccaactccaccctctacatcagggatatctgcattacctccacctcctccacctccaccaccaccagcagctcccttgcctcctgcgagcaccgaggcacctgcccagctctcgtctcaggctgtgaatggcatgagccgaggggccttgctcagctccatccagaatttccaaaaaggaactttgaggaaagccaaaacctgtgatcacagtgctccgaagatcggctgaagcttcctgtttacacttggagggaaaagttcttttttattcctactcacccctaccccccaaactaccctcttcctgggaaagtaattgctgagccagtacagccacaaacagtactattttgcagatgctcatgtaagcagcttttcg

SEQ ID NO: 107798 - DNA, 1326 bp, Artificial Sequence
  derived and/or modified sequence
atgttcttccgctccgagccgaaatgggaggtcgtggagccactgaaggacatcgggtggaggattcgcaaaaagtactttcttatgaagatcaagaaccagccgaaagaacgcttggtcctcagttgggctgacttaggcccagacaaatatttgtctgacaaagattttcagtgtctaatcaagcttttaccaagctgcctccacccatacatttatcgggtgaccttcgctacggcaaacgaatctagcgctctgttaatcagaatgttcaatgagaaaggcactctgaaggacctcatctacaaagctaaaccaaaggaccccttcctgaaaaagtactgtaaccccaagaaaatccagggcctcgagctacagcagattaagacgtatggccgccaaattcttgaggttttaaagtttctgcacgacaagggcttcccctatggccacctccacgctagcaatgtgatgctggatggcgacacatgtcgacttctggatttagagaactctctgcttgggctgccgagtttctaccggtcttacttttcgcagtttcgcaagatcaacaccctcgaatctgtggacgtacactgttttgggcacctgctgtacgagatgacgtacgggcgaccccccgactcagtgccagttgacagctttccgccagctccgagtatggctgtggtggctgttttggagtccacactgagttgcgaagcctgcaaaaatggcatgcccactatttcaagactgctgcagatgcctctgttctcggatgtgctcctgactacttcggagaaaccgcagttcaagattccaacgaagctgaaagaggcccttcgcatagccaaagaatgcatagagaaaagactcattgaagagcagaagcagatccatcagcatcggaggcttactagagcccagagccaccatggctccgaagaagaacgaaaaaagcgcaaaatcctagcgcgcaagaagtcaaagcgcagcgccctagagaactccgaagaacattcagccaagtactccaacagtaataattccgctggctccggggcttcctctcctctcacatctcccagctcccctacaccgccgtctaccagcggtatcagcgccctgcccccccctcccccacctcctccccctccagccgctcctctgccacctgcatccaccgaagctcccgcacagttgtctagccaggcagtgaatggtatgtctcgcggggcactactatcctctatccagaacttccagaagggcaccctcaggaaagcaaagacatgtgaccatagtgccccaaaaatagggtag

SEQ ID NO: 107799 - DNA, 1005 bp, Artificial Sequence
  derived and/or modified sequence
atgtttttcaggtctgaaccaaagtgggaggtggttgagcctctcaaggacatcggctggagaatacggaaaaaatatttcctgatgaaaataaaaaaccaacctaaggagagactggttctttcatgggctgacctaggaccggacaaatacctctccgacaaggacttccaatgtctgataaaactgctgccttcatgccttcacccctatatctacagggtgactttcgcaaccgctaatgagtcctctgcgttgctgataaggatgttcaatgagaaaggaactctcaaggacctgatctataaggcaaagccaaaagatcccttcctgaagaagtactgcaatcctaagaaaatccagggtctagagcttcagcagatcaaaacctatggccgtcagatccttgaggttctgaaattcctgcacgacaaaggcttcccgtacggtcacctacacgctagtaacgtgatgcttgacggcgacacatgtagactcctcgacctggaaaattctctgctaggactgccttctttctatcgatcttatttctcacagttccgtaagataaacactcttgaatccgttgatgtccactgttttggacatctactgtatgagatgacttatggaagaccgcccgattcagttcctgtggactccttccccccggccccatcaatggctgtggtggccgttctagagtcaacactcagttgtgaggcgtgcaagaatgggatgccaacgatttctagactgctccagatgcctctgttcagcgatgtgctgctgaccacgtccgagaaaccacagttcaaaatccccactaaactgaaagaggcgcttaggatcgcaaaagagtgcatcgaaaaaaggctgatcgaagagcagaagcagatccaccaacatcggaggctgacccgagcacaaagtcatcacggctcggaagaggagcgcaagaaaaaagatttcagcagcaaggaagtgaagacaatttgctcctag

SEQ ID NO: 107800 - DNA, 1326 bp, Artificial Sequence
  derived and/or modified sequence
atgttcttccgctctgagcccaagtgggaggtggtggagcccctgaaggacatcggctggaggatcaggaagaagtacttcctgatgaagatcaagaaccagcccaaggagcggctggtgctgtcctgggccgacctgggccctgacaagtacctgagtgacaaggacttccagtgcctgatcaagctgctgcccagctgcctgcacccctacatctacagagtgacctttgccacagccaatgaaagcagcgccctgctgatccgcatgtttaatgagaagggcaccctgaaggacctgatctacaaggccaagcccaaggaccccttcctgaagaagtactgcaaccccaagaagatccagggcctggagctgcagcagatcaagacctacggccggcagatcctggaggtgctgaagttcctgcatgacaagggcttcccctacggccacctgcacgccagcaatgtgatgctggatggagacacctgccgcctgctggacctggagaacagcctgctgggcctgcccagcttctaccgcagctacttcagccagttcaggaagatcaacaccctggagagcgtggatgtgcactgcttcggccacctgctgtatgagatgacctacggccggcccccagacagcgtgcctgtggacagcttccccccagcccccagcatggctgtggtggccgtgctggagagcaccctgagctgtgaggcctgcaagaatggcatgcccaccatcagccggctgctgcagatgcccctcttcagtgatgtgctgctgaccaccagcgagaagccccagttcaagatccccaccaagctgaaggaggccctgcgcatcgccaaggaatgtattgagaagaggctcatcgaggagcagaagcagatccaccagcaccggcggctgacccgggcccagagccaccacggcagcgaggaggagaggaagaagaggaagatcctggccaggaagaagagcaagaggtctgccctggagaacagcgaggagcacagcgccaagtacagcaacagcaacaacagcgctggcagcggggccagcagccccctgaccagccccagcagccccaccccacccagcaccagcggcatcagcgccctgcccccacctcctcctcctcctcctcctcctgctgcccccctgcccccagccagcacagaggccccagcccagctgagcagccaggccgtgaatggcatgagcagaggagccctgctgagcagcatccagaacttccagaagggcaccctgaggaaggccaagacctgtgaccacagcgcccccaagattggatag

SEQ ID NO: 107801 - DNA, 1005 bp, Artificial Sequence
  derived and/or modified sequence
atgttcttccgctctgagcccaagtgggaggtggtggagcccctgaaggacatcggctggaggatcaggaagaagtacttcctgatgaagatcaagaaccagcccaaggagcggctggtgctgtcctgggccgacctgggccctgacaagtacctgagtgacaaggacttccagtgcctgatcaagctgctgcccagctgcctgcacccctacatctacagagtgacctttgccacagccaatgaaagcagcgccctgctgatccgcatgtttaatgagaagggcaccctgaaggacctgatctacaaggccaagcccaaggaccccttcctgaagaagtactgcaaccccaagaagatccagggcctggagctgcagcagatcaagacctacggccggcagatcctggaggtgctgaagttcctgcatgacaagggcttcccctacggccacctgcacgccagcaatgtgatgctggatggagacacctgccgcctgctggacctggagaacagcctgctgggcctgcccagcttctaccgcagctacttcagccagttcaggaagatcaacaccctggagagcgtggatgtgcactgcttcggccacctgctgtatgagatgacctacggccggcccccagacagcgtgcctgtggacagcttccccccagcccccagcatggctgtggtggccgtgctggagagcaccctgagctgtgaggcctgcaagaatggcatgcccaccatcagccggctgctgcagatgcccctcttcagtgatgtgctgctgaccaccagcgagaagccccagttcaagatccccaccaagctgaaggaggccctgcgcatcgccaaggaatgtattgagaagaggctcatcgaggagcagaagcagatccaccagcaccggcggctgacccgggcccagagccaccacggcagcgaggaggagaggaagaagaaggacttcagcagcaaggaggtgaagaccatctgcagctag

SEQ ID NO: 107802 - DNA, 1326 bp, Artificial Sequence
  derived and/or modified sequence
atgttcttccggagcgagcccaagtgggaggtggtggagcccctgaaagatattggatggagaatccgcaaaaagtattttctgatgaagattaaaaaccagccaaaggaacgccttgtgctgtcctgggctgatcttggacctgataaatacctctccgataaggattttcagtgtttgataaaattgctgccttcttgcctccacccatacatctacagagtcacctttgcgactgcaaatgaaagcagtgcacttctcatcagaatgtttaatgaaaagggtactttaaaggaccttatctataaggcaaaaccaaaggacccgttcctgaaaaaatactgcaatcctaaaaagattcagggtctggagttgcagcagattaagacttacggacggcagatactggaagtgttgaagtttcttcatgacaaagggttcccttacggccacctgcatgctagtaacgtgatgcttgacggcgacacctgtcgcctgcttgatcttgaaaactccctactgggcttgcctagcttctacaggtcgtatttcagccagttcaggaagatcaataccctggagtccgtcgatgtgcattgctttgggcatctgttatatgagatgacatatggacggcctccagacagcgtccccgtcgactccttccctcccgctccgtccatggccgtagtggccgtcctcgagagtacactctcttgtgaggcctgcaagaacggtatgcctactatctcacgcctcctgcagatgcctctcttctctgacgttcttctgactacgagcgagaaaccccagtttaaaataccaaccaaactcaaggaggctctccgaatagcaaaggagtgcatcgaaaagcgactcatagaggagcaaaaacagatacatcagcatcggaggcttactcgagctcagagtcaccacggctccgaggaggagcggaaaaagaggaagatcctcgcaagaaaaaagtctaagcgatcagcacttgaaaactcagaggaacactctgcaaaatattcaaattccaataactctgccggtagcggtgcatctagccccttgacttccccttccagccccacgcccccttccacaagcgggatttccgccctgccaccaccaccccccccccccccaccccctgcggccccactaccgcccgccagtacagaagctcccgcccagttatctagccaggcagtgaacggcatgtctcgcggtgcgctgctctcatcaatccagaattttcagaaaggaacattacgaaaggctaagacatgcgaccacagcgctccaaagattgggtag

SEQ ID NO: 107803 - DNA, 1005 bp, Artificial Sequence
  derived and/or modified sequence
atgttcttccggagcgagcccaagtgggaggtggtggagcccctgaaggatattgggtggagaattagaaagaaatacttcttgatgaagataaagaatcagccaaaggagagactcgtcctgtcttgggcagacctaggtccagataaatacctgtcggataaagattttcagtgcctgatcaaacttcttccaagctgcttgcacccttatatataccgcgtaaccttcgcaactgcaaatgaaagtagcgctttgctcatacggatgtttaacgaaaagggaactttaaaggatttgatctacaaagcaaagccaaaagaccctttcctgaagaaatactgtaacccaaagaagatacagggtctcgagctccagcagattaagacttacgggcgacaaatcctcgaagtgctgaagttcctgcatgataagggctttccatacggtcacctgcacgcgagcaacgtcatgcttgatggcgatacctgcaggctcttagacctggaaaactcactccttggcctgccatcattctatcgaagttacttcagtcaattcaggaaaatcaacaccctcgaatcagtcgatgtgcattgcttcgggcacctgctgtacgagatgacctacggccggccacccgactccgtgcccgttgacagtttccccccagctccctccatggcggtggtcgctgtcctggaatccactctgtcttgtgaagcttgtaaaaacggcatgcctactatttccagacttctgcagatgcctcttttcagtgatgtgctgctgaccacttccgagaagcctcagttcaaaatacctacgaaactgaaggaggcattgcggatagcgaaggaatgcatcgagaagcgtttgatcgaagagcaaaagcaaattcaccagcaccggcggcttactcgggcccaaagtcatcacgggtccgaggaagaacgcaagaaaaaagatttcagttccaaagaagttaagactatctgcagctag

SEQ ID NO: 107804 - DNA, 1326 bp, Artificial Sequence
  derived and/or modified sequence
atgttcttccgctctgagccgaagtgggaagtggtcgagcctctgaaggatattgggtggcgcatcaggaaaaagtacttcctgatgaaaatcaaaaaccagcccaaggagcgactggtcttgtcttgggccgatcttggcccagacaagtatctctcagataaggattttcagtgcttgatcaagctcctgcctagctgtctccatccttacatttatcgcgtaaccttcgccacagcgaacgaaagttcggccttgctcatcagaatgttcaacgagaagggaactctgaaggacctcatatataaagctaaaccaaaagatcccttcctgaaaaaatactgtaaccccaaaaagatacaaggtcttgagttgcagcagataaaaacctatggtcggcagattctggaggtactaaagtttctgcacgacaaaggctttccctacggtcatctgcacgcctccaacgtcatgttagatggagacacttgcaggctgctggacctggagaatagcttgctgggtctcccgagcttttatcggagttactttagtcagttccggaagatcaacactctggaaagcgtggacgtgcattgttttgggcacttgctgtacgagatgacctacggcagaccccctgacagcgtgccagtcgactcctttccaccagccccatccatggccgtcgttgccgtactcgagtctacattgtcttgcgaggcgtgtaaaaatggaatgccgactatctccagactgttgcagatgccgctgtttagtgacgtgctgttaaccacaagcgagaagccccaatttaagataccaacaaagctgaaagaggctctccgaattgcaaaagaatgcatcgagaagagactgattgaggaacaaaaacaaattcatcagcacaggcgcctgacacgcgcacagagccaccacggaagcgaggaggaacggaagaagagaaagatcctcgctaggaaaaagagcaagcgatcggcgctcgagaacagcgaagagcacagtgctaaatatagcaattctaataacagcgcaggatccggggcttcctccccactgacttccccatcttcaccaaccccaccatccacttctggtatctccgctctgccaccccctccgcctccgcctccgcctcctgcggctccgctgcctcccgcttcgacggaggcacccgctcagttgagcagccaggctgtcaatggaatgtcacggggagctctgttgtcttctatacagaattttcagaagggcacgctcaggaaggctaaaacgtgtgatcactccgcacctaaaattggctag

SEQ ID NO: 107805 - DNA, 1005 bp, Artificial Sequence
  derived and/or modified sequence
atgttcttcagaagcgagccaaaatgggaggttgtggaacccttgaaagatatcggttggagaatacggaagaaatactttctgatgaagattaagaatcaacccaaagagcgcctcgttttgtcatgggccgatctcgggccagataagtacctgtctgataaagatttccaatgtctaatcaaactgctgccatcttgtttgcacccttatatttatagagtaactttcgcaaccgccaatgagtcatcggccttgctgataagaatgtttaatgaaaaaggcactttaaaggacttgatctataaagcaaagcctaaagatcccttcctgaagaaatactgtaatcccaagaagattcaaggcctcgaactgcagcagatcaaaacatatgggaggcagattttagaggtcctgaagtttttgcatgacaaggggtttccttacggccaccttcacgcatccaatgtcatgctcgatggagacacctgtaggctgcttgatttggagaactccctgttgggactacccagcttctatcgctcgtacttctctcagtttagaaaaatcaacaccctcgagagtgtagatgttcactgctttggacaccttctatacgagatgacctacgggaggcctccagactctgttcccgtggatagtttcccaccggctcctagtatggcggttgtggccgtgctcgagtcaacgctgagctgtgaagcttgcaagaacggaatgccgacaatctcccggctcctgcaaatgcccttattcagtgatgtcttgcttaccacgtcagagaagcctcagtttaaaataccaacaaagttaaaggaggctctccgaatagcaaaggagtgcatagagaagcggctgatcgaggaacagaagcagatccatcagcacaggcggttaactcgagcgcagtcccaccatggcagtgaggaggagcggaagaaaaaagatttttcatccaaggaggtgaagacaatctgctcctag

SEQ ID NO: 107806 - DNA, 1326 bp, Artificial Sequence
  derived and/or modified sequence
atgttcttcagaagcgagcccaagtgggaggtggtggagcccctgaaggacatcggctggagaatcagaaagaagtacttcctgatgaagatcaagaaccagcccaaggagagactggtgctgagctgggccgacctgggccccgacaagtacctgagcgacaaggacttccagtgcctgatcaagctgctgcccagctgcctgcacccctacatctacagagtgaccttcgccaccgccaacgagagcagcgccctgctgatcagaatgttcaacgagaagggcaccctgaaggacctgatctacaaggccaagcccaaggaccccttcctgaagaagtactgcaaccccaagaagatccagggcctggagctgcagcagatcaagacctacggcagacagatcctggaggtgctgaagttcctgcacgacaagggcttcccctacggccacctgcacgccagcaacgtgatgctggacggcgacacctgcagactgctggacctggagaacagcctgctgggcctgcccagcttctacagaagctacttcagccagttcagaaagatcaacaccctggagagcgtggacgtgcactgcttcggccacctgctgtacgagatgacctacggcagaccccccgacagcgtgcccgtggacagcttcccccccgcccccagcatggccgtggtggccgtgctggagagcaccctgagctgcgaggcctgcaagaacggcatgcccaccatcagcagactgctgcagatgcccctgttcagcgacgtgctgctgaccaccagcgagaagccccagttcaagatccccaccaagctgaaggaggccctgagaatcgccaaggagtgcatcgagaagagactgatcgaggagcagaagcagatccaccagcacagaagactgaccagagcccagagccaccacggcagcgaggaggagagaaagaagagaaagatcctggccagaaagaagagcaagagaagcgccctggagaacagcgaggagcacagcgccaagtacagcaacagcaacaacagcgccggcagcggcgccagcagccccctgaccagccccagcagccccaccccccccagcaccagcggcatcagcgccctgccccccccccccccccccccccccccccccgccgcccccctgccccccgccagcaccgaggcccccgcccagctgagcagccaggccgtgaacggcatgagcagaggcgccctgctgagcagcatccagaacttccagaagggcaccctgagaaaggccaagacctgcgaccacagcgcccccaagatcggctag

SEQ ID NO: 107807 - DNA, 1005 bp, Artificial Sequence
  derived and/or modified sequence
atgttcttcagaagcgagcccaagtgggaggtggtggagcccctgaaggacatcggctggagaatcagaaagaagtacttcctgatgaagatcaagaaccagcccaaggagagactggtgctgagctgggccgacctgggccccgacaagtacctgagcgacaaggacttccagtgcctgatcaagctgctgcccagctgcctgcacccctacatctacagagtgaccttcgccaccgccaacgagagcagcgccctgctgatcagaatgttcaacgagaagggcaccctgaaggacctgatctacaaggccaagcccaaggaccccttcctgaagaagtactgcaaccccaagaagatccagggcctggagctgcagcagatcaagacctacggcagacagatcctggaggtgctgaagttcctgcacgacaagggcttcccctacggccacctgcacgccagcaacgtgatgctggacggcgacacctgcagactgctggacctggagaacagcctgctgggcctgcccagcttctacagaagctacttcagccagttcagaaagatcaacaccctggagagcgtggacgtgcactgcttcggccacctgctgtacgagatgacctacggcagaccccccgacagcgtgcccgtggacagcttcccccccgcccccagcatggccgtggtggccgtgctggagagcaccctgagctgcgaggcctgcaagaacggcatgcccaccatcagcagactgctgcagatgcccctgttcagcgacgtgctgctgaccaccagcgagaagccccagttcaagatccccaccaagctgaaggaggccctgagaatcgccaaggagtgcatcgagaagagactgatcgaggagcagaagcagatccaccagcacagaagactgaccagagcccagagccaccacggcagcgaggaggagagaaagaagaaggacttcagcagcaaggaggtgaagaccatctgcagctag

SEQ ID NO: 107808 - protein, 557 aa, Artificial Sequence
  derived and/or modified sequence
MKKMSNIYESAANTLGIFNSPCLTKVELRVACKGISDRDALSKPDPCVILKMQSHGQWFEVDRTEVIRTCINPVYSKLFTVDFYFEEVQRLRFEVHDISSNHNGLKEADFLGGMECTLGQIVSQRKLSKSLLKHGNTAGKSSITVIAEELSGNDDYVELAFNARKLDDKDFFSKSDPFLEIFRMNDDATQQLVHRTEVVMNNLSPAWKSFKVSVNSLCSGDPDRRLKCIVWDWDSNGKHDFIGEFTSTFKEMRGAMEGKQVQWECINPKYKAKKKNYKNSGTVILNLCKIHKMHSFLDYIMGGCQIQFTVAIDFTASNGDPRNSCSLHYIHPYQPNEYLKALVAVGEICQDYDSDKMFPAFGFGARIPPEYTVSHDFAINFNEDNPECAGIQGVVEAYQSCLPKLQLYGPTNIAPIIQKVAKSASEETNTKEASQYFILLILTDGVITDMADTREAIVHASHLPMSVIIVGVGNADFSDMQMLDGDDGILRSPKGEPVLRDIVQFVPFRNFKHASPAALAKSVLAEVPNQVVDYYNGKGIKPKCSSEMYESSRTLAP

SEQ ID NO: 107809 - protein, 575 aa, Artificial Sequence
  derived and/or modified sequence
MAVEPSSSESIKRRAGRRMKKMSNIYESAANTLGIFNSPCLTKVELRVACKGISDRDALSKPDPCVILKMQSHGQWFEVDRTEVIRTCINPVYSKLFTVDFYFEEVQRLRFEVHDISSNHNGLKEADFLGGMECTLGQIVSQRKLSKSLLKHGNTAGKSSITVIAEELSGNDDYVELAFNARKLDDKDFFSKSDPFLEIFRMNDDATQQLVHRTEVVMNNLSPAWKSFKVSVNSLCSGDPDRRLKCIVWDWDSNGKHDFIGEFTSTFKEMRGAMEGKQVQWECINPKYKAKKKNYKNSGTVILNLCKIHKMHSFLDYIMGGCQIQFTVAIDFTASNGDPRNSCSLHYIHPYQPNEYLKALVAVGEICQDYDSDKMFPAFGFGARIPPEYTVSHDFAINFNEDNPECAGIQGVVEAYQSCLPKLQLYGPTNIAPIIQKVAKSASEETNTKEASQYFILLILTDGVITDMADTREAIVHASHLPMSVIIVGVGNADFSDMQMLDGDDGILRSPKGEPVLRDIVQFVPFRNFKHASPAALAKSVLAEVPNQVVDYYNGKGIKPKCSSEMYESSRTLAP

SEQ ID NO: 107810 - protein, 169 aa, Artificial Sequence
  derived and/or modified sequence
MKKMSNIYESAANTLGIFNSPCLTKVELRVACKGISDRDALSKPDPCVILKMQSHGQWFEVDRTEVIRTCINPVYSKLFTVDFYFEEVQRLRFEVHDISSNHNGLKEADFLGGMECTLGQIVSQRKLSKSLLKHGNTAGKSSITVIAEELSGNDDYVELAFNARKLDDK

SEQ ID NO: 107811 - DNA, 1674 bp, Artificial Sequence
  derived and/or modified sequence
atgaagaagatgagcaacatctacgagagcgccgccaacaccctgggcatcttcaacagcccctgcctgaccaaggtggagctgagagtggcctgcaagggcatcagcgacagagacgccctgagcaagcccgacccctgcgtgatcctgaagatgcagagccacggccagtggttcgaggtggacagaaccgaggtgatcagaacctgcatcaaccccgtgtacagcaagctgttcaccgtggacttctacttcgaggaggtgcagagactgagattcgaggtgcacgacatcagcagcaaccacaacggcctgaaggaggccgacttcctgggcggcatggagtgcaccctgggccagatcgtgagccagagaaagctgagcaagagcctgctgaagcacggcaacaccgccggcaagagcagcatcaccgtgatcgccgaggagctgagcggcaacgacgactacgtggagctggccttcaacgccagaaagctggacgacaaggacttcttcagcaagagcgaccccttcctggagatcttcagaatgaacgacgacgccacccagcagctggtgcacagaaccgaggtggtgatgaacaacctgagccccgcctggaagagcttcaaggtgagcgtgaacagcctgtgcagcggcgaccccgacagaagactgaagtgcatcgtgtgggactgggacagcaacggcaagcacgacttcatcggcgagttcaccagcaccttcaaggagatgagaggcgccatggagggcaagcaggtgcagtgggagtgcatcaaccccaagtacaaggccaagaagaagaactacaagaacagcggcaccgtgatcctgaacctgtgcaagatccacaagatgcacagcttcctggactacatcatgggcggctgccagatccagttcaccgtggccatcgacttcaccgccagcaacggcgaccccagaaacagctgcagcctgcactacatccacccctaccagcccaacgagtacctgaaggccctggtggccgtgggcgagatctgccaggactacgacagcgacaagatgttccccgccttcggcttcggcgccagaatcccccccgagtacaccgtgagccacgacttcgccatcaacttcaacgaggacaaccccgagtgcgccggcatccagggcgtggtggaggcctaccagagctgcctgcccaagctgcagctgtacggccccaccaacatcgcccccatcatccagaaggtggccaagagcgccagcgaggagaccaacaccaaggaggccagccagtacttcatcctgctgatcctgaccgacggcgtgatcaccgacatggccgacaccagagaggccatcgtgcacgccagccacctgcccatgagcgtgatcatcgtgggcgtgggcaacgccgacttcagcgacatgcagatgctggacggcgacgacggcatcctgagaagccccaagggcgagcccgtgctgagagacatcgtgcagttcgtgcccttcagaaacttcaagcacgccagccccgccgccctggccaagagcgtgctggccgaggtgcccaaccaggtggtggactactacaacggcaagggcatcaagcccaagtgcagcagcgagatgtacgagagcagcagaaccctggccccctag

SEQ ID NO: 107812 - DNA, 1728 bp, Artificial Sequence
  derived and/or modified sequence
atggccgtggagcccagcagcagcgagagcatcaagagaagagccggcagaagaatgaagaagatgagcaacatctacgagagcgccgccaacaccctgggcatcttcaacagcccctgcctgaccaaggtggagctgagagtggcctgcaagggcatcagcgacagagacgccctgagcaagcccgacccctgcgtgatcctgaagatgcagagccacggccagtggttcgaggtggacagaaccgaggtgatcagaacctgcatcaaccccgtgtacagcaagctgttcaccgtggacttctacttcgaggaggtgcagagactgagattcgaggtgcacgacatcagcagcaaccacaacggcctgaaggaggccgacttcctgggcggcatggagtgcaccctgggccagatcgtgagccagagaaagctgagcaagagcctgctgaagcacggcaacaccgccggcaagagcagcatcaccgtgatcgccgaggagctgagcggcaacgacgactacgtggagctggccttcaacgccagaaagctggacgacaaggacttcttcagcaagagcgaccccttcctggagatcttcagaatgaacgacgacgccacccagcagctggtgcacagaaccgaggtggtgatgaacaacctgagccccgcctggaagagcttcaaggtgagcgtgaacagcctgtgcagcggcgaccccgacagaagactgaagtgcatcgtgtgggactgggacagcaacggcaagcacgacttcatcggcgagttcaccagcaccttcaaggagatgagaggcgccatggagggcaagcaggtgcagtgggagtgcatcaaccccaagtacaaggccaagaagaagaactacaagaacagcggcaccgtgatcctgaacctgtgcaagatccacaagatgcacagcttcctggactacatcatgggcggctgccagatccagttcaccgtggccatcgacttcaccgccagcaacggcgaccccagaaacagctgcagcctgcactacatccacccctaccagcccaacgagtacctgaaggccctggtggccgtgggcgagatctgccaggactacgacagcgacaagatgttccccgccttcggcttcggcgccagaatcccccccgagtacaccgtgagccacgacttcgccatcaacttcaacgaggacaaccccgagtgcgccggcatccagggcgtggtggaggcctaccagagctgcctgcccaagctgcagctgtacggccccaccaacatcgcccccatcatccagaaggtggccaagagcgccagcgaggagaccaacaccaaggaggccagccagtacttcatcctgctgatcctgaccgacggcgtgatcaccgacatggccgacaccagagaggccatcgtgcacgccagccacctgcccatgagcgtgatcatcgtgggcgtgggcaacgccgacttcagcgacatgcagatgctggacggcgacgacggcatcctgagaagccccaagggcgagcccgtgctgagagacatcgtgcagttcgtgcccttcagaaacttcaagcacgccagccccgccgccctggccaagagcgtgctggccgaggtgcccaaccaggtggtggactactacaacggcaagggcatcaagcccaagtgcagcagcgagatgtacgagagcagcagaaccctggccccctag

SEQ ID NO: 107813 - DNA, 2564 bp, Artificial Sequence
  derived and/or modified sequence
atctctctgtgagaagctgccatctccccgccacccgctcgtccccttctctttctgccaccctcctttccttcctccctcgctccactccactccctccctcttttctcagtaccctcctctttactctccgagttaactgagagccgacctgacatctccaacattttcaccctcttcccccacccccatcaccgagaatggagtcagggtttccggagagaccgaactctgctctcagcacctttcccagccgctgttgctaaactgacctcggaggacgagaggggaaggaggtgcgacgccccttacatcagtacaaaactaccacaccaaccacctccacttcaaagccggattttgcatcctgggggcgggacagacctcgtcccgggctgaattctctctccactcttcgagattggcacacccagaatgaagaagatgagcaacatttatgagtccgctgccaacacactgggaatctttaacagcccctgcctgaccaaagttgagctgcgtgtggcgtgcaaaggcatttctgacagagatgccctttccaaaccagacccctgtgtcatcctcaagatgcagtctcatgggcagtggtttgaggttgacaggactgaggtgattcgcacctgcataaacccagtgtactcaaaactgtttactgtggacttttactttgaggaggtgcagcgcctgcggtttgaagtccatgacatcagcagcaaccacaatgggctgaaggaggccgacttccttggtggcatggagtgcacacttggccagattgtttcccagagaaagctgtccaaatccttgctgaagcatgggaacacagcagggaaatcttccatcacggtgattgctgaagaattatctggcaatgacgactatgttgagcttgcattcaatgcacggaaattggatgacaaggatttcttcagtaaatctgacccatttctggaaatttttcgtatgaatgatgatgcaactcagcagctggtgcaccgaactgaggttgtgatgaataacttaagcccagcctggaaatcattcaaagtatctgtaaattctctatgcagcggagacccagaccgccggctaaagtgcatagtatgggactgggactccaatggcaagcatgacttcattggagaattcacctcgacattcaaggagatgagaggagcaatggaagggaaacaggtgcagtgggagtgcatcaatcccaagtacaaagccaagaagaagaattacaagaactcaggcactgtgattctgaatctgtgcaagattcacaagatgcattctttcttggactacatcatgggtggctgccaaatccagtttacagtagctatagatttcactgcctcaaacggggaccccaggaacagctgttccttgcactacatccacccttaccaacccaatgagtatctgaaagctttggtagctgtgggggagatttgccaagactatgacagtgacaaaatgttccctgcctttgggtttggcgccaggatacctccagagtacacggtctctcatgactttgcaatcaactttaatgaagacaacccagaatgtgcaggaattcaaggagttgtggaagcctatcagagctgtcttcctaagctccaactctacggtcccaccaacattgcccccatcatccagaaggttgccaagtcagcgtcagaggaaactaacaccaaggaggcatcgcaatacttcatcctgctgatcctgacagatggtgttatcacagacatggccgacacccgggaggccattgtccatgcctcccacctccccatgtcagtcatcatcgtgggagtagggaacgctgacttcagtgacatgcagatgctggacggtgatgatgggattctgaggtcacccaagggagagcctgttcttcgagacatcgtccagttcgtgcccttcaggaacttcaaacacgcatctccagctgccctggcaaagagcgtgctggctgaagtcccaaaccaagttgtggactattacaatggcaaaggaattaaaccaaaatgttcatcagaaatgtatgaatcttccagaacactagcaccatgaactccccacacagttttacagagttctgaaatactattcctgctaatatttcatatttaatacttctactactcctgtactttaaaaaaccaacaacatatacacatttaaaaatagcacgttttggtgatttttaactatctgacaattttttttgcatgtgtagccctgaggcctggatctgttaagcccttgtattgttaactttttacaaagaaacacagataacaataacttactatttacattacagcatgtcgccttgaaataaaatggtatctgtatccattttttatacaggtttgttgaaattttgctaaatttcttatctttacactctaaagcattttgaaacatttactgaatgttgatagacgaaatatacttggttttatctgctataggatgagagactttttaaaatggcagatgcatggactgtattttgcatgttt

SEQ ID NO: 107814 - DNA, 2120 bp, Artificial Sequence
  derived and/or modified sequence
aatgctcaccctgactcattcagggaaggatccaaggtttttgatgcagggcactgactctctgcctgtttttccccttcatcatctgctccccttaaaaaatggtatcaactgcattgaaacccggcgagtgaatctacccagagctgaagcttcctttgcaacttgggaacaccagggccacagtgactttgtggcttggctttagataaatttgaccatggctgtagaacccagcagctcagaatccattaaaaggagagctgggaggagaatgaagaagatgagcaacatttatgagtccgctgccaacacactgggaatctttaacagcccctgcctgaccaaagttgagctgcgtgtggcgtgcaaaggcatttctgacagagatgccctttccaaaccagacccctgtgtcatcctcaagatgcagtctcatgggcagtggtttgaggttgacaggactgaggtgattcgcacctgcataaacccagtgtactcaaaactgtttactgtggacttttactttgaggaggtgcagcgcctgcggtttgaagtccatgacatcagcagcaaccacaatgggctgaaggaggccgacttccttggtggcatggagtgcacacttggccagattgtttcccagagaaagctgtccaaatccttgctgaagcatgggaacacagcagggaaatcttccatcacggtgattgctgaagaattatctggcaatgacgactatgttgagcttgcattcaatgcacggaaattggatgacaaggatttcttcagtaaatctgacccatttctggaaatttttcgtatgaatgatgatgcaactcagcagctggtgcaccgaactgaggttgtgatgaataacttaagcccagcctggaaatcattcaaagtatctgtaaattctctatgcagcggagacccagaccgccggctaaagtgcatagtatgggactgggactccaatggcaagcatgacttcattggagaattcacctcgacattcaaggagatgagaggagcaatggaagggaaacaggtgcagtgggagtgcatcaatcccaagtacaaagccaagaagaagaattacaagaactcaggcactgtgattctgaatctgtgcaagattcacaagatgcattctttcttggactacatcatgggtggctgccaaatccagtttacagtagctatagatttcactgcctcaaacggggaccccaggaacagctgttccttgcactacatccacccttaccaacccaatgagtatctgaaagctttggtagctgtgggggagatttgccaagactatgacagtgacaaaatgttccctgcctttgggtttggcgccaggatacctccagagtacacggtctctcatgactttgcaatcaactttaatgaagacaacccagaatgtgcaggaattcaaggagttgtggaagcctatcagagctgtcttcctaagctccaactctacggtcccaccaacattgcccccatcatccagaaggttgccaagtcagcgtcagaggaaactaacaccaaggaggcatcgcaatacttcatcctgctgatcctgacagatggtgttatcacagacatggccgacacccgggaggccattgtccatgcctcccacctccccatgtcagtcatcatcgtgggagtagggaacgctgacttcagtgacatgcagatgctggacggtgatgatgggattctgaggtcacccaagggagagcctgttcttcgagacatcgtccagttcgtgcccttcaggaacttcaaacacgcatctccagctgccctggcaaagagcgtgctggctgaagtcccaaaccaagttgtggactattacaatggcaaaggaattaaaccaaaatgttcatcagaaatgtatgaatcttccagaacactagcaccatgaactccccacacagttttacagagttctgaaatactattcctgctaatatttcatatttaatacttctactactcctgtactttaaaaaaccaacaacatatacacatttaaaaatagcacgttttggtgatttttaactatctgacaattttttttgcatgtgtagccctga

SEQ ID NO: 107815 - DNA, 5431 bp, Artificial Sequence
  derived and/or modified sequence
acaccagcggctggacattgagaggatcacagcagtggaaaaagacacaagcacctagccgttgagaggaacgcactggcctaagaacatactgacagacgccggtaggccagcagggcggcaggccatcaacccgcggaaggacacggactttggccagggcggtataaggagcctaaaggacgtcatacccatgggccagacctaacattcctttctgctgatcccaagtttttagacaaagtttcccttccttaaccaattgcgaatcagaaaatcctcgaatccaccaatgacctataccagtaaagatgtcatctggccaatttgtgtgaaaaaagagaataattctcatccaaaccgcctgtctctggaaataagaaaagctctgagggtctccaaagttaccagaggaaggctgaattttatggtgattgataatatttccaagcttatggagaaaaaaatatcattagtcttttccatggtagaaaagagtaaagcctgtaacaaaaaaagtgatacagtggatgggatgatgagacccttgaaataagcaaggatggaccagaaactggtaacactcacccatggaatttcattatgaagtcgtggcaagggccaagccgacctggatttgaaacccatctcttcaacgatgtagattttgacaacatatttgatttctctgggcctcagtttgttatctgcacaaaagggagatatgagtggttacgttattggattgtcatgaacattaaataggataatgtcaaatcattcagccaagtttctagcatatagtacaggttcaaatattatcttttttttcccaccaacctcttttccaggaaaatgcaaagctactctttagccaaattttaaaacaggggatatttattttgggaatcattaatacccatctgccccttttttggtccattggacatattgaaatgaatgattaatacttatcacttcatggtgtacacattgttttgtttcttatatccagagtctagtcctcaactctaaccaaagtaaaggaaactggaaagacacacgctttttcagtcattaatagaaagttgtccagaaacccggcgagtgaatctacccagagctgaagcttcctttgcaacttgggaacaccagggccacagtgactttgtggcttggctttagataaatttgaccatggctgtagaacccagcagctcagaatccattaaaaggagagctgggaggaggctcctgccatacgccagacagttttgtagacacgaaggatccagagattagcaacacctttaccatttttggtgacagttaagcacccatctaagaagttttctttggtgagtgccaaaaagtgtaactcccattccccccacacccgcgccgcgatacgaccgctccaccctagagtggagatggagaccaagcacttggagatctaaatcaagtgtccccaggagctcagttgagcgacaaagctgagcagaaagcccagactgcgggcgcggcaggaccacggagagcgccgccgccaaggcctgggcggggcctgagctcgggttcccggggcaatgctcgtctccgtcagcaacccccagggggcgctcgcgcggaggtttcggaaccagtctcttgccgggttgctgggtgcatgggattcgtcagaaggtggaaatctctctgtgagaagctgccatctccccgccacccgctcgtccccttctctttctgccaccctcctttccttcctccctcgctccactccactccctccctcttttctcagtaccctcctctttactctccgagttaactgagagccgacctgacatctccaacattttcaccctcttcccccacccccatcaccgagaatggagtcagggtttccggagagaccgaactctgctctcagcacctttcccagccgctgttgctaaactgacctcggaggacgagaggggaaggaggtgcgacgccccttacatcagtacaaaactaccacaccaaccacctccacttcaaagccggattttgcatcctgggggcgggacagacctcgtcccgggctgaattctctctccactcttcgagattggcacacccagaatgaagaagatgagcaacatttatgagtccgctgccaacacactgggaatctttaacagcccctgcctgaccaaagttgagctgcgtgtggcgtgcaaaggcatttctgacagagatgccctttccaaaccagacccctgtgtcatcctcaagatgcagtctcatgggcagtggtttgaggttgacaggactgaggtgattcgcacctgcataaacccagtgtactcaaaactgtttactgtggacttttactttgaggaggtgcagcgcctgcggtttgaagtccatgacatcagcagcaaccacaatgggctgaaggaggccgacttccttggtggcatggagtgcacacttggccagattgtttcccagagaaagctgtccaaatccttgctgaagcatgggaacacagcagggaaatcttccatcacggtgattgctgaagaattatctggcaatgacgactatgttgagcttgcattcaatgcacggaaattggatgacaaggatttcttcagtaaatctgacccatttctggaaatttttcgtatgaatgatgatgcaactcagcagctggtgcaccgaactgaggttgtgatgaataacttaagcccagcctggaaatcattcaaagtatctgtaaattctctatgcagcggagacccagaccgccggctaaagtgcatagtatgggactgggactccaatggcaagcatgacttcattggagaattcacctcgacattcaaggagatgagaggagcaatggaagggaaacaggtgcagtgggagtgcatcaatcccaagtacaaagccaagaagaagaattacaagaactcaggcactgtgattctgaatctgtgcaagattcacaagatgcattctttcttggactacatcatgggtggctgccaaatccagtttacagtagctatagatttcactgcctcaaacggggaccccaggaacagctgttccttgcactacatccacccttaccaacccaatgagtatctgaaagctttggtagctgtgggggagatttgccaagactatgacagtgacaaaatgttccctgcctttgggtttggcgccaggatacctccagagtacacggtctctcatgactttgcaatcaactttaatgaagacaacccagaatgtgcaggaattcaaggagttgtggaagcctatcagagctgtcttcctaagctccaactctacggtcccaccaacattgcccccatcatccagaaggttgccaagtcagcgtcagaggaaactaacaccaaggaggcatcgcaatacttcatcctgctgatcctgacagatggtgttatcacagacatggccgacacccgggaggccattgtccatgcctcccacctccccatgtcagtcatcatcgtgggagtagggaacgctgacttcagtgacatgcagatgctggacggtgatgatgggattctgaggtcacccaagggagagcctgttcttcgagacatcgtccagttcgtgcccttcaggaacttcaaacacgcatctccagctgccctggcaaagagcgtgctggctgaagtcccaaaccaagttgtggactattacaatggcaaaggaattaaaccaaaatgttcatcagaaatgtatgaatcttccagaacactagcaccatgaactccccacacagttttacagagttctgaaatactattcctgctaatatttcatatttaatacttctactactcctgtactttaaaaaaccaacaacatatacacatttaaaaatagcacgttttggtgatttttaactatctgacaattttttttgcatgtgtagccctgaggcctggatctgttaagcccttgtattgttaactttttacaaagaaacacagataacaataacttactatttacattacagcatgtcgccttgaaataaaatggtatctgtatccattttttatacaggtttgttgaaattttgctaaatttcttatctttacactctaaagcattttgaaacatttactgaatgttgatagacgaaatatacttggttttatctgctataggatgagagactttttaaaatggcagatgcatggactgtattttgcatgtttaaaataaaaaaagaaaaacccacatggtttttgcagttgttatctctaattcctccctgctgagaatggtctctctactaaagaagaggtttatttacttcttctttctgaggtgagtctttttgaggtaagtctgggtcatctagcccagcacctctcatactttatactgtgtacacaaatcacctgagagtcttattaaaattcagattgtgatacataggtctgtgtgggacccaagattctgcatctttaactaggtcccaggtgatgctaatgcagtccctggactataccaagaggagtgaggatctagactttagggtgtcatgatggagaccatcaaaaacagcgtggcttctagtctgcttgagaatggcacctcttcctgacagtagcacaaaagtcctgcctgtctccagaggtgacagtagaaagtaatgagactgactccagaagctgcacacctcaaatcagtctcgctgctttatactcacacctcttccttagataagactagaaagtgctcctcctggccagtccctgccctcttaaaagtggcatcacacaccactgcatggatggtgtcaatccctagaagtgatctcaaagcgtcttcactggaaccacaacaatagaaacttacacatggcaaatggctatgcagtacagctcccgatatctggtccactaaattgacctttgagcttagtgtgggaatttcttgcctcctttctatcacttctgagaacaaattctataagcagaaatgcctggaattattgtctggggtcgaggtgttttgtttcaatataagctggccagtctggaaccaaaaggacgaatgtttaacttgtataatcttcttgcagggaaacaggcaagtgtttttgcaagcataaaaggcacaaagtggagtttatttttggtcagagagatgaagaagtaaatcacaaggcaaaatttgttgtttgtttgaagaggggagcagtattaacaagcaaataaaatgccttctatgatttccacagttacaattatagatcctaatcttgcaaatacatgtcaccaaatgcacaacattttgggaatgatggtaaaattgtatgactgaaaaaatcataaatatttaagctatattgttttattaataaattgggtacttacagaattct

SEQ ID NO: 107816 - DNA, 2230 bp, Artificial Sequence
  derived and/or modified sequence
gagtctagtcctcaactctaaccaaagtaaaggaaactggaaagacacacgctttttcagtcattaatagaaagttgtccagaaacccggcgagtgaatctacccagagctgaagcttcctttgcaacttgggaacaccagggccacagtgactttgtggcttggctttagataaatttgaccatggctgtagaacccagcagctcagaatccattaaaaggagagctgggaggagaatgaagaagatgagcaacatttatgagtccgctgccaacacactgggaatctttaacagcccctgcctgaccaaagttgagctgcgtgtggcgtgcaaaggcatttctgacagagatgccctttccaaaccagacccctgtgtcatcctcaagatgcagtctcatgggcagtggtttgaggttgacaggactgaggtgattcgcacctgcataaacccagtgtactcaaaactgtttactgtggacttttactttgaggaggtgcagcgcctgcggtttgaagtccatgacatcagcagcaaccacaatgggctgaaggaggccgacttccttggtggcatggagtgcacacttggccagattgtttcccagagaaagctgtccaaatccttgctgaagcatgggaacacagcagggaaatcttccatcacggtgattgctgaagaattatctggcaatgacgactatgttgagcttgcattcaatgcacggaaattggatgacaaggatttcttcagtaaatctgacccatttctggaaatttttcgtatgaatgatgatgcaactcagcagctggtgcaccgaactgaggttgtgatgaataacttaagcccagcctggaaatcattcaaagtatctgtaaattctctatgcagcggagacccagaccgccggctaaagtgcatagtatgggactgggactccaatggcaagcatgacttcattggagaattcacctcgacattcaaggagatgagaggagcaatggaagggaaacaggtgcagtgggagtgcatcaatcccaagtacaaagccaagaagaagaattacaagaactcaggcactgtgattctgaatctgtgcaagattcacaagatgcattctttcttggactacatcatgggtggctgccaaatccagtttacagtagctatagatttcactgcctcaaacggggaccccaggaacagctgttccttgcactacatccacccttaccaacccaatgagtatctgaaagctttggtagctgtgggggagatttgccaagactatgacagtgacaaaatgttccctgcctttgggtttggcgccaggatacctccagagtacacggtctctcatgactttgcaatcaactttaatgaagacaacccagaatgtgcaggaattcaaggagttgtggaagcctatcagagctgtcttcctaagctccaactctacggtcccaccaacattgcccccatcatccagaaggttgccaagtcagcgtcagaggaaactaacaccaaggaggcatcgcaatacttcatcctgctgatcctgacagatggtgttatcacagacatggccgacacccgggaggccattgtccatgcctcccacctccccatgtcagtcatcatcgtgggagtagggaacgctgacttcagtgacatgcagatgctggacggtgatgatgggattctgaggtcacccaagggagagcctgttcttcgagacatcgtccagttcgtgcccttcaggaacttcaaacacgcatctccagctgccctggcaaagagcgtgctggctgaagtcccaaaccaagttgtggactattacaatggcaaaggaattaaaccaaaatgttcatcagaaatgtatgaatcttccagaacactagcaccatgaactccccacacagttttacagagttctgaaatactattcctgctaatatttcatatttaatacttctactactcctgtactttaaaaaaccaacaacatatacacatttaaaaatagcacgttttggtgatttttaactatctgacaattttttttgcatgtgtagccctgaggcctggatctgttaagcccttgtattgttaactttttacaaagaaacacagataacaataacttactatttacattacagcatgtcgccttgaaataaaatggtatctgtatccattttttatacaggtttgttgaaattttgcta

SEQ ID NO: 107817 - DNA, 1674 bp, Artificial Sequence
  derived and/or modified sequence
atgaagaagatgtctaacatctatgaatccgctgccaataccttgggcattttcaactcaccttgtctgactaaggttgaattgagggtggcgtgcaaaggaataagtgatagggatgctctgagtaagcctgatccttgcgtgatcctcaagatgcaatctcatggtcaatggttcgaagtagatcgaaccgaggtgatccgaacatgcataaacccagtctactctaaattgttcaccgtggacttttacttcgaggaggttcagcgcctacggttcgaagtgcatgatatcagttccaaccacaatggactcaaagaggccgatttcctgggggggatggagtgtacccttggacaaatcgttagtcagagaaagctctcgaaatctctactcaagcacgggaacactgctggaaaatcatcgatcactgtgattgcagaggaactgagcggcaatgacgactacgtggagctggcttttaatgcgcgaaagttagatgataaagacttcttttcaaagtccgaccccttccttgagatttttagaatgaacgacgatgctactcagcaattagtccatcgcacagaagtggtcatgaacaacctctcccctgcctggaagtctttcaaggtaagtgtgaatagcctgtgtagtggggaccctgatagacggctgaagtgtattgtgtgggattgggattcaaacgggaagcacgatttcattggggagttcacgtcaacttttaaggagatgagaggcgccatggagggcaagcaggtgcaatgggagtgcattaaccccaagtataaagcgaagaagaagaactacaagaactcagggaccgttattttgaatctgtgcaaaattcacaaaatgcacagtttcctggattacatcatgggcggttgccagattcagttcaccgtggccatcgattttaccgcctccaacggtgacccacgcaactcttgtagcctccattatatacatccctaccagcccaatgagtaccttaaggccctggtggcagtgggcgagatctgtcaggattacgacagtgacaagatgttccctgcatttggcttcggggctaggattccccctgagtatacagtcagccatgactttgccatcaactttaatgaagacaatccggagtgtgcaggcattcagggcgttgtagaagcttatcagtcttgtctgcccaagctccagttgtatggacctaccaacattgcccccataatccaaaaggtcgcgaagtccgcctcagaggagacaaacacaaaggaggcttctcaatattttattttattaattctgacggatggggtgataacggacatggcggacactcgggaggctattgtgcacgccagccacctccccatgtctgtgattatcgttggggtcggcaacgcagacttcagcgatatgcagatgcttgacggcgacgatgggattttgcgttccccaaaaggggaaccggtgctgcgcgacatcgttcagtttgtcccattccgtaactttaaacacgcatcacccgcggccctcgctaagtcagtgttagctgaagtgccgaatcaggttgttgactattacaacggaaaagggattaaacccaagtgctcatccgaaatgtatgagagcagtagaacactggcaccctag

SEQ ID NO: 107818 - DNA, 1728 bp, Artificial Sequence
  derived and/or modified sequence
atggccgtagaaccttccagctcagaatctataaagaggcgggctggcagaaggatgaaaaagatgagtaatatctatgagtccgcagctaatacactgggaattttcaactccccgtgcctgaccaaggtggagttgcgggtggcttgcaagggcatctctgatcgcgatgctctgtccaagcctgacccttgtgtcattctgaagatgcagtctcacgggcagtggtttgaggtagatcgaactgaggtcatccggacctgtataaacccagtgtactctaagctttttactgtcgacttttacttcgaagaagtgcagaggctgagattcgaagttcacgacatcagctccaatcacaacggactgaaggaagccgacttcctgggagggatggagtgtactctgggacagatcgtatctcagagaaagttgtctaagtccctgcttaaacacggcaacaccgccggaaagagcagtatcaccgttattgctgaggagctctctggaaatgacgactatgtagagctcgcattcaacgcaaggaaactggatgataaggacttctttagcaagagcgaccccttcctcgagatctttcgaatgaatgacgacgccacgcagcagctggtgcatcgcacagaagttgtaatgaataacctatcaccagcttggaagagtttcaaagtgagtgtcaattccctctgcagtggtgatccagaccgcaggctgaagtgcatagtgtgggactgggattcgaatggaaaacacgatttcataggtgagttcacttccacgttcaaggaaatgcgaggagctatggagggcaagcaggtgcagtgggaatgtataaatccaaagtataaagcgaaaaagaagaactacaagaattccggtactgtcattctgaacttatgtaagatccataaaatgcacagctttctcgactatatcatgggcggctgccagatccagtttactgtcgctatcgactttacggccagcaacggagatccccgtaattcatgcagcctccactacatacatccttatcagcccaatgagtacctgaaggccctcgtggccgtaggcgaaatctgtcaggattacgattcggacaaaatgttccccgcgttcggattcggtgcacgaattccccctgagtatactgtttcgcacgatttcgccatcaattttaacgaagataaccctgagtgcgctggtatccagggagtggtggaggcttatcagtcttgcctccctaaacttcagctgtatggacctactaacatcgcccccattatccaaaaggtagctaaaagcgccagtgaggagaccaacactaaagaagcctcccagtattttattctcctcattttgacagacggcgtgataacagacatggccgatacacgcgaagcaattgtgcatgcaagccacctgcccatgtcagtgattattgtgggggttgggaatgccgacttcagcgatatgcagatgcttgacggggacgacggtattctccgttcacccaagggagaaccggtactgagagacatagtacaattcgtccctttccgcaacttcaaacatgcctccccagccgcactggcaaaatcagttctggccgaggtcccaaaccaagtcgtggactattataatggcaaggggattaagcctaagtgctcgagcgaaatgtatgagtcttctcggacactggccccttag

SEQ ID NO: 107819 - DNA, 1674 bp, Artificial Sequence
  derived and/or modified sequence
atgaaaaaaatgtctaacatttacgaaagtgcagctaatacgctaggaatttttaatagtccgtgtttaactaaagtggagttgcgcgtcgcttgtaagggcattagcgatcgggatgcccttagtaagcccgacccgtgcgtgattttgaagatgcagtcccacgggcagtggttcgaagtggatcggaccgaggtgattcgaacctgtataaaccctgtatactctaaactgttcacagtcgatttttatttcgaggaagtgcaacggctgcgctttgaagtccacgacatctcttccaatcataacggtttaaaggaggcagactttttgggcggtatggaatgtacactggggcagatagtttctcaacgcaaattgtcaaagtccctgctgaaacacgggaacacagcaggtaaatcaagtatcacagtgatcgccgaagaactgtccggtaatgatgattatgttgaactggcgttcaacgcacgcaaactcgacgataaagactttttcagcaagagcgatcctttcctggaaattttcagaatgaacgacgacgctacccagcaacttgtccatcgcacagaggtggtaatgaataatctcagccccgcctggaaatctttcaaggtatcagttaactccctgtgctcgggtgatcctgatcggcgtctgaagtgtatcgtctgggactgggacagtaacggaaagcacgattttattggggagttcactagtacctttaaagaaatgcggggtgcaatggaagggaagcaagtgcagtgggagtgtattaaccccaaatataaggccaagaagaagaactataagaatagtggcactgtaattttgaacctgtgcaaaatccataagatgcatagtttcctggactatattatgggcgggtgtcagattcagtttacagttgccatagatttcacagcttccaacggggatcctcgcaactcctgtagtctccactacattcatccataccagcctaacgaatacctaaaggcgttggtggcggtcggcgagatctgccaggattacgactcagacaagatgttcccagcctttgggttcggcgcccgtatcccacccgagtacaccgtcagtcacgactttgcaattaatttcaatgaagataatcctgaatgtgctggcatccagggagtggtggaagcatatcagagctgtctgccgaagcttcagctgtatggtcccacaaacatagccccgattatccaaaaagttgctaaaagcgcctctgaggagaccaacacgaaagaggcatcccagtactttatcctcctgatcctgactgacggagtgattacagacatggctgacacgagggaagccatagtgcacgcaagtcaccttcccatgtccgtaataattgtgggcgtgggcaacgccgatttctctgacatgcaaatgctggatggcgacgatggaatcttgcggagccctaaaggggagccagtgttacgcgatatagtgcaattcgtgccttttaggaattttaagcacgcctctcccgcggctttggctaaatccgtcttggctgaggtgccgaaccaggtggtggattattacaatggcaagggaatcaaaccaaaatgttcaagcgagatgtatgagagttccaggactctggctccatag

SEQ ID NO: 107820 - DNA, 1728 bp, Artificial Sequence
  derived and/or modified sequence
atggctgtggaacctagttcttccgaaagcattaagcgccgggccgggcggcggatgaaaaagatgtccaatatctatgagtccgccgcaaacaccttgggtatctttaatagtccatgtcttactaaagtggaactacgggttgcatgcaaggggatcagtgaccgcgacgcactgtccaaacccgacccttgcgtcatcctgaagatgcagagccacggccaatggttcgaagtcgataggacagaggttataaggacgtgcatcaaccccgtgtactctaaactgttcacagtggacttctattttgaggaagttcagcggctgagatttgaggtgcacgacatctccagcaaccacaacggattgaaagaggctgattttctcggtggcatggaatgcacgttaggccagattgtgtcccagcgtaagttgtctaaatcacttcttaaacacggaaataccgcgggaaagtcatcaattaccgttatcgcggaggaactttcgggaaacgatgattacgttgagcttgccttcaacgcccgaaagctcgacgacaaggatttttttagcaagagtgacccctttctcgagattttccgaatgaatgatgatgccacgcagcagttagtgcaccggacggaagtggtgatgaacaatctgtcaccggcttggaagagctttaaagtgagtgtgaactcactgtgctctggagatcctgacaggcgtcttaagtgcatcgtgtgggactgggatagtaatggtaagcacgactttatcggcgaatttacatctacattcaaagagatgagaggggccatggagggcaagcaggttcagtgggaatgcattaatcctaagtataaggccaaaaaaaaaaactacaaaaattccggcaccgtcatcctgaatctgtgcaaaatacataagatgcactcatttctcgactatattatggggggatgccaaatacagtttacagtggcaatagattttaccgcgtcaaacggcgatcctcggaactcctgttccttgcattacatacacccataccagccaaatgaatatctgaaagccctggtcgctgtgggcgagatctgtcaggattatgactccgacaagatgttccctgcattcggttttggtgctcgtatccctccggaatacactgtttcccatgacttcgctattaatttcaatgaagacaacccagagtgcgctggcatccaaggggtggttgaggcatatcagtcctgtcttcccaagttgcagctatacggccctaccaacatcgctcccataatacagaaggtcgcaaaatctgctagcgaggaaacgaatacaaaagaagcctcccaatattttatcttacttatcctaaccgacggcgttatcactgatatggcagacacccgtgaggcaattgtccacgccagccatctccccatgagcgtgattatagtgggagtcggaaacgccgattttagcgacatgcaaatgcttgacggtgatgatggtattttgcgcagtccaaagggagagcccgttctaagagatatagtacagtttgtgcctttccgcaattttaagcatgctagccccgccgcattggccaagtctgttctcgcggaagtgcccaaccaggttgtggattattacaacggtaaaggcattaaaccaaaatgcagctcagagatgtatgagagctctcgcaccctggccccttag

SEQ ID NO: 107821 - DNA, 1674 bp, Artificial Sequence
  derived and/or modified sequence
atgaagaagatgagcaacatctatgagagcgctgccaacaccctgggcatcttcaacagcccctgcctgaccaaggtggagctgcgggtggcctgcaagggcatcagtgacagagatgccctgagcaagccagacccctgtgtgatcctgaagatgcagagccacggccagtggtttgaggtggacagaacagaggtgatccgcacctgcatcaaccctgtgtacagcaagctgttcaccgtggacttctactttgaggaggtgcagaggctgcgctttgaggtgcatgacatcagcagcaaccacaacggcctgaaggaggccgacttcctgggcggcatggagtgcaccctgggccagatcgtgtcccagaggaagctgagcaagagcctgctgaagcacggcaacacagctgggaagagcagcatcaccgtgattgctgaggagctgtctggaaatgatgattatgtggagctggccttcaatgccaggaagctggatgacaaggacttcttcagcaagagtgaccccttcctggagatcttcaggatgaatgatgatgccacccagcagctggtgcacaggacagaggtggtgatgaacaacctgagccctgcctggaagagcttcaaggtgtctgtgaacagcctgtgcagcggggaccctgaccggcggctgaagtgcatcgtgtgggactgggacagcaatggcaagcatgacttcatcggggagttcaccagcaccttcaaggagatgagaggagccatggagggcaagcaggtgcagtgggagtgcatcaaccccaagtacaaggccaagaagaagaactacaagaacagcggcaccgtcatcctgaacctgtgcaagatccacaagatgcacagcttcctggactacatcatgggcggctgccagatccagttcaccgtggccatcgacttcaccgccagcaatggagaccccaggaacagctgcagcctgcactacatccacccctaccagcccaatgagtacctgaaggccctggtggccgtgggggagatctgccaggactatgacagcgacaagatgtttcctgcctttggatttggagcccgcatccccccagagtacacagtgtcccatgactttgccatcaacttcaatgaagacaacccagaatgtgccggcatccagggcgtggtggaggcctaccagagctgcctgcccaagctgcagctgtatggccccaccaacatcgcccccatcatccagaaggtggccaagagcgccagcgaggagaccaacaccaaggaggccagccagtacttcatcctgctgatcctgacagatggagtcatcacagacatggctgacacccgggaggccatcgtgcacgccagccacctgcccatgtctgtcatcatcgtgggcgtgggcaatgctgacttcagtgacatgcagatgctggatggagatgatggcatcctgcggagccccaagggggagcctgtgctgcgggacatcgtgcagtttgtgcccttcaggaacttcaagcacgccagccctgctgccctggccaagtctgtgctggccgaggtgcccaaccaggtggtggactactacaacgggaagggcatcaagcccaagtgcagcagcgagatgtatgagagcagcaggaccctggccccctag

SEQ ID NO: 107822 - DNA, 1728 bp, Artificial Sequence
  derived and/or modified sequence
atggctgtggagcccagcagcagcgagagcatcaagagaagagctggaagaaggatgaagaagatgagcaacatctatgagagcgctgccaacaccctgggcatcttcaacagcccctgcctgaccaaggtggagctgcgggtggcctgcaagggcatcagtgacagagatgccctgagcaagccagacccctgtgtgatcctgaagatgcagagccacggccagtggtttgaggtggacagaacagaggtgatccgcacctgcatcaaccctgtgtacagcaagctgttcaccgtggacttctactttgaggaggtgcagaggctgcgctttgaggtgcatgacatcagcagcaaccacaacggcctgaaggaggccgacttcctgggcggcatggagtgcaccctgggccagatcgtgtcccagaggaagctgagcaagagcctgctgaagcacggcaacacagctgggaagagcagcatcaccgtgattgctgaggagctgtctggaaatgatgattatgtggagctggccttcaatgccaggaagctggatgacaaggacttcttcagcaagagtgaccccttcctggagatcttcaggatgaatgatgatgccacccagcagctggtgcacaggacagaggtggtgatgaacaacctgagccctgcctggaagagcttcaaggtgtctgtgaacagcctgtgcagcggggaccctgaccggcggctgaagtgcatcgtgtgggactgggacagcaatggcaagcatgacttcatcggggagttcaccagcaccttcaaggagatgagaggagccatggagggcaagcaggtgcagtgggagtgcatcaaccccaagtacaaggccaagaagaagaactacaagaacagcggcaccgtcatcctgaacctgtgcaagatccacaagatgcacagcttcctggactacatcatgggcggctgccagatccagttcaccgtggccatcgacttcaccgccagcaatggagaccccaggaacagctgcagcctgcactacatccacccctaccagcccaatgagtacctgaaggccctggtggccgtgggggagatctgccaggactatgacagcgacaagatgtttcctgcctttggatttggagcccgcatccccccagagtacacagtgtcccatgactttgccatcaacttcaatgaagacaacccagaatgtgccggcatccagggcgtggtggaggcctaccagagctgcctgcccaagctgcagctgtatggccccaccaacatcgcccccatcatccagaaggtggccaagagcgccagcgaggagaccaacaccaaggaggccagccagtacttcatcctgctgatcctgacagatggagtcatcacagacatggctgacacccgggaggccatcgtgcacgccagccacctgcccatgtctgtcatcatcgtgggcgtgggcaatgctgacttcagtgacatgcagatgctggatggagatgatggcatcctgcggagccccaagggggagcctgtgctgcgggacatcgtgcagtttgtgcccttcaggaacttcaagcacgccagccctgctgccctggccaagtctgtgctggccgaggtgcccaaccaggtggtggactactacaacgggaagggcatcaagcccaagtgcagcagcgagatgtatgagagcagcaggaccctggccccctag

SEQ ID NO: 107823 - DNA, 1674 bp, Artificial Sequence
  derived and/or modified sequence
atgaagaagatgagcaacatctacgagagcgccgccaacaccctggggatctttaattcaccctgtctgaccaaagtcgagctaagggtggcctgcaagggaatatccgatcgggacgctcttagtaaacctgacccatgcgtgattctgaaaatgcaaagtcacgggcagtggttcgaagtggatagaaccgaagtaatccgtacctgcataaacccggtgtactcgaagttatttacagtagatttttacttcgaagaagtgcagcgattacggtttgaggttcatgacatctcaagtaaccacaatgggctgaaagaggctgacttcctcgggggcatggagtgcactcttggccagatcgtatcccagcgtaagcttagcaagagcctgcttaaacacggaaacaccgcagggaaaagctctatcaccgtcattgccgaggaactctctgggaacgacgactatgtggagctggcgttcaatgcccgcaagctggatgataaagatttcttttctaaaagcgatcccttcctggaaatctttagaatgaacgatgacgcaacacaacagctcgtacacagaaccgaagtggttatgaataacttaagcccagcctggaaatcattcaaggtgtccgtgaacagcctatgttccggagacccagacaggcgtctgaagtgcatcgtgtgggactgggacagcaatggtaagcacgactttattggcgaatttacttccacattcaaggaaatgcgcggagcgatggaaggtaaacaagttcaatgggagtgtattaaccccaagtataaagctaaaaagaaaaattacaaaaattctggcacagttatcctgaacctttgcaagattcacaagatgcacagcttcctcgactatatcatggggggatgccagattcagtttacagtggcaatcgatttcactgcttcaaacggcgatcccaggaattcctgcagccttcactacatccacccctatcagccaaatgagtacctgaaagcactcgtcgccgtgggagaaatctgtcaggattatgatagtgacaaaatgtttccagcgtttggctttggagcaaggattccgcccgaatacactgtaagccacgatttcgccatcaatttcaacgaggacaatccggagtgtgccggcatccagggggttgtagaggcataccagagctgccttcctaaactccagctgtatggacccacaaacattgctcccataatccaaaaagtggcaaaatccgcttcagaagagacaaatactaaagaggcctctcagtatttcatcctcctgattctgacagacggcgtcatcaccgatatggctgatacccgcgaagccatcgtgcacgcctcccatctgcccatgtccgtcattatcgtcggagtgggaaatgcagactttagcgacatgcagatgctggacggggacgacgggattttaagaagcccaaagggtgagcccgttttgagagatattgtgcagttcgtcccatttcgcaattttaagcacgccagcccagcagccttggcaaaaagtgtcctggccgaagtgccgaaccaagtggtggactactacaatggtaaaggaatcaaacccaagtgttccagcgagatgtatgaaagttcacgcacactcgctccctag

SEQ ID NO: 107824 - DNA, 1728 bp, Artificial Sequence
  derived and/or modified sequence
atggccgtggagcccagcagcagcgagagcatcaagcggcgggccggcaggcggatgaagaagatgagcaacatttatgagagtgccgccaacactctgggaatattcaatagtccctgtctgactaaggtggagctgagggtggcatgcaagggaattagcgaccgcgacgcgctaagcaagccagatccttgcgtgatcctgaaaatgcagtcccacgggcagtggtttgaggtggacagaacagaggtgattcgtacctgtataaaccccgtgtactcaaaactttttactgtggatttttactttgaagaggtacagaggctgcgctttgaggtgcacgatatctccagcaatcacaatggtttgaaggaggccgatttccttggaggaatggagtgtaccctcggccagattgtgagccagaggaaacttagcaagtccctcttaaagcatggcaacacggcaggcaagtcctctattactgtgattgcagaagagctgtccggcaatgatgattacgttgaactggctttcaatgcacgaaagctcgacgacaaggatttcttttccaagagtgatccatttttggaaatatttagaatgaatgatgacgctacccagcagttagtccatcggaccgaggtggtgatgaacaatctttctccagcttggaaaagctttaaggtgtcagttaactcgctgtgtagcggcgatcccgatcgaagattaaagtgtatagtttgggactgggacagtaatggtaagcatgacttcattggcgaatttactagtacattcaaggaaatgcgtggagccatggaaggcaagcaagtccaatgggagtgcatcaatcccaaatacaaggcaaagaagaagaactacaagaactcaggaacagtaatactgaacttatgtaagattcataaaatgcattcgttcctagactacattatggggggatgtcaaattcagttcactgtggccatagactttacagcatccaacggggacccacggaatagctgctcgctccattatatccatccctaccagccgaatgaatatctgaaggcactggtagcggtgggcgaaatatgccaggattatgacagtgataagatgtttcctgcctttgggttcggagccagaatcccgccagagtacacagtgtctcacgacttcgcaattaactttaatgaagacaatcccgaatgcgccggaatacagggagttgtggaggcatatcagtcatgcctgccaaagctccagttgtacggaccaaccaacatcgcccctattattcagaaggtggctaagagtgcctccgaagaaaccaatacaaaggaggcgtctcaatattttatactcctgatcctgactgacggagtgattacagacatggccgacactagggaagcaatcgtacatgcctcgcatttgcctatgtccgttattatagtgggagtagggaacgcggatttctcagatatgcagatgctggacggcgacgatggcattttgcggtcccctaaaggcgagccagtgcttcgggacattgtgcagtttgttccctttaggaacttcaagcacgctagtcccgcggccttggccaaatccgtgctcgctgaggtccccaatcaggtcgtggattactacaatggcaaagggatcaagcctaagtgctcctcagagatgtatgaatcgagccgcaccctagccccatag

SEQ ID NO: 107825 - DNA, 1674 bp, Artificial Sequence
  derived and/or modified sequence
atgaagaagatgagcaacatctacgagagcgccgccaacaccctggggatcttcaatagcccgtgcctcactaaggttgagttgcgcgtcgcctgtaagggtatttcagatcgagatgcactctctaagccagatccatgcgtcattctcaagatgcaatctcatgggcagtggttcgaagtcgaccgaaccgaggtgatcaggacgtgtataaaccccgtgtatagtaaattgttcactgtggacttttatttcgaagaggtgcagcgactacggttcgaggttcatgacatcagttctaaccataatggcctcaaggaggcagattttctgggcggtatggagtgcaccctgggccagatcgtgagccagcggaaactcagcaagtccctcttgaaacatgggaataccgccggcaaaagttcgattacagtcatcgccgaagagcttagcggtaatgacgattatgtcgagctggcatttaacgcaagaaagctcgatgacaaagacttcttctccaagtccgaccccttcttggagatatttcgaatgaacgatgatgctactcagcagttagtgcaccgcaccgaagtggttatgaataacttaagtcctgcgtggaaaagtttcaaggtgtccgttaatagcctgtgcagtggcgaccctgataggcggctcaagtgtatagtttgggactgggattcgaacggcaaacacgacttcatcggtgaatttacctctaccttcaaagagatgaggggggctatggagggaaagcaagtccagtgggagtgcatcaaccccaaatacaaggctaagaagaagaattacaaaaattcgggtacagtgattctgaacctgtgtaaaattcataaaatgcactctttcctggactatattatgggcggctgtcagatccaatttacagtggcaatcgactttaccgcctccaacggcgaccctcggaacagctgctccctccactatattcacccctaccagccgaatgagtacttaaaggcattggttgcggtgggtgagatttgtcaagactatgattctgataagatgtttcctgcttttggattcggcgcaagaattcctcccgaatataccgtctcccacgactttgccattaattttaatgaggataaccccgagtgtgcgggaattcagggggtggttgaagcctaccagtcctgtctgcccaaactacagttgtacgggcctactaatattgcacccattattcaaaaggtggcgaagtcagcatctgaagaaacaaataccaaagaggccagccaatatttcatcctgctcatcctgacggacggggttattacagacatggcggatacgagagaggcgatagtacacgcctcacacttgccaatgtccgttatcattgtcggagtgggcaatgccgacttcagcgacatgcagatgctggatggtgatgacggaatactccgctcccccaagggagagcctgttttgcgggacattgtgcagtttgtaccttttaggaattttaaacatgccagcccagccgcactcgctaaatctgtattagccgaagtccccaatcaagttgtggattattacaacgggaaggggatcaaaccgaagtgttcctcagagatgtacgagagctcacgaaccctcgcaccgtag

SEQ ID NO: 107826 - DNA, 1728 bp, Artificial Sequence
  derived and/or modified sequence
atggccgtggagcccagcagcagcgagagcatcaagcggcgggccggccgacgcatgaaaaagatgtcgaacatctatgaaagcgccgccaatactctgggaatctttaacagcccgtgtttgacaaaagtggagctgagagtagcttgcaagggcatttccgatagggatgcactctctaagcccgatccatgtgtgatactgaaaatgcagagccacggccagtggttcgaggtggaccgaacagaggtgattagaacatgcattaatcccgtttattctaagctgtttactgttgatttttatttcgaggaagtacagcggttacggttcgaggtccatgacatctcatcaaaccacaatgggcttaaggaggccgacttcctcggcggcatggaatgtaccttgggtcagattgtcagtcaacggaaactgagcaagagcctactcaagcacggcaatactgccggtaagtcaagtatcaccgtaatcgctgaagagctgtcaggtaacgacgactacgtggagcttgccttcaatgcacgtaagctggacgataaagacttctttagcaagagtgatccctttctggagatatttcgtatgaacgatgatgcgactcagcaactggttcaccgcacagaggttgtgatgaacaatctttcgccagcctggaaaagcttcaaggtaagtgtcaactcattgtgtagcggggacccagatagacggttgaaatgtatcgtgtgggactgggactcaaatgggaagcatgacttcatcggggagttcacctcaacattcaaggaaatgaggggggccatggaagggaaacaggtacagtgggagtgcattaatccgaaatataaagccaaaaaaaagaattacaagaattcagggaccgtgatcctcaatttgtgtaagatccacaaaatgcattccttcctggactatattatggggggctgtcaaattcagtttacagtggccattgattttacggcctccaacggggatccgcgtaactcttgctccttgcattatatacacccgtatcaaccaaatgagtacctgaaggctctcgttgctgtcggagaaatttgtcaggactacgactcagacaagatgtttccagccttcggcttcggcgctaggattcctcccgaatacactgtctctcacgactttgctatcaacttcaacgaagacaaccctgagtgcgctggaatacagggcgtggtcgaggcctatcagagctgcttgcctaagctgcaactgtacggccccaccaacattgcccctataattcaaaaggtggccaagagtgccagcgaagagaccaataccaaagaagcatcacaatattttatcctactcatccttactgacggggtgattaccgacatggctgacaccagagaggcaatcgtgcacgcttctcatctccctatgtctgttattatcgtaggcgtaggaaacgcggatttttccgatatgcaaatgctggacggggacgacggaatcttaagatctccgaagggggagccagtgctgagggacatagttcaattcgttccttttcgcaatttcaaacatgcatccccagccgccctggccaagtccgtgttggctgaggtccctaatcaggtggtagactactataacgggaagggcatcaagcccaaatgtagcagtgagatgtacgagagttcacgtactctggccccctag

SEQ ID NO: 107827 - DNA, 1674 bp, Artificial Sequence
  derived and/or modified sequence
atgaagaaaatgtctaatatctacgagtccgcagcaaatacactaggcatatttaattctccctgtctaaccaaagtggaactcagagtggcctgtaaaggtatatcagacagggatgcactgagtaaaccagacccctgtgtgattctgaagatgcagtcacatggacagtggtttgaagtggaccgcactgaagttatcagaacctgtattaatccagtttactccaaattattcactgtggacttttactttgaagaggttcagcgcctccgattcgaagttcacgacatcagctccaatcacaacgggttgaaggaagccgatttcctggggggtatggaatgcaccttgggccagatcgtgtcacaacgaaagctgagcaagagcctgctgaagcatggaaacacagcaggaaaatcctctatcaccgtgattgccgaggaactatcagggaacgatgactatgttgagctagcgtttaatgcacggaagctggacgacaaggacttcttttctaagagtgatcctttcttggaaatattcagaatgaatgacgacgcaacacagcagctggtgcatagaacagaggtggtgatgaataacttgagccctgcttggaagtcatttaaagtttctgtgaacagcctgtgctcaggggaccctgaccggagattaaagtgcattgtgtgggactgggatagcaatggaaagcacgactttatcggggaattcacctccaccttcaaggaaatgcgtggggctatggaagggaaacaagtgcagtgggaatgcataaaccccaagtacaaggcaaaaaagaagaattataaaaatagcggaacagtaatcctcaatctctgcaaaattcataaaatgcattctttccttgattacataatgggcggttgccaaatacagtttactgtagctatcgacttcacagcttccaatggggacccgaggaatagttgctctctccattatatacacccatatcagcctaatgagtaccttaaggcgctggtcgctgtgggggaaatctgtcaagattatgactctgacaagatgtttccagcatttggtttcggtgcacgcattccacccgaatacactgtcagtcatgactttgctattaattttaacgaggataatccagagtgcgctggcatccagggcgttgtcgaggcataccagtcttgcctgcctaagttgcaactgtatggcccaaccaatattgcgcctattattcaaaaggtggcaaaatccgcttctgaagaaacgaatacaaaagaggcaagccaatactttatcctcctcatccttaccgatggtgtaatcaccgatatggccgacacacgggaagcaatagtccacgcatcccatctgccaatgtcagttattatagtgggtgtcggaaacgccgacttttccgacatgcagatgctggacggcgacgatgggatactccgcagccccaagggcgagccagtgctacgtgacatcgtgcaattcgtcccatttcgcaactttaaacatgcctcccccgctgccctggcaaaaagcgtacttgccgaggtgccaaatcaagtggtcgattactataatggcaagggaatcaaacctaaatgtagtagcgaaatgtatgagtcaagcaggaccttggccccttag

SEQ ID NO: 107828 - DNA, 1728 bp, Artificial Sequence
  derived and/or modified sequence
atggcggtagagccaagctccagtgagagcattaagcggcgagcaggtcgcagaatgaaaaagatgtcaaacatatacgagtcggcagctaacaccctgggaatctttaattctccctgcctgaccaaggtcgagttaagagtggcatgcaagggcatcagtgacagagacgctctttccaagcccgatccatgcgttatcctgaagatgcaatctcacggccaatggttcgaggtggaccgcacagaggtgatccgcacatgcattaatcccgtctattccaaattatttaccgtagacttttattttgaagaggtgcagaggcttcgctttgaagttcacgacattagctctaatcacaacggcttaaaagaggccgactttttgggcggtatggagtgtaccttaggacaaatcgtaagccagcggaaactgagcaaatctctcctgaagcacggcaatactgcgggaaagagttccataacagtcattgcagaagaactgagtggtaatgatgattatgtcgagctcgcttttaacgcccgaaagctggatgacaaagactttttcagcaagagtgacccatttttggaaatcttcaggatgaacgacgacgccacccagcagcttgtgcatcggacggaggtggtcatgaataacctctctccagcgtggaaatctttcaaggtgtccgtaaacagtttgtgttccggggaccccgacagacggctgaaatgcatcgtctgggactgggattcgaatgggaagcacgatttcattggggaattcacctcaacattcaaggaaatgaggggcgcaatggagggaaaacaggtgcagtgggagtgcatcaacccgaagtataaagctaaaaagaaaaactacaagaattctggtaccgttatcctgaatctgtgtaagatccataaaatgcacagttttttggactacatcatggggggttgtcaaattcagttcacagtagccatcgactttaccgcgtccaatggcgaccccagaaattcttgctccttacactacattcacccctatcaaccaaatgagtacctgaaggctctggtggctgtgggcgagatctgtcaggattatgacagcgataaaatgttccctgcctttggcttcggggcacgaattccacccgaatatactgtttcccacgacttcgctataaactttaatgaagacaaccccgagtgcgcagggatccaaggcgtggtggaagcatatcagagctgtctgccaaaactccagctctacggccctacaaatatagcaccaatcatccagaaggtggcaaagtccgcgagtgaagagaccaatacaaaggaggccagtcagtacttcatactgctcatacttactgatggtgtgattaccgacatggcggacacgcgcgaggccatagtacacgcctcccatctccccatgtccgtgataattgtgggggtgggcaacgctgacttctctgacatgcaaatgctcgacggggatgatggcatattgcggagtcctaaaggagagcccgtgctcagggatatagttcaatttgtccctttcaggaattttaaacatgctagtccagctgctctggccaagtcagtgttagctgaagtgcctaatcaggtagtagattactataacgggaagggaatcaagccaaagtgtagctctgaaatgtacgagagtagtcggaccctcgcaccttag

SEQ ID NO: 107829 - DNA, 1674 bp, Artificial Sequence
  derived and/or modified sequence
atgaaaaaaatgtctaatatttacgaatcggcagccaacacacttgggatctttaattcaccgtgcctgactaaagtggaactgagagtggcctgcaaaggaatcagcgatagagacgccctctcaaaacctgacccttgtgtaattcttaaaatgcagagccacggacagtggttcgaggtggacaggacagaagtgattcggacttgcattaatccagtctactccaagctgtttacagtggatttttacttcgaagaagtgcagagactgcgcttcgaggttcacgatatatcgtccaatcataacgggcttaaagaggctgattttctgggaggtatggagtgcaccctgggacaaatagttagccaaaggaagcttagcaaaagcctcctgaaacacggaaatactgcaggaaagtcgtcgataacggtcatcgccgaggagttaagcgggaatgatgattacgtcgaactcgctttcaatgccagaaaattggacgataaggatttctttagcaaatcggacccgtttttggagattttccgcatgaacgacgacgctactcagcaactcgtgcacaggactgaagtggtcatgaataatctgtcccccgcatggaaatcatttaaggtgtcggttaactctctgtgttctggagatcccgatagacgactaaaatgtatcgtgtgggattgggacagcaatggaaagcatgattttattggagaattcacaagcacattcaaggaaatgaggggggctatggagggcaaacaagtgcagtgggaatgtattaatcctaagtataaggcgaagaaaaaaaactacaaaaactccggaactgtgatacttaatctttgtaaaattcataagatgcactcttttttggattatatcatgggaggttgccagatccagtttacagtggctatagacttcacggccagcaatggtgacccacggaatagttgctccttgcattacatccatccttatcaacccaatgagtatctaaaagcccttgtcgccgtgggtgaaatctgtcaggattacgactcggacaaaatgtttccagccttcggattcggggctagaatacctccagagtacactgtgtcacacgactttgccattaatttcaatgaggacaacccagagtgtgccggaatccaaggcgttgtcgaggcttatcagagctgcctgccaaagctgcagctatatggccctacgaatattgccccaattattcagaaagttgcaaaaagtgcctctgaggagacaaatacaaaagaggcgagtcagtatttcattttactgatactgaccgatggggtgattacagacatggcggacacaagggaggccatcgtgcatgctagtcatctgcccatgtccgtgattatcgttggggtcgggaacgccgatttctcagacatgcagatgctggacggcgacgacggaatactccgatcaccgaaaggcgagccggtgctgagagatatagttcaatttgtgccctttcgtaatttcaagcacgcgtctcccgctgcgctggccaaatcagtccttgctgaagtgcctaatcaggtggtggattactacaatgggaagggcatcaagccaaagtgttcctccgagatgtatgaaagttctcgcaccctcgccccttag

SEQ ID NO: 107830 - DNA, 1728 bp, Artificial Sequence
  derived and/or modified sequence
atggcggttgagccatcctcctctgagagtataaaacggagagccggaagaagaatgaaaaaaatgtccaacatctatgaatcggccgctaacaccttagggatattcaactctccctgcttaacaaaagttgaattacgtgttgcttgcaagggcatctcagatcgggacgccctgtcaaagcctgacccctgcgtgatcctcaaaatgcaatcccacggccagtggtttgaggtggacagaacggaagtaataagaacatgcattaatccagtgtactcaaaactattcaccgtagatttctactttgaggaagtccagcgcctgcggttcgaagtccatgatatttcatccaatcacaacggcctgaaggaggccgatttcctagggggaatggagtgcaccctgggacagattgtttctcagagaaagctttccaagagccttcttaaacacgggaacaccgctggcaaatccagcatcaccgtgatcgctgaggaactatcaggcaatgatgattatgtagagcttgccttcaacgccaggaagctggacgacaaagatttcttcagcaagtccgatcctttcttggagatttttaggatgaacgatgatgctacacaacagctagtgcataggacggaggtggtgatgaataatttaagccctgcctggaagtcctttaaggttagcgtgaattccctgtgctctggtgacccagatcggagattgaaatgcattgtgtgggattgggatagtaacggcaagcacgattttattggcgagtttacttccacatttaaagagatgcggggagcaatggagggtaagcaggtgcagtgggagtgcattaaccccaagtacaaagctaagaagaaaaactacaagaactccgggactgtgatcctgaacctgtgcaagattcataagatgcattcttttttagattacatcatgggcggttgccagatccagtttacggtcgcaatcgacttcaccgcgagcaacggagatcctcggaatagctgctcgctccactatatacatccttatcagcctaatgagtatttgaaggctcttgtagccgtgggggagatttgtcaagactatgactcagataaaatgtttccagctttcggatttggtgcaaggatcccaccggaatacacagtgtctcatgattttgccatcaactttaacgaagacaatcctgaatgcgcagggatccagggggtggtggaagcctatcagtcctgcctcccaaaattgcagctgtacggcccaacaaacatcgctcccattattcaaaaggttgctaagagcgctagcgaggaaacgaatactaaggaagcctcccaatacttcatcctcctgatcttgacggatggtgtgataacagacatggcagatacccgggaggcaattgtgcatgcgtcacacttgccgatgagcgttataatcgtgggagttggcaatgcagacttcagtgatatgcaaatgctcgatggcgacgatggtattctgcggtcccccaaaggcgagccggtcttgagggatatcgtgcagtttgtgccgtttcggaattttaagcacgcaagcccagccgcactggccaagagcgtgctggcagaagtgcctaatcaggtcgttgattattacaacggaaaggggataaagcccaagtgttctagcgagatgtatgaatcctctaggaccctagcaccgtag

SEQ ID NO: 107831 - DNA, 708 bp, Artificial Sequence
  derived and/or modified sequence
atgaccttcgacctgaccaagatcaccaagaccagcagcagcttcgaggtgagaacctgggaccccgagggcgtgatcttctacggcgacaccaaccccaaggacgactggttcatgctgggcctgagagacggcagacccgagatccagctgcacaaccactgggcccagctgaccgtgggcgccggccccagactggacgacggcagatggcaccaggtggaggtgaagatggagggcgacagcgtgctgctggaggtggacggcgaggaggtgctgagactgagacaggtgagcggccccctgaccagcaagagacaccccatcatgagaatcgccctgggcggcctgctgttccccgccagcaacctgagactgcccctggtgcccgccctggacggctgcctgagaagagacagctggctggacaagcaggccgagatcagcgccagcgcccccaccagcctgagaagctgcgacgtggagagcaaccccggcatcttcctgccccccggcacccaggccgagttcaacctgagagacatcccccagccccacgccgagccctgggccttcagcctggacctgggcctgaagcaggccgccggcagcggccacctgctggccctgggcacccccgagaaccccagctggctgagcctgcacctgcaggaccaggagaagaccctgccccccctgttcgcctag

SEQ ID NO: 107832 - DNA, 708 bp, Artificial Sequence
  derived and/or modified sequence
atgaccttcgaccttacgaagatcaccaagactagcagcagtttcgaggtgcgtacttgggaccccgagggagtgatattctacggagacactaatcccaaggatgattggttcatgttgggccttcgcgacggccgcccggaaattcagcttcacaaccactgggcccagctgacagtgggcgccggaccaagactcgacgatggcagatggcaccaagttgaggtgaaaatggagggcgacagcgtgctgcttgaggttgacggagaagaggtgcttcggcttcggcaggtgtctggacctctgacctcgaaacggcacccaattatgcggattgccctgggaggtctgcttttccctgcatctaatctgcggctgcccctcgtgccagcactcgatggttgcctgaggcgcgatagctggctggataagcaggcggaaatctcagcgtctgcgccaacatccttgagatcctgtgacgtcgaatccaaccctggcatctttctaccacctggaacgcaggcggagtttaatctgcgggacatacctcagcctcatgccgaaccctgggcattctcgctggacttaggacttaaacaagccgcgggtagcgggcacctgctcgctctcggcacccccgagaaccccagttggctctctttacatctgcaagaccaagagaagaccctgccgcccctgttcgcttag

SEQ ID NO: 107833 - DNA, 708 bp, Artificial Sequence
  derived and/or modified sequence
atgacctttgacctgaccaagatcaccaagaccagcagcagctttgaggtgaggacctgggaccctgagggcgtcatcttctacggggacaccaaccccaaggatgactggttcatgctgggcctgagagatggccggcctgagatccagctgcacaaccactgggcccagctgactgtgggcgccggcccccggctggatgatggccgctggcaccaggtggaggtgaagatggagggggacagcgtgctgctggaggtggatggagaggaggtgctgcggctgcggcaggtgtctggccccctgaccagcaagaggcaccccatcatgagaattgccctgggcggcctgctcttccctgccagcaacctgcggctgcccctggtgcctgccctggatggctgcctgcggcgggacagctggctggacaagcaggccgagatcagcgccagcgcccccaccagcctgcggagctgtgatgtggagagcaaccctggcatcttcctgcccccaggcacccaggccgagttcaacctgcgggacatcccccagccccatgctgagccctgggccttcagcctggacctgggcctgaagcaggccgccggcagcggccacctgctggccctgggcaccccagagaaccccagctggctgagcctgcacctgcaggaccaggagaagaccctgccccccctgtttgcctag

SEQ ID NO: 107834 - DNA, 708 bp, Artificial Sequence
  derived and/or modified sequence
atgaccttcgacctgaccaagatcaccaagaccagcagcagcttcgaagtaaggacatgggacccagagggcgtgatcttctacggggataccaatccaaaggatgactggttcatgctgggactgcgggacgggagaccagagattcagctgcataaccattgggcccagctcacagtgggcgccggtcctcgcctggatgatggtcggtggcatcaggttgaggtgaaaatggaaggggactcagtattactggaggtggacggtgaggaggtcctaagactgagacaggtctctggcccgctgacctccaagaggcatcctataatgcgcatcgcactcggcggtctcctgtttcctgcatctaacctcagactgcctttagttccagctctggatggctgcctgaggcgtgactcctggctggacaaacaggcagaaataagcgcatcggcgcccacctcgttacgcagctgcgatgtcgagtctaatccaggaatctttctaccgcctggcacccaggcggaatttaatctacgggatattccccagccacacgctgagccctgggccttttcattggacctgggactgaaacaggctgccgggagcggccatctgctcgcgctgggcacacccgagaaccccagctggctgagtctgcacctgcaggatcaggagaagacactacccccactctttgcctag

SEQ ID NO: 107835 - DNA, 708 bp, Artificial Sequence
  derived and/or modified sequence
atgacgttcgatctgaccaagatcactaagacttcttcctccttcgaggtgaggacctgggatccggaaggtgtgattttctacggggacacgaacccaaaagatgattggtttatgctggggcttagagacggcagaccggagatccaattacacaatcactgggcacagttgacagtcggagccggacccagactggatgacggacggtggcaccaagttgaggtgaaaatggaaggcgactccgtgctgttagaagtggacggggaagaggtcctgaggctgcgtcaggtaagcgggcctttaacaagcaagagacatcctataatgaggatagcactggggggtctactcttccccgctagtaatctgcgactccccttagtaccagcgctggatggatgtctccgtagagactcttggctggataagcaggccgaaatatccgcgagcgcgcctaccagtctgcgctcatgcgatgtagaatccaaccccggtatatttctgcccccaggcacacaagccgagttcaacttacgggacattccacagccgcatgcggaaccctgggcctttagtctggatcttggcctaaagcaggctgcgggaagcgggcatctgctagccttgggtacacctgagaatccttcctggttatctctccatttacaagaccaagaaaagactctaccacccctctttgcttag

SEQ ID NO: 107836 - protein, 1069 aa, Artificial Sequence
  derived and/or modified sequence
MACPALGLEALQPLQPEPPPEPAFSEAQKWIEQVTGRSFGDKDFRTGLENGILLCELLNAIKPGLVKKINRLPTPIAGLDNIILFLRGCKELGLKESQLFDPSDLQDTSNRVTVKSLDYSRKLKNVLVTIYWLGKAANSCTSYSGTTLNLKEFEGLLAQMRKDTDDIESPKRSIRDSGYIDCWDSERSDSLSPPRHGRDDSFDSLDSFGSRSRQTPSPDVVLRGSSDGRGSDSESDLPHRKLPDVKKDDMSARRTSHGEPKSAVPFNQYLPNKSNQTAYVPAPLRKKKAEREEYRKSWSTATSPLGGERPFRSTSMFDMRCEEEAAVQPHSRARQEQLQLINNQLREEDDKWQDDLARWKSRRRSVSQDLIKKEEERKKMEKLLAGEDGTSERRKSIKTYREIVQEKERRERELHEAYKNARSQEEAEGILQQYIERFTISEAVLERLEMPKILERSHSTEPNLSSFLNDPNPMKYLRQQSLPPPKFTATVETTIARASVLDTSMSAGSGSPSKTVTPKAVPMLTPKPYSQPKNSQDVLKTFKVDGKVSVNGETVHREEEKERECPTVAPAHSLTKSQMFEGVARVHGSPLELKQDNGSIEINIKKPNSVPQELAATTEKTEPNSQEDKNDGGKSRKGNIELASSEPQHFTTTVTRCSPTVAFVEFPSSPQLKNDVSEEKDQKKPENEMSGKVELVLSQKVVKPKSPEPEATLTFPFLDKMPEANQLHLPNLNSQESPGTASVPLRVQNSWRRSQFFSQSVDSPSSEKSPVMTPFKFWAWDPEEERRRQEKWQQEQERLLQERYQKEQDKLKEEWEKAQKEVEEEERRYYEEERKIIEDTVVPFTVSSSSADQLSTSSSMTEGSGTMNKIDLGNCQDEKQDRRWKKSFQGDDSDLLLKTRESDRLEEKGSLTEGALAHSGNPVSKGVHEDHQLDTEAGAPHCGTNPQLAQDPSQNQQTSNPTHSSEDVKPKTLPLDKSINHQIESPSERRKSISGKKLCSSCGLPLGKGAAMIIETLNLYFHIQCFRCGICKGQLGDAVSGTDVRIRNGLLNCNDCYMRSRSAGQPTTL

SEQ ID NO: 107837 - DNA, 3210 bp, Artificial Sequence
  derived and/or modified sequence
atggcctgccccgccctgggcctggaggccctgcagcccctgcagcccgagcccccccccgagcccgccttcagcgaggcccagaagtggatcgagcaggtgaccggcagaagcttcggcgacaaggacttcagaaccggcctggagaacggcatcctgctgtgcgagctgctgaacgccatcaagcccggcctggtgaagaagatcaacagactgcccacccccatcgccggcctggacaacatcatcctgttcctgagaggctgcaaggagctgggcctgaaggagagccagctgttcgaccccagcgacctgcaggacaccagcaacagagtgaccgtgaagagcctggactacagcagaaagctgaagaacgtgctggtgaccatctactggctgggcaaggccgccaacagctgcaccagctacagcggcaccaccctgaacctgaaggagttcgagggcctgctggcccagatgagaaaggacaccgacgacatcgagagccccaagagaagcatcagagacagcggctacatcgactgctgggacagcgagagaagcgacagcctgagcccccccagacacggcagagacgacagcttcgacagcctggacagcttcggcagcagaagcagacagacccccagccccgacgtggtgctgagaggcagcagcgacggcagaggcagcgacagcgagagcgacctgccccacagaaagctgcccgacgtgaagaaggacgacatgagcgccagaagaaccagccacggcgagcccaagagcgccgtgcccttcaaccagtacctgcccaacaagagcaaccagaccgcctacgtgcccgcccccctgagaaagaagaaggccgagagagaggagtacagaaagagctggagcaccgccaccagccccctgggcggcgagagacccttcagaagcaccagcatgttcgacatgagatgcgaggaggaggccgccgtgcagccccacagcagagccagacaggagcagctgcagctgatcaacaaccagctgagagaggaggacgacaagtggcaggacgacctggccagatggaagagcagaagaagaagcgtgagccaggacctgatcaagaaggaggaggagagaaagaagatggagaagctgctggccggcgaggacggcaccagcgagagaagaaagagcatcaagacctacagagagatcgtgcaggagaaggagagaagagagagagagctgcacgaggcctacaagaacgccagaagccaggaggaggccgagggcatcctgcagcagtacatcgagagattcaccatcagcgaggccgtgctggagagactggagatgcccaagatcctggagagaagccacagcaccgagcccaacctgagcagcttcctgaacgaccccaaccccatgaagtacctgagacagcagagcctgcccccccccaagttcaccgccaccgtggagaccaccatcgccagagccagcgtgctggacaccagcatgagcgccggcagcggcagccccagcaagaccgtgacccccaaggccgtgcccatgctgacccccaagccctacagccagcccaagaacagccaggacgtgctgaagaccttcaaggtggacggcaaggtgagcgtgaacggcgagaccgtgcacagagaggaggagaaggagagagagtgccccaccgtggcccccgcccacagcctgaccaagagccagatgttcgagggcgtggccagagtgcacggcagccccctggagctgaagcaggacaacggcagcatcgagatcaacatcaagaagcccaacagcgtgccccaggagctggccgccaccaccgagaagaccgagcccaacagccaggaggacaagaacgacggcggcaagagcagaaagggcaacatcgagctggccagcagcgagccccagcacttcaccaccaccgtgaccagatgcagccccaccgtggccttcgtggagttccccagcagcccccagctgaagaacgacgtgagcgaggagaaggaccagaagaagcccgagaacgagatgagcggcaaggtggagctggtgctgagccagaaggtggtgaagcccaagagccccgagcccgaggccaccctgaccttccccttcctggacaagatgcccgaggccaaccagctgcacctgcccaacctgaacagccaggagagccccggcaccgccagcgtgcccctgagagtgcagaacagctggagaagaagccagttcttcagccagagcgtggacagccccagcagcgagaagagccccgtgatgacccccttcaagttctgggcctgggaccccgaggaggagagaagaagacaggagaagtggcagcaggagcaggagagactgctgcaggagagataccagaaggagcaggacaagctgaaggaggagtgggagaaggcccagaaggaggtggaggaggaggagagaagatactacgaggaggagagaaagatcatcgaggacaccgtggtgcccttcaccgtgagcagcagcagcgccgaccagctgagcaccagcagcagcatgaccgagggcagcggcaccatgaacaagatcgacctgggcaactgccaggacgagaagcaggacagaagatggaagaagagcttccagggcgacgacagcgacctgctgctgaagaccagagagagcgacagactggaggagaagggcagcctgaccgagggcgccctggcccacagcggcaaccccgtgagcaagggcgtgcacgaggaccaccagctggacaccgaggccggcgccccccactgcggcaccaacccccagctggcccaggaccccagccagaaccagcagaccagcaaccccacccacagcagcgaggacgtgaagcccaagaccctgcccctggacaagagcatcaaccaccagatcgagagccccagcgagagaagaaagagcatcagcggcaagaagctgtgcagcagctgcggcctgcccctgggcaagggcgccgccatgatcatcgagaccctgaacctgtacttccacatccagtgcttcagatgcggcatctgcaagggccagctgggcgacgccgtgagcggcaccgacgtgagaatcagaaacggcctgctgaactgcaacgactgctacatgagaagcagaagcgccggccagcccaccaccctgtag

SEQ ID NO: 107838 - DNA, 3210 bp, Artificial Sequence
  derived and/or modified sequence
atggcatgccctgccctggggctggaggccctacagccactgcaaccggagccgccgccagaacctgccttttccgaggctcagaaatggatagaacaagtgacaggacgcagtttcggcgataaggacttccgcactggcctggagaacgggatactcctttgtgagctcctgaatgcaatcaaaccaggcttggtgaaaaaaataaaccgacttcccactccgatcgccgggctggataacattatcttgttcctgagagggtgtaaagagctgggactgaaagaatcccagctttttgacccttccgacctgcaggacacctccaaccgcgttaccgtcaaaagtttggattattcccggaagctgaagaacgtgctcgtgaccatctattggctgggaaaggcagccaacagctgcacgagttattcaggcaccactctaaatctgaaggagtttgaagggctcttggctcagatgcgcaaggacactgacgatatcgaatctccaaaacggagcattagggatagcggatacatcgactgctgggactcggagcggagcgattccttatctcccccgagacacggcagagatgatagcttcgacagcctggatagcttcgggtccaggtcacgtcaaaccccatcgccagatgttgtgctaagagggagttctgacggaagaggatccgattcagagtcggatctgccacatcgcaagttacccgacgtcaaaaaggatgacatgtccgcacggcgcacctctcacggtgaaccaaaaagcgctgtcccattcaatcagtacctacccaacaaatcaaatcagaccgcctatgtgcccgctccccttaggaagaaaaaagccgaaagagaggaatacaggaaatcttggtctaccgccaccagcccattgggaggggaaagaccatttcgctctacttctatgttcgacatgaggtgcgaagaagaggcggccgtccaaccccacagcagggcccgccaagagcagttgcagctcatcaacaaccagctgcgggaagaagacgacaagtggcaggatgatctggcccgctggaagtcaagaagacgttctgtgagtcaggaccttattaaaaaagaagaggagcgcaagaaaatggaaaaactcctagctggcgaggacggcaccagcgaacggcgcaaatcgattaaaacctatagagagattgtgcaagaaaaggagaggcgggagcgcgagctacacgaggcctacaagaatgcgcgtagccaggaagaagcagagggcatactccagcagtacattgagcgattcaccatctcagaagccgtcttggaacggttggaaatgcctaagatcttggaaagatctcacagtacggagcctaacctcagcagcttcctgaatgacccaaatcccatgaagtatctgagacagcaatccctcccaccacctaaattcaccgccaccgtggagacaaccatcgcacgggcttcagttcttgacacttccatgagtgctggctcagggagtcctagcaaaacagtgacaccgaaggcagtacccatgctgacccctaagccgtattctcaacctaaaaacagccaggatgtcttgaagactttcaaggtggatgggaaggttagtgtgaatggcgaaacagtgcatcgcgaagaggaaaaggagcgcgagtgcccaacagtggcgcccgcccactctctgacaaagagtcaaatgttcgaaggggttgcacgcgtccatggaagcccgctggaactcaagcaggacaacggatctatagagattaatatcaaaaaacctaattcggtgccccaggaactcgcggcgactaccgaaaagaccgaaccaaactcccaggaggacaagaacgatggtgggaagtcaagaaaaggcaatattgaactggcctcgtctgagcctcagcactttacaacaaccgtgacacgatgctccccaacagtcgcttttgtggagtttcctagctccccgcagctgaagaacgatgtgtcagaggaaaaggaccaaaagaagcccgagaatgaaatgtcaggcaaagtggaattggtgctttcccagaaggtcgttaagcccaagagcccggagccagaggccacgctcacattcccatttcttgacaaaatgcccgaagctaatcaacttcacctacctaatctcaactcccaggagagccctggtactgcatcagtacctctgagggttcagaacagctggcggaggtcgcagtttttttcgcagtctgtggactcaccatctagcgagaaatcacccgtcatgaccccatttaaattttgggcgtgggaccctgaggaggaacgtaggcgacaggagaagtggcagcaggaacaagaaaggctgctgcaggaacggtaccagaaagaacaggacaagttgaaggaagagtgggaaaaggctcagaaagaggttgaggaggaggagcgacgctattatgaggaagagagaaaaatcatcgaggacaccgttgttcctttcactgtgagctcttcatcagcagatcagctttccacgtccagcagcatgacagaagggtctggcacaatgaacaagatcgatcttgggaactgccaggatgaaaagcaggaccgccgctggaaaaaatctttccagggcgatgactccgacttactgctgaagacacgagagtcagacaggctggaagagaagggcagcttgacagaaggagctctggcccactcagggaatcccgtgtccaaaggagtccatgaggatcaccagctggataccgaggccggagccccccactgcggtaccaatcctcaactcgctcaggaccctagccagaatcagcaaacgagtaaccctacccactcttctgaggacgtcaaacccaaaacgttgcccctggacaagtctattaaccaccaaattgaatccccttccgagagacgaaagagcattagcggaaagaaactgtgcagcagttgtggcctacccctgggaaaaggcgctgccatgataatagaaactctgaacctctattttcacatccagtgctttaggtgtggtatatgtaaaggacagctaggagacgccgtatccggcacagacgtacggatcagaaatggactgttgaattgcaacgactgttatatgcggtctaggtcagccggacagcctactacactgtag

SEQ ID NO: 107839 - DNA, 3210 bp, Artificial Sequence
  derived and/or modified sequence
atggcctgcccagccctgggcctggaggccctgcagcccctgcagcctgagcccccacctgagcccgccttcagcgaggcccagaagtggattgagcaggtgacaggccgcagctttggagacaaggacttcagaacaggcctggagaatggcatcctgctgtgtgagctgctgaatgccatcaagccaggcctggtgaagaagatcaaccggctgcccacccccatcgccggcctggacaacatcatcctcttcctgcggggctgcaaggagctgggcctgaaggagagccagctgtttgaccccagcgacctgcaggacaccagcaacagagtgacagtgaagagcctggactacagcaggaagctgaagaatgtgctggtgaccatctactggctgggcaaggccgccaacagctgcaccagctacagcggcaccaccctgaacctgaaggagtttgagggcctgctggcccagatgaggaaggacacagatgacatcgagagccccaagaggagcatccgggacagcggctacatcgactgctgggacagcgagaggagtgacagcctgagccccccaagacatggaagagatgacagctttgacagcctggacagctttggcagccgcagccggcagacccccagcccagatgtggtgctgcggggcagcagtgatggccggggcagtgacagcgagagtgacctgccccacaggaagctgcctgatgtgaagaaggatgacatgtctgcccggaggaccagccatggagagcccaagtctgctgtgcccttcaaccagtacctgcccaacaagagcaaccagacagcctacgtgcctgcccccctgaggaagaagaaggccgagcgggaggagtacaggaagtcctggagcacagccaccagccccctgggcggggagcggcccttccgcagcacctccatgtttgacatgagatgtgaggaggaggccgctgtgcagccccacagccgggcccggcaggagcagctgcagctgatcaacaaccagctgcgggaggaggatgacaagtggcaggatgacctggcccgctggaagagcagaagaagatctgtgtcccaggacctgatcaagaaggaggaggagaggaagaagatggagaagctgctggccggagaagatggcaccagcgagaggaggaagagcatcaagacctaccgggagatcgtgcaggagaaggagcggcgggagcgggagctgcacgaggcctacaagaatgcccggagccaggaggaggccgagggcatcctgcagcagtacatcgagcgcttcaccatcagcgaggccgtgctggagcggctggagatgcccaagatcctggagaggagccacagcacagagcccaacctgagcagcttcctgaatgaccccaaccccatgaagtacctgcggcagcagagcctgcccccacccaagttcaccgccaccgtggagaccaccatcgcccgggcctctgtgctggacacctccatgtctgctggcagcggcagccccagcaagacagtgacccccaaggctgtgcccatgctgacccccaagccctacagccagcccaagaacagccaggatgtgctgaagaccttcaaggtggatggcaaggtgtctgtgaatggagagaccgtgcaccgggaggaggagaaggagcgggagtgccccaccgtggccccagcccacagcctgaccaagagccagatgtttgagggcgtggcccgggtgcacggcagccccctggagctgaagcaggacaatggcagcattgagatcaacatcaagaagcccaacagcgtgccccaggagctggccgccaccacagagaagacagagcccaacagccaggaggacaagaatgatggcggcaagagcaggaaaggaaacatcgagctggccagcagcgagccccagcacttcaccaccaccgtgacccgctgcagccccaccgtggcctttgtggagttccccagcagcccccagctgaagaatgatgtgtctgaggagaaggaccagaagaagccagaaaatgagatgtctgggaaggtggagctggtgctgagccagaaggtggtgaagcccaagagccctgagcctgaggccaccctgaccttccccttcctggacaagatgcctgaggccaaccagctgcacctgcccaacctgaacagccaggagagccctggaacagcctctgtgcccctgcgggtgcagaacagctggaggaggagccagttcttcagccagagcgtggacagccccagcagcgagaagagccctgtgatgacccccttcaagttctgggcctgggaccctgaggaggagcggcggcggcaggagaagtggcagcaggagcaggagcggctgctgcaggagcgctaccagaaggagcaggacaagctgaaggaggagtgggagaaggcccagaaggaggtggaggaggaggagcggcgctactatgaggaggagaggaagatcatcgaggacacagtggtgcccttcaccgtgagcagcagcagcgctgaccagctgagcaccagcagctccatgacagagggcagcggcaccatgaacaagattgacctgggcaactgccaggatgagaagcaggaccggcgctggaagaagagcttccagggagatgacagcgacctgctgctgaagacccgggagagtgaccggctggaggagaagggcagcctgacagagggcgccctggcccacagcggcaaccctgtgtccaaaggagtgcatgaggaccaccagctggacacagaagctggggccccccactgcggcaccaacccccagctggcccaggaccccagccagaaccagcagaccagcaaccccacccacagcagtgaagatgtgaagcccaagaccctgcccctggacaagagcatcaaccaccagatcgagagccccagcgagaggaggaagagcatcagcggcaagaagctgtgcagcagctgtggcctgcccctgggcaagggggccgccatgatcatcgagaccctgaacctgtacttccacatccagtgcttccgctgtggcatctgcaagggccagctgggagatgctgtgtctggaacagatgtgcgcatcagaaatggcctgctgaactgcaatgactgctacatgaggagccgctctgctggccagcccaccaccctgtag

SEQ ID NO: 107840 - DNA, 5071 bp, Artificial Sequence
  derived and/or modified sequence
gcttgagaggacgcggggctgcgcaaatggcttgtcccgctctcggtctggaagctcttcagcccctgcagcccgagccgccccccgagcccgccttctccgaggcgcagaagtggattgagcaagtaactggcagaagttttggtgataaagattttcggacaggtttagaaaatggaatcctcctctgcgagttgctgaatgctataaagccaggacttgttaaaaagatcaatagattgcctacccccattgcaggactggacaatattatcttattcttgagaggttgtaaagagctcggccttaaagaatctcaactttttgacccgagtgacctccaggatacatccaacagagtaacagtcaagagccttgattatagtaggaagctgaaaaatgtattagttaccatttactggctgggaaaagcagcaaacagctgcacatcctacagcggaacgacactaaacctgaaggagtttgaaggattgttggctcagatgcgaaaggacactgatgacattgaaagtcctaaacgcagtatccgagacagtggctacatcgactgctgggattccgagcgcagcgactccctctctcctcctcgccacggcagagatgattccttcgacagcctggattcctttggctctcgctctcggcagacgccttcaccagatgtagtcctcaggggaagcagcgatgggagaggaagcgactctgaatccgacttgcctcatcggaagctgccagatgtgaagaaggatgacatgtctgcacggcggacttcccatggtgagccgaaatcagcagtgccttttaaccagtacctcccgaacaaaagcaatcagacggcctacgtccccgcgcctctgagaaagaagaaagcagagagagaggaataccgcaagagctggagtaccgccacctccccgctgggtggggagaggcccttcaggagcaccagcatgtttgacatgcggtgtgaggaggaggccgcggtgcagccgcacagcagggcccgccaggagcagctgcagctgataaataaccagctgagggaagaggacgacaaatggcaagatgacctggctcgttggaagagtcgtagaagaagtgtttctcaggacttaatcaagaaagaggaagaaaggaaaaaaatggagaagttactggctggagaagatgggacaagtgaacgaaggaaaagcatcaaaacctacagagaaattgttcaagaaaaagagcggagagagagagagctgcatgaagcatataagaacgctcggtcccaggaggaggcagaggggatccttcaacagtacattgagaggttcaccatcagtgaggctgttctcgaacgcttggagatgccaaaaattctggaaagaagccattcaacagagccaaatttatcctccttcctgaatgaccccaatcccatgaaatacctgcggcaacagtcactgcctccacccaaattcactgccactgttgaaaccaccattgctcgtgccagtgttctggataccagcatgtcagcaggcagtgggtctccaagcaaaactgtcactcccaaagcagtgcctatgctgacacccaagccttactcccagcccaaaaattctcaagatgttctgaagacctttaaggtagacgggaaagtcagtgtgaatggagagacggttcatagagaggaggagaaggaaagagagtgtcccacggtggcacctgcccactccttaaccaaatcccagatgtttgaaggtgtggccagagtgcacgggtctccactggagctgaaacaagacaacggtagcatcgagatcaacataaagaagccaaactctgttccccaagagctcgcagcaaccactgagaaaacggaaccgaatagtcaagaggacaagaatgatggtggaaaatcaagaaaagggaatatagaacttgcctcatcagaaccacagcattttacaacaactgtgactcgatgcagcccgaccgtggcctttgtggaatttccctccagcccccagctgaagaatgatgtgtcggaagaaaaagaccagaagaaaccagaaaatgaaatgagtggaaaggtggagttggtgctgtcacaaaaggtggtaaagccaaaatctccagaacccgaagcaacgctgacatttccatttctggacaaaatgcctgaagccaaccaactacatttgccaaatctcaattctcaagagtcgcctggcactgccagtgttccgcttagagttcagaactcttggcgacgatcccagtttttctcccagtcagtggattctccaagcagtgagaagtcacctgttatgacaccttttaagttctgggcatgggacccagaagaggagcgcaggcgacaggaaaaatggcaacaggaacaggaacgtttgctccaggagagataccagaaggagcaggacaagctgaaagaagagtgggaaaaggcccaaaaggaggtggaagaggaagaacgcagatactatgaggaggagcgtaagataattgaagacactgtggttccatttactgtttcttcaagttccgctgaccagctgtctacctcttcctccatgactgaaggcagtgggacaatgaataagatagacctgggaaactgtcaagatgaaaaacaagacagaagatggaagaaatcattccagggagatgacagtgacttattgctgaagactagggaaagtgatcgactggaggagaagggcagcctaactgaaggggccttggctcattctgggaaccctgtatcaaaaggagtccatgaagaccatcagctggataccgaggctggggccccacactgtggaacaaacccacagcttgctcaggatccatcccagaatcagcagacatcaaatccaacgcacagttcagaagatgtgaagccaaaaaccctcccgctggataaaagcattaaccatcagatcgagtctcccagtgaaaggcggaagtctataagtggaaagaagctgtgctcttcctgtgggcttcctttgggtaaaggagctgcaatgatcatcgagaccctcaatctctattttcacatccagtgtttcaggtgtggaatttgtaaaggccagcttggagatgcagtgagtgggacggatgttaggattcgaaatggtctcctgaactgtaatgattgctacatgcgatccagaagtgccgggcagcctacaacattgtgacacggctttcaagcttccggatcactcaccatttctttactgagagtgtcccctggcaactgcttaacaaaatcccaagctcaggggcttctcagcatttacctaatttctgaaaggctcttctgaaaggtggtatctgttctttcgtagcacagtgtttatgtttttcctgtttattgttttggttttttttttttttttgcatttgcacagtatacacaaaagaatatggggttgtaatgatcctgaatagctcaaaaaaggttttagcatggtcaaacaggcttatggtttaaaatgtgttattctcttctttgggaattagctaaatgatgcaataaacctgttttgttttagaatgtctaggaattaaacactttatgtttacagaattgagctgcagaaagtgcaagacatgccaatttgagacacacggtcttctaagactgaaggataaatttaatgcatttcagaaactaaacatcacagcaagctctatctctgagctataatttgtttttaatgcaaagacactagtttgataatatatactgtaatcctgaaacatttgtgttacttacctttggaggtagaaattataccaataaattattgcaccgttagtattagattctgtgtaccttggaagttatgtcattaatataggctggttcatcaaataaagcaaaaccttgcaatatcagctagatttacactccgggacgttgcccaaaggtaggaagaaagcagagggaaatatttcagtcatcatttccaaagtcattatcaaaatctgtgaggaagtttaatcttccaaagagtcaatgtcagacatcaggcctctgttgcctgcttctctcgaggcactagattaggagtcttcaataagagacttaacatgaggtatatggaagatgaggcaccgagataagttcatcattaggtgtgagcactgctcacccttgctggcaagttctccttaagggcctgaagcacaggtgtccaaagaaaagcgttaagtccatcttaatagaatctatgtggtatatgatgtggtcagcccctggtctgtgatcagcaagaacctacagcacagattatgccctgcccacttcaatgaatacctactctcctccattctccatcactttttttgctatcaagaactccggaccttgcccatggagaagtttagagaggaactcttgtggagagctggtttattttctgccctgtgcgacgagtttcagctggccaagaaaggagtcaagttattaaaaagcatcacaatgtagatctccaggctggttttttgttttttgttgttaagactggggaaagggggactatttattctgccttaaatcaatggcaaataagtcaagatgacattttgtgaatgtagactatggatacactcctaatagattgatgtagtcataaaagggggtcaagtagatgtttttctgttatgtaagcaataatttttccgtgtcttattgagtatggctagcgattatttattacatgctagatgggttctttgcatgtgggttccatataggtgcagaaatttcctcagccactggagggatttcgaccatatttgtcatttggatgagctgttattagattgaaatctacacatcatttcattaaaaattgtgccttagaaaacgcaaagctgttgcacatggcgataaattatggatgcagtacattgaagagagatgaagtcacttccaagtttccaagacttctcatggaggtgtttgctgttttacaggaaaaaataaaaataaaaaaagaaaaaaagaaaaaattaaaaagaaaaa

SEQ ID NO: 107841 - DNA, 3210 bp, Artificial Sequence
  derived and/or modified sequence
atggcctgccccgccctgggcctggaggccctgcagcccctgcagccagagccaccaccggagcctgcatttagtgaggctcagaaatggatcgagcaggttaccgggcgaagcttcggcgataaggattttcgaaccggtcttgaaaatggcatcttgctatgtgaattactaaatgcaataaaaccagggctcgtcaagaagataaatcggttgccaacgcctatcgccggcctggataacattatcctattcttgagaggatgcaaagaattggggttgaaggaaagtcagctctttgatcccagcgaccttcaggacacttccaatagagtaacagtgaagtctctagactatagtcgtaagctgaagaacgttcttgtgaccatatattggctaggcaaggctgctaactcctgcacaagctacagcggcactaccttaaatttgaaagagttcgaggggctactggcccagatgagaaaggatacagatgatattgagagccccaagcgttccataagggacagcggttatatcgactgctgggactctgagagaagcgatagcctatcacctccccggcacggcagagacgattcctttgattctcttgactccttcggttcacgatctagacaaacaccttccccagacgtcgttttacggggtagcagcgacggccggggcagcgattcggaatctgacttaccacacaggaagttgcctgatgtcaagaaagatgacatgagtgcccgcaggacctcgcatggtgaacctaaatccgctgtgccatttaaccagtatctccctaacaagtccaaccagaccgcctacgtgccagcccccctgcgtaaaaagaaggcagagcgagaggagtatcgcaaaagttggagtactgccacgagcccactcgggggagagcgcccgttccgatctactagcatgttcgacatgcgctgtgaagaggaggccgccgtgcaaccccattctagagctcgccaggaacagctgcaattgattaataaccagctcagagaggaagacgacaagtggcaggatgacctggcccgttggaaatcccgacgccggtcagttagtcaggacctgatcaagaaggaggaggaaagaaagaagatggagaaactcttggctggggaggacggaaccagtgagcgtcgcaaaagcatcaagacgtatcgcgagatcgtacaagaaaaagaaaggcgagaacgggaacttcacgaagcatacaagaatgcccgctcacaggaggaggcagagggcatcctacagcagtatatagaacgcttcaccattagtgaggctgttctggagcgcctcgaaatgccaaagattctggagaggtcacactccaccgaaccaaatttgagctcattcctcaacgatccaaacccaatgaaatacctacgtcagcagtcactccccccgcccaaatttacggccactgtggaaaccacaattgccagggcctccgtgctggataccagtatgtccgctggatctggtagtcctagtaagactgttacccccaaggccgtgcctatgttgacaccgaaaccttactcgcagcccaaaaactcccaggatgtgcttaagacatttaaagttgatggtaaggtctctgtgaatggcgagacagtgcatcgggaagaagaaaaagaacgtgagtgtccaactgtggcacccgcccattctctgacaaaatcccagatgtttgaaggagtggcgagggtacacggatcacctctggaattgaagcaggataacggatcaattgagattaatatcaaaaagccaaacagcgtgcctcaggaactggccgcgactaccgagaaaacagaaccaaacagtcaggaagataaaaatgacggagggaaaagcagaaagggcaatatcgagttggcttcatccgaacctcaacattttactactaccgtgacacgttgttccccaaccgtggctttcgtggaattcccctcatcacctcagctgaaaaatgatgtgtctgaggaaaaggatcagaagaagcctgagaacgagatgagcggaaaagtggagctggttctttctcaaaaagtggtgaagccaaaatcccccgagccagaagctaccctcaccttccccttcctggacaagatgcctgaggccaaccagttgcaccttcccaacctcaattcccaggagtcccccggtacagcctcggtgccactccgcgtacagaacagttggagacggtcccagttttttagccagtctgttgacagcccttccagcgagaaaagtccagtgatgacccctttcaagttctgggcatgggaccctgaagaagagcgcaggcgacaggagaagtggcaacaggaacaagagagactgctgcaagagagatatcagaaagagcaagacaagctcaaggaggagtgggagaaagcccagaaggaagtagaagaggaggagcggcgctattacgaggaagaacggaaaattattgaagacaccgtcgtgcctttcaccgtgagctcttcttctgccgaccaactgagcacatctagttcaatgactgaaggaagtggcacgatgaacaaaattgatctggggaattgccaggatgagaagcaagaccggcggtggaaaaagtcctttcagggagatgactctgacctgcttctgaaaacccgcgaaagtgatcgcctcgaggaaaaaggaagtctgaccgagggagcactggctcattcaggaaaccctgtgagcaagggggtccacgaggaccatcaactggacacggaagctggcgcgcctcattgcgggacaaacccccaactcgcacaagatccaagccaaaatcaacagacatctaatccaactcactctagcgaggacgtgaagcccaagacccttcccctggacaagtctattaaccaccaaatagagtccccatccgagcgccgcaaaagcatctctggcaagaaactgtgcagctcttgtgggttgcctttggggaagggggctgcaatgatcatagagactctgaatctttactttcacatacaatgctttagatgtggaatttgcaaggggcagctgggcgatgctgtcagcggcaccgacgtgagaattagaaacgggctcctcaattgcaacgattgctacatgcgcagccgctccgctgggcaaccgacaaccttatag

SEQ ID NO: 107842 - DNA, 3210 bp, Artificial Sequence
  derived and/or modified sequence
atggcttgcccagctcttggattggaagcattgcaacctctccagccagaacctccacccgagccggctttttctgaggctcagaagtggatagaacaggtgactgggaggagctttggtgataaggattttcgaacaggcctggagaacgggatcctgctgtgtgagctcctgaacgcaataaagcctggactggtgaagaagatcaatcggctgcccaccccaatcgccggtctagacaacattatcctattcctaaggggatgcaaagagctaggccttaaggagtcacagctgttcgaccctagcgatctgcaggatacatcaaatagggtgaccgtcaaaagcctcgattactctaggaagctgaagaacgtcctggtaaccatttactggctagggaaagctgcaaacagttgcacgtcgtattccgggactaccttaaatctgaaggaatttgagggactgctggcacaaatgagaaaggacacagacgatatcgagtctcccaagaggagcatccgcgattccgggtacattgattgttgggactccgaacgcagcgattccctgagcccgcctcgccacggtcgagacgactcttttgattctctcgattctttcggatccagatctagacagacaccatctcccgacgtggtcttgcggggatcctctgacggacgcggtagtgattcggaatccgacctgccgcaccggaaattgcccgacgtcaagaaggatgacatgtccgccaggcggacttctcatggagagcctaagagtgcggtcccctttaaccagtacttgccaaacaaatctaaccagacggcatatgtgccagctcctctccggaagaagaaagcagagcgagaagagtatcggaaatcatggtcaactgccacatcccctctcggcggtgaaaggcccttcagaagcaccagcatgtttgatatgcgttgcgaagaagaggcagcagtccaaccacattcacgtgcccgtcaggagcaactgcaacttatcaataatcagctgcgagaggaagacgacaaatggcaggatgatctggctcgatggaagagccgacggcgaagtgtctctcaggacctaatcaagaaggaagaagagagaaagaaaatggaaaagctgcttgctggagaggatgggacctcagagcggagaaagtcaataaagacgtatagggaaatcgtgcaagaaaaggagagacgggagcgagagctgcacgaggcttataagaatgcaagatcgcaagaggaagccgagggtattctacagcagtacattgagcgattcactatttcagaagctgtgctggaacgcctagagatgcccaagatcctggaacgcagtcactctaccgaacctaatctcagctcgttcctgaatgaccccaatcccatgaaatacctgcggcagcagagtctaccaccccctaagttcaccgccaccgtggagacaactattgcccgagcaagcgtgctggacactagtatgtcggcaggttctggctccccatcaaaaacagtaaccccaaaagctgtacccatgcttacgcccaaaccatattcacagcccaagaattcgcaggatgtcctcaagacattcaaagtggacggtaaagtgagcgtgaacggtgaaacggtgcaccgcgaagaagagaaagagcgtgagtgtcctaccgttgccccagcccactccctgactaaatcacagatgttcgagggcgtggcacgggtccatggctcgccactggaactgaagcaggacaatggatcaatcgagatcaacatcaagaagccgaactctgtgcctcaggagctggcggcaacaacagaaaagaccgagcccaattcccaagaggataagaatgacggaggcaaatcgaggaaaggcaatatcgagttggcttcttccgaaccccagcactttactacgacagtgacccggtgctccccgaccgttgcctttgtcgagttcccatccagcccccagctgaaaaacgatgtgagtgaagagaaggaccagaagaaaccggaaaacgagatgagtggtaaagtcgaactggtgcttagccagaaagtggtcaagcctaagagccccgaaccggaagcaaccctgacgtttccttttctggataagatgccggaggcaaatcagctgcatcttcccaatctcaacagtcaagagtctcccggtacggcctctgtcccccttcgggtgcagaactcttggaggcggtcacagttcttcagtcaatccgtggattcccctagctccgaaaaatccccagtgatgactccctttaagttttgggcctgggatcccgaggaagaaagaagaagacaggagaagtggcagcaagagcaggagaggctgctgcaggaaagataccagaaggaacaggataagcttaaagaggagtgggaaaaagctcagaaggaggttgaggaggaggaacgcagatactatgaggaagaacgcaaaataatagaagacaccgtggtccctttcaccgtgagttccagctctgcggatcaattaagcacctccagctcaatgacagaaggcagcgggaccatgaataagatcgacctgggaaattgccaggatgagaaacaggatcgcaggtggaagaagagttttcaaggcgatgactccgatctgttgttgaagacacgggagtccgatcggctggaggaaaaaggatctcttactgaaggcgctctggcacattctggaaatcccgtgagtaagggcgttcacgaggaccaccagctggataccgaggctggggctccgcactgtgggacaaacccacagctcgcccaggatccgagccagaaccagcagacaagtaaccctacccattcttccgaggacgtgaagccaaagaccctccctctcgacaaatctatcaaccatcagatcgaaagccccagcgagagaagaaaatctatttcaggcaagaagctctgctcatcctgcggactccctctgggaaaaggagccgcaatgattatcgagaccctcaatctttacttccacattcagtgctttcgctgtggtatctgcaaagggcaactaggcgatgccgtcagcggcaccgacgtacgcattcgtaatgggctacttaattgcaacgattgctacatgcggtctcgctctgctggccagcccaccaccctgtag

SEQ ID NO: 107843 - protein, 444 aa, Artificial Sequence
  derived and/or modified sequence
MREIVHLQAGQCGNQIGAKFWEVISDEHGIDPTGTYHGDSDLQLERINVYYNEATGGNYVPRAVLVDLEPGTMDSVRSGPFGQIFRPDNFVFGQSGAGNNWAKGHYTEGAELVDAVLDVVRKEAESCDCLQGFQLTHSLGGGTGSGMGTLLISKIREEFPDRIMNTFSVVPSPKVSDTVVEPYNATLSVHQLVENTDETYCIDNEALYDICFRTLKLTTPTYGDLNHLVSATMSGVTTCLRFPGQLNADLRKLAVNMVPFPRLHFFMPGFAPLTSRGSQQYRALTVPELTQQMFDAKNMMAACDPRHGRYLTVAAVFRGRMSMKEVDEQMLSVQSKNSSYFVEWIPNNVKTAVCDIPPRGLKMAATFIGNSTAIQELFKRISEQFTAMFRRKAFLHWYTGEGMDEMEFTEAESNMNDLVSEYQQYQDATAEEGEFEEEAEEEVA

SEQ ID NO: 107844 - protein, 1525 aa, Artificial Sequence
  derived and/or modified sequence
MRGVGWQMLSLSLGLVLAILNKVAPQACPAQCSCSGSTVDCHGLALRSVPRNIPRNTERLDLNGNNITRITKTDFAGLRHLRVLQLMENKISTIERGAFQDLKELERLRLNRNHLQLFPELLFLGTAKLYRLDLSENQIQAIPRKAFRGAVDIKNLQLDYNQISCIEDGAFRALRDLEVLTLNNNNITRLSVASFNHMPKLRTFRLHSNNLYCDCHLAWLSDWLRQRPRVGLYTQCMGPSHLRGHNVAEVQKREFVCSGKGEGHQSFMAPSCSVLHCPAACTCSNNIVDCRGKGLTEIPTNLPETITEIRLEQNTIKVIPPGAFSPYKKLRRIDLSNNQISELAPDAFQGLRSLNSLVLYGNKITELPKSLFEGLFSLQLLLLNANKINCLRVDAFQDLHNLNLLSLYDNKLQTIAKGTFSPLRAIQTMHLAQNPFICDCHLKWLADYLHTNPIETSGARCTSPRRLANKRIGQIKSKKFRCSGTEDYRSKLSGDCFADLACPEKCRCEGTTVDCSNQKLNKIPEHIPQYTAELRLNNNEFTVLEATGIFKKLPQLRKINFSNNKITDIEEGAFEGASGVNEILLTSNRLENVQHKMFKGLESLKTLMLRSNRITCVGNDSFIGLSSVRLLSLYDNQITTVAPGAFDTLHSLSTLNLLANPFNCNCYLAWLGEWLRKKRIVTGNPRCQKPYFLKEIPIQDVAIQDFTCDDGNDDNSCSPLSRCPTECTCLDTVVRCSNKGLKVLPKGIPRDVTELYLDGNQFTLVPKELSNYKHLTLIDLSNNRISTLSNQSFSNMTQLLTLILSYNRLRCIPPRTFDGLKSLRLLSLHGNDISVVPEGAFNDLSALSHLAIGANPLYCDCNMQWLSDWVKSEYKEPGIARCAGPGEMADKLLLTTPSKKFTCQGPVDVNILAKCNPCLSNPCKNDGTCNSDPVDFYRCTCPYGFKGQDCDVPIHACISNPCKHGGTCHLKEGEEDGFWCICADGFEGENCEVNVDDCEDNDCENNSTCVDGINNYTCLCPPEYTGELCEEKLDFCAQDLNPCQHDSKCILTPKGFKCDCTPGYVGEHCDIDFDDCQDNKCKNGAHCTDAVNGYTCICPEGYSGLFCEFSPPMVLPRTSPCDNFDCQNGAQCIVRINEPICQCLPGYQGEKCEKLVSVNFINKESYLQIPSAKVRPQTNITLQIATDEDSGILLYKGDKDHIAVELYRGRVRASYDTGSHPASAIYSVETINDGNFHIVELLALDQSLSLSVDGGNPKIITNLSKQSTLNFDSPLYVGGMPGKSNVASLRQAPGQNGTSFHGCIRNLYINSELQDFQKVPMQTGILPGCEPCHKKVCAHGTCQPSSQAGFTCECQEGWMGPLCDQRTNDPCLGNKCVHGTCLPINAFSYSCKCLEGHGGVLCDEEEDLFNPCQAIKCKHGKCRLSGLGQPYCECSSGYTGDSCDREISCRGERIRDYYQKQQGYAACQTTKKVSRLECRGGCAGGQCCGPLRSKRRKYSFECTDGSSFVDEVEKVVKCGCTRCVS

SEQ ID NO: 107845 - protein, 1525 aa, Artificial Sequence
  derived and/or modified sequence
MRGVGWQMLSLSLGLVLAILNKVAPQACPAQCSCSGSTVDCHGLALRSVPRNIPRNTERLDLNGNNITRITKTDFAGLRHLRVLQLMENKISTIERGAFQDLKELERLRLNRNHLQLFPELLFLGTAKLYRLDLSENQIQAIPRKAFRGAVDIKNLQLDYNQISCIEDGAFRALRDLEVLTLNNNNITRLSVASFNHMPKLRTFRLHSNNLYCDCHLAWLSDWLRQRPRVGLYTQCMGPSHLRGHNVAEVQKREFVCSDEEEGHQSFMAPSCSVLHCPAACTCSNNIVDCRGKGLTEIPTNLPETITEIRLEQNTIKVIPPGAFSPYKKLRRIDLSNNQISELAPDAFQGLRSLNSLVLYGNKITELPKSLFEGLFSLQLLLLNANKINCLRVDAFQDLHNLNLLSLYDNKLQTIAKGTFSPLRAIQTMHLAQNPFICDCHLKWLADYLHTNPIETSGARCTSPRRLANKRIGQIKSKKFRCSGTEDYRSKLSGDCFADLACPEKCRCEGTTVDCSNQKLNKIPEHIPQYTAELRLNNNEFTVLEATGIFKKLPQLRKINFSNNKITDIEEGAFEGASGVNEILLTSNRLENVQHKMFKGLESLKTLMLRSNRITCVGNDSFIGLSSVRLLSLYDNQITTVAPGAFDTLHSLSTLNLLANPFNCNCYLAWLGEWLRKKRIVTGNPRCQKPYFLKEIPIQDVAIQDFTCDDGNDDNSCSPLSRCPTECTCLDTVVRCSNKGLKVLPKGIPRDVTELYLDGNQFTLVPKELSNYKHLTLIDLSNNRISTLSNQSFSNMTQLLTLILSYNRLRCIPPRTFDGLKSLRLLSLHGNDISVVPEGAFNDLSALSHLAIGANPLYCDCNMQWLSDWVKSEYKEPGIARCAGPGEMADKLLLTTPSKKFTCQGPVDVNILAKCNPCLSNPCKNDGTCNSDPVDFYRCTCPYGFKGQDCDVPIHACISNPCKHGGTCHLKEGEEDGFWCICADGFEGENCEVNVDDCEDNDCENNSTCVDGINNYTCLCPPEYTGELCEEKLDFCAQDLNPCQHDSKCILTPKGFKCDCTPGYVGEHCDIDFDDCQDNKCKNGAHCTDAVNGYTCICPEGYSGLFCEFSPPMVLPRTSPCDNFDCQNGAQCIVRINEPICQCLPGYQGEKCEKLVSVNFINKESYLQIPSAKVRPQTNITLQIATDEDSGILLYKGDKDHIAVELYRGRVRASYDTGSHPASAIYSVETINDGNFHIVELLALDQSLSLSVDGGNPKIITNLSKQSTLNFDSPLYVGGMPGKSNVASLRQAPGQNGTSFHGCIRNLYINSELQDFQKVPMQTGILPGCEPCHKKVCAHGTCQPSSQAGFTCECQEGWMGPLCDQRTNDPCLGNKCVHGTCLPINAFSYSCKCLEGHGGVLCDEEEDLFNPCQAIKCKHGKCRLSGLGQPYCECSSGYTGDSCDREISCRGERIRDYYQKQQGYAACQTTKKVSRLECRGGCAGGQCCGPLRSKRRKYSFECTDGSSFVDEVEKVVKCGCTRCVS

SEQ ID NO: 107846 - DNA, 4578 bp, Artificial Sequence
  derived and/or modified sequence
atgaggggcgtgggctggcaaatgttatccctaagcttgggattggtgctggctattctgaacaaggtggcgccacaggcgtgccccgcacagtgttcatgctccggttcaacagtggactgccacggactagctctgaggtctgtccccagaaatattccacggaataccgagaggcttgatctcaatggcaacaatattacacgaataaccaaaacagatttcgctggactgcggcatctgagagtgctgcaactaatggaaaacaagatctctaccattgaaaggggggcatttcaggacctgaaggagctcgaaagactgaggcttaaccggaatcacctgcagctcttccccgagcttctgttcctcgggacagctaagctgtacagattggatctgtccgaaaatcagatccaagctatccctaggaaggccttccgtggtgctgttgatatcaaaaacctgcagctcgattacaaccagatttcgtgtatcgaggatggcgcatttagagccttgagggacctggaggtactcacgttgaacaacaataatattactcgtttaagtgtggctagctttaatcacatgccgaagcttaggacctttagattgcatagcaacaacctctattgtgactgtcacctcgcatggctgtccgactggctgaggcaaaggccccgggtcggcctatacacccagtgtatgggcccctcacacctgcgcggccacaatgtagccgaagtccagaaaagagaattcgtgtgctctgggaagggcgaaggtcatcagagtttcatggccccatcttgctcagtcctccactgtccggccgcttgcacatgttcaaataacatcgtagattgtcgcggcaagggtctgacagaaatccctacaaacttgcccgagaccatcactgaaatccgcctcgagcagaacactattaaggtcattccacctggcgcgttctccccttataagaaactgcgccgcatcgatctatcgaacaatcagatatcagaactggcgccagatgcttttcaggggctgcgaagcttaaattctttggttctgtatggaaacaaaatcactgagcttcccaagtcactcttcgaggggctgttctctcttcagcttctcctgcttaacgcgaataaaatcaattgtttgcgcgtagatgcattccaagacctgcataatctgaacttactgtccctatatgataacaagctacaaacaatcgccaagggcacatttagtcctctgagggctattcagacgatgcatttggcacagaatcccttcatctgtgattgccacctaaaatggctggctgattacttacataccaacccaatcgaaacttctggcgccaggtgcacgtcaccccgcaggcttgccaataaaaggatcgggcagattaagtctaagaagtttagatgcagtggcacagaggattatcgttctaaactgagcggcgactgctttgctgatttggcgtgtccagaaaagtgtagatgcgagggcacaactgtggattgttctaaccaaaaactaaacaagatcccggagcacataccacaatataccgctgagctcagactgaacaataatgaattcaccgtgttagaggctactggaattttcaagaaattaccacagttgaggaagatcaatttctcaaacaataaaatcacagacatcgaggagggagccttcgaaggtgctagcggggttaatgagatactcttgacgagtaaccggcttgaaaacgtccaacataagatgttcaaaggcctggaatcactgaagaccttgatgctacgctctaaccggattacctgcgttgggaacgactcttttatcggtctgtcaagcgttaggctgctttccctttacgacaatcagataacaactgtagcacctggtgccttcgataccctgcactccctcagtaccctgaacctgttagccaaccctttcaattgcaactgctatctggcatggctgggcgagtggctgagaaagaagagaatagtgacaggcaaccctaggtgccagaaaccctatttcctaaaggagatccccatccaggacgtcgctattcaggatttcacatgtgacgacgggaatgacgacaattcttgcagccccctgtcacggtgtcccacggaatgcacctgcctggacacagtggtaagatgctccaataaaggcctgaaagtgctccctaaaggcattccccgggacgtcacagaactctatttagacggaaaccagtttactctcgtgcccaaggagttaagtaactacaaacatcttacgctgattgacctcagtaacaaccgcatttctacgctctcaaaccagtctttcagtaatatgacacagcttctcacactcatcctatcttacaatcgcctcaggtgcattccccctcgcacgttcgacggcctaaagagtctgaggctcctctctctgcatggcaatgacatttcagttgtccccgagggggcatttaacgatctctccgctttgtctcacctggcgatcggagctaatccactctactgtgattgcaatatgcagtggctatcagattgggtaaaatctgagtataaagagcctgggattgctcggtgtgctggcccaggcgaaatggctgataaactccttctgacaaccccttcaaaaaagtttacctgccagggccctgttgacgtaaacattctggccaagtgtaacccgtgcctcagtaacccttgtaagaacgacggcacctgcaacagcgaccccgtggatttctaccggtgcacatgcccctatggatttaaggggcaggattgcgatgtccccatacatgcctgcatttcaaatccctgcaaacatgggggtacttgccacttgaaggaaggggaagaagatggattctggtgtatatgcgcagacggcttcgaaggggagaactgtgaagtgaatgtggatgattgcgaggataacgattgcgaaaataactcgacatgtgtggacggcattaacaattacacttgtctttgtccccctgagtacactggcgaattatgcgaggaaaagcttgacttttgtgcacaggacctaaacccctgtcaacacgatagcaagtgtattctgactcctaaaggcttcaaatgtgattgcaccccagggtatgtgggggaacattgtgacatcgacttcgacgattgtcaagataacaagtgcaaaaatggtgcccactgcaccgatgccgtgaacggatacacttgtatatgtccagaaggatattcaggcttgttttgcgaattctccccacctatggtgcttccccgtacttcaccctgcgacaattttgactgccaaaatggcgcacaatgtattgttaggatcaatgaaccaatctgccagtgtctgcctggctatcaaggtgaaaaatgtgaaaagctggtgtcagtaaactttatcaacaaggagtcctatctccaaatcccttctgctaaagtgcgaccccagacgaatatcacccttcaaatcgcaaccgatgaagacagcggtatacttctttacaaaggggacaaagaccacatcgctgtggagctgtatagaggacgcgttagagcgagttatgataccgggtcacaccccgccagtgccatatattcagtggagacgatcaacgacgggaactttcatattgtcgaactcctggcactggaccagtcactctctctctctgtggatggcggcaatcctaagataatcaccaacttatcaaagcagtctactctaaatttcgactccccactctacgtcggaggtatgcctgggaagtcaaacgtagcaagtctgcgtcaggcacccggccagaacggcacaagttttcacggctgtataaggaacctgtatatcaattcggagttacaggactttcaaaaggtgcccatgcagacaggaatactgccaggatgcgagccgtgtcacaaaaaggtgtgcgcccatggaacttgccagccttccagtcaggccggtttcacatgcgaatgccaggagggatggatgggacctctgtgtgaccagcggaccaacgacccttgtttggggaacaaatgcgtgcacggtacgtgccttccaattaacgcgttttcgtattcttgtaagtgtctagagggccacggaggtgttctctgtgacgaggaggaagaccttttcaacccctgtcaggcaatcaagtgtaagcacggaaaatgtagactgagcggactggggcagccttactgcgagtgcagcagcggctatactggtgatagctgcgaccgagagatctcctgtagaggagagcggatacgggactactaccaaaagcagcagggctacgctgcctgtcaaactactaagaaggtctccagactggaatgtagaggcggctgcgctgggggtcagtgctgtggccccctgagatccaagagacgcaaatattctttcgagtgtacagacggtagtagcttcgttgatgaggtcgagaaggtggtcaaatgtgggtgtaccagatgtgttagctag

SEQ ID NO: 107847 - DNA, 4578 bp, Artificial Sequence
  derived and/or modified sequence
atgcgaggcgtcggttggcagatgttgagcctgagtttaggtctggttctggccattctgaataaggtggcgccacaagcctgtccggcacagtgttcctgcagcgggtctacagtggattgccatgggcttgctctcaggagcgtcccaagaaatatccccagaaataccgagagactcgacctcaatggcaataacatcactcggatcacaaaaacagactttgcgggccttcgccacttacgggtgctccaactgatggagaataagataagcactattgaacggggtgcctttcaggatctgaaagaactagaacgcctacggctgaaccgcaaccatctgcagctgttcccggaactcctcttcctcggaacagcaaaactttacagactcgatctttctgaaaaccagattcaagcaattccacgcaaagcctttcggggggctgtcgatattaaaaatttacagttagattataatcagatttcttgtatcgaagatggagccttcagggccctgagggacctggaggtccttaccctgaataacaataacatcacaaggttaagtgtggcatccttcaatcacatgcctaagctgcggaccttccggctgcacagtaataacctgtactgtgactgtcatttagcatggctttcggattggttgcgccaaagaccacgggtgggactctacacgcagtgcatgggcccttcgcatctgcgaggccacaatgtcgctgaagtccaaaagcgggaatttgtgtgcagcgacgaggaggagggtcaccagagcttcatggctccaagttgtagcgtcctgcattgccccgcagcttgcacctgttctaataacattgtagactgtcggggcaaaggtctgaccgaaatacccacgaatttacccgaaactattacagagatcaggctggaacaaaatacaatcaaggtgattccacccggagctttttctccttacaagaaacttcgaagaatcgacttgagtaacaaccagataagtgagctggcccccgacgcgtttcagggccttaggtcactgaattctctagtgctgtacggcaacaagattacagagctgccaaagtcgctttttgagggcctgttctcactgcaacttctgttactcaacgccaataaaatcaattgtctccgagtagatgccttccaggacctgcacaatctcaatctgctaagtttgtatgacaacaaactacagactatcgcaaaaggaaccttctcccccctccgggccatccaaacaatgcatttggcacagaatcctttcatctgcgactgccacctgaagtggctggcagattatctacacacaaaccccatcgagacttctggggcccggtgcacaagccctagacgccttgcaaacaagagaattggtcagatcaagagcaagaagttcaggtgtagcggcacggaagattatcgcagtaagctgtcgggggattgctttgctgacttagcctgtcctgaaaagtgccgatgcgagggtaccacggttgactgtagcaatcaaaagctgaacaaaataccagagcacataccccagtacaccgcagagctgaggctgaacaataacgagtttaccgtgctggaagcaactggcatctttaagaagcttccacagctccggaaaattaacttctccaataacaaaattacagatatagaggaaggtgcgttcgaaggcgcgtctggtgtgaacgagatcctgttgaccagtaatcgattggagaacgtgcagcacaaaatgtttaagggcctagaaagccttaagacactcatgcttcggtcaaacaggatcacatgcgtaggtaatgatagcttcataggccttagctctgtgcgcctgcttagtctttatgacaaccaaattacgaccgtagccccaggcgctttcgacacactgcacagtcttagcacccttaacctcctcgcaaacccttttaattgcaattgctatctggcatggttgggagagtggctcagaaaaaaaaggatcgtgaccggaaacccccgctgccagaaaccttacttcctgaaagagattccgatccaggatgtagccatccaggactttacctgcgatgacggcaatgacgataacagctgttcccccctctcgcgctgtcccacggaatgtacgtgcttggatactgtcgtgcgctgcagcaataaggggctgaaagtgttaccaaaggggataccgcgcgacgtgaccgagctgtatctggacgggaatcaatttaccctggtgcctaaagaattgagcaactataaacacctcacattgattgatctctccaacaaccgtatctccactctgtccaatcaatccttctcgaacatgacacagttactgaccctaatcctgagctacaatcgcctgagatgtattccccctaggacattcgatggcctcaaaagcctcagactgctgtcactgcatgggaacgatatttccgtggtgccagagggggctttcaatgacctgtccgcactgtctcatttggcaataggcgctaacccgctgtattgcgactgcaacatgcagtggctctctgactgggtgaagtcagagtacaaagaaccaggcatcgcccgctgtgctgggcctggcgagatggctgataagttgttgctgacgactcccagtaaaaaatttacatgtcagggccccgtggacgtcaatattttagctaaatgcaatccatgtctgtccaatccttgtaaaaacgatggcacctgcaacagcgaccccgtcgatttctatcgatgcacttgcccttacgggtttaagggacaggactgtgacgtgccaatccacgcctgcatctctaacccgtgcaagcatggagggacttgtcacctgaaggagggcgaggaggacgggttctggtgcatatgtgccgacggattcgaaggtgagaactgtgaagttaatgtggatgactgtgaagataacgattgtgaaaataatagtacttgcgtcgacgggatcaataactacacatgcttatgcccaccggagtacacgggggaactttgcgaggagaaactggacttctgcgctcaggatctcaatccttgccagcatgattccaaatgtatattgaccccgaagggcttcaaatgcgactgcactccaggctacgtaggagagcactgcgatattgactttgatgattgtcaagacaacaaatgtaaaaacggggcccactgtacagatgccgttaacggatacacctgtatatgtcccgagggctatagcgggctgttctgtgaattttctcctcccatggtcctgccaaggacatccccttgcgacaattttgactgtcagaatggggctcaatgcatcgtgagaatcaatgaacccatatgtcaatgtcttccaggctatcagggcgagaagtgcgaaaaactggtcagcgtcaatttcattaacaaggagagttatctccaaattccctcagccaaggtgaggcctcagacaaatataacgttacagatcgccaccgacgaggatagtggaatcttactgtacaaaggcgacaaagaccatattgccgttgaactgtaccgcgggcgtgtgcgggcaagctatgacacgggttctcatccggcatctgccatctattctgtggaaactatcaacgacggaaactttcacattgtagaactacttgcactggaccagagcctaagcctgagcgttgacggaggcaaccctaagataataaccaatctgtccaagcagtctaccctcaactttgactcgcctctgtatgtaggcggaatgccaggaaaaagcaacgtcgcctccttgcgccaagctccaggccaaaacgggacttctttccacggatgcatccgaaatctgtatatcaacagtgaactgcaagattttcagaaagtacccatgcagacagggatactgcccggctgtgaaccttgtcacaagaaggtctgtgcacatggaacctgtcaaccatccagccaggccggcttcacgtgcgaatgccaagagggctggatgggccccctatgcgaccagagaacgaacgatccctgcttgggaaataagtgcgtccacggtacgtgtctgcctatcaatgcgttttcctattcttgcaaatgtctagagggccacggaggcgtgctgtgcgatgaggaagaagatctgtttaatccttgccaggctatcaagtgtaaacacgggaagtgcagactgtctggattaggccaaccatactgcgaatgcagctccggctacacaggggattcctgtgatagagaaattagctgcagaggtgagcgcataagggactattatcaaaaacaacagggatacgcggcatgccaaactactaagaaggtgtctcgcctcgagtgtcgaggaggctgtgctggcgggcaatgttgcggtccccttaggtccaaaagacgtaagtattcattcgaatgcaccgatggaagtagctttgtggatgaggtggagaaagttgtcaagtgcgggtgcacaaggtgcgtatcttag

SEQ ID NO: 107848 - DNA, 4578 bp, Artificial Sequence
  derived and/or modified sequence
atgagaggagtgggctggcagatgctgagcctgagcctgggcctggtgctggccatcctgaacaaggtggccccccaggcctgcccagcccagtgcagctgcagcggcagcacagtggactgccacggcctggccctgcggtctgtgcccaggaacatccccaggaacacagagcggctggacctgaatggaaacaacatcacccgcatcaccaagacagactttgctggcctgcggcacctgcgggtgctgcagctgatggagaacaagatcagcaccatcgagcggggggccttccaggacctgaaggagctggagcggctgcggctgaacagaaaccacctgcagctgtttcctgagctgctcttcctgggcacagccaagctgtaccgcctggacctgtctgagaaccagatccaggccatccccaggaaggccttcagaggagctgtggacatcaagaacctgcagctggactacaaccagatcagctgcattgaagatggagccttccgggccctgcgggacctggaggtgctgaccctgaacaacaacaacatcacccggctgtctgtggccagcttcaaccacatgcccaagctgcggaccttccggctgcacagcaacaacctgtactgtgactgccacctggcctggctgagtgactggctgcggcagaggccccgggtgggcctgtacacccagtgcatgggccccagccacctgcggggccacaacgtggccgaggtgcagaagcgggagtttgtgtgcagcggcaagggggagggccaccagagcttcatggcccccagctgcagcgtgctgcactgcccagctgcctgcacctgcagcaacaacatcgtggactgccggggcaagggcctgacagagatccccaccaacctgcctgagaccatcacagagatccggctggagcagaacaccatcaaggtgatccccccaggggccttcagcccctacaagaagctgcggagaattgacctgagcaacaaccagatcagcgagctggccccagatgccttccagggcctgcggagcctgaacagcctggtgctgtatggcaacaagatcacagagctgcccaagagcctgtttgagggcctcttcagcctgcagctgctgctgctgaatgccaacaagatcaactgcctgcgggtggatgccttccaggacctgcacaacctgaacctgctgagcctgtatgacaacaagctgcagaccatcgccaagggcaccttcagccccctgcgggccatccagaccatgcacctggcccagaaccccttcatctgtgactgccacctgaagtggctggccgactacctgcacaccaaccccatcgagaccagcggggcccgctgcaccagcccccggcggctggccaacaagagaattggccagatcaagagcaagaagttccgctgcagcggcacagaggactaccgcagcaagctgagcggggactgctttgctgacctggcctgcccagagaagtgccgctgtgagggcaccaccgtggactgcagcaaccagaagctgaacaagatccctgagcacatcccccagtacacagctgagctgcggctgaacaacaatgagttcaccgtgctggaggccaccggcatcttcaagaagctgccccagctgaggaagatcaacttcagcaacaacaagatcacagacatcgaggagggcgcctttgagggcgccagcggcgtgaatgagatcctgctgaccagcaaccggctggagaatgtgcagcacaagatgttcaagggcctggagagcctgaagaccctgatgctgcggagcaaccgcatcacctgtgtgggcaatgacagcttcatcggcctgagctctgtgcggctgctgagcctgtatgacaaccagatcaccaccgtggcccctggggcctttgacaccctgcacagcctgagcaccctgaacctgctggccaaccccttcaactgcaactgctacctggcctggctgggggagtggctgaggaagaagagaattgtgacaggcaacccccgctgccagaagccctacttcctgaaggagatccccatccaggatgtggccatccaggacttcacctgtgatgatggaaatgatgacaacagctgcagccccctgagccgctgccccacagagtgcacctgcctggacacagtggtgcgctgcagcaacaagggcctgaaggtgctgcccaagggcatccccagagatgtgacagagctgtacctggatggcaaccagttcaccctggtgcccaaggagctgagcaactacaagcacctgaccctgattgacctgagcaacaaccgcatcagcaccctgagcaaccagagcttcagcaacatgacccagctgctgaccctcatcctgagctacaaccggctgcgctgcatcccccccaggacctttgatggcctgaagagcctgcggctgctgagcctgcatggaaatgacatctctgtggtgcctgagggcgccttcaatgacctgagcgccctgagccacctggccatcggggccaaccccctgtactgtgactgcaacatgcagtggctgagtgactgggtgaagtctgagtacaaggagcccggcatcgcccgctgtgccggccctggagagatggctgacaagctgctgctgaccacccccagcaagaagttcacctgccagggccctgtggatgtgaacatcctggccaagtgcaacccctgcctgagcaacccctgcaagaatgatggcacctgcaacagcgaccctgtggacttctaccgctgcacctgcccctacggcttcaagggccaggactgtgatgtgcccatccacgcctgcatcagcaacccctgcaagcacggcggcacctgccacctgaaggagggggaggaggatggcttctggtgcatctgtgctgatggctttgaaggagagaactgtgaggtgaatgtggatgactgtgaagataatgactgtgagaacaacagcacctgtgtggatggcatcaacaactacacctgcctgtgccccccagagtacacaggagagctgtgtgaggagaagctggacttctgtgcccaggacctgaacccctgccagcacgacagcaagtgcatcctgacccccaagggcttcaagtgtgactgcaccccaggctacgtgggggagcactgtgacatcgactttgatgactgccaggacaacaagtgcaagaatggagcccactgcacagatgctgtgaatggctacacctgcatctgcccagagggctacagcggcctcttctgtgagttcagcccccccatggtgctgcccaggaccagcccctgtgacaactttgactgccagaatggagcccagtgcatcgtgcgcatcaatgagcccatctgccagtgcctgcccggctaccagggcgagaagtgtgagaagctggtgtctgtgaacttcatcaacaaggagagctacctgcagatccccagcgccaaggtgcggccccagaccaacatcaccctgcagatcgccacagatgaggacagcggcatcctgctgtacaagggggacaaggaccacatcgctgtggagctgtaccggggccgggtgcgggccagctatgacaccggcagccacccagccagcgccatctacagcgtggagaccatcaatgatggcaacttccacatcgtggagctgctggccctggaccagagcctgagcctgtctgtggatggcggcaaccccaagatcatcaccaacctgagcaagcagagcaccctgaactttgacagccccctgtatgtgggcggcatgcctgggaagagcaatgtggccagcctgcggcaggcccctggccagaatggcaccagcttccacggctgcatccggaacctgtacatcaacagcgagctgcaggacttccagaaggtgcccatgcagacaggcatcctgcccggctgtgagccctgccacaagaaggtgtgtgcccacggcacctgccagcccagcagccaggccggcttcacctgtgagtgccaggagggctggatgggccccctgtgtgaccagaggaccaatgacccctgcctgggcaacaagtgtgtgcacggcacctgcctgcccatcaatgccttctcctacagctgcaagtgcctggagggccatggaggagtgctgtgtgatgaggaggaggacctcttcaacccctgccaggccatcaagtgcaagcatggaaaatgtcggctgagcggcctgggccagccctactgtgaatgtagcagcggctacacaggagacagctgtgaccgggagatcagctgccgcggggagcgcatccgggactactaccagaagcagcagggctatgctgcctgccagaccaccaagaaggtgtcccggctggagtgccggggcggctgtgccggcggccagtgctgcggccccctgcggagcaagaggaggaagtacagctttgaatgtacagatggcagcagctttgtggatgaggtggagaaggtggtgaagtgtggctgcacccgctgtgtgtcctag

SEQ ID NO: 107849 - DNA, 4578 bp, Artificial Sequence
  derived and/or modified sequence
atgagaggagtgggctggcagatgctgagcctgagcctgggcctggtgctggccatcctgaacaaggtggccccccaggcctgcccagcccagtgcagctgcagcggcagcacagtggactgccacggcctggccctgcggtctgtgcccaggaacatccccaggaacacagagcggctggacctgaatggaaacaacatcacccgcatcaccaagacagactttgctggcctgcggcacctgcgggtgctgcagctgatggagaacaagatcagcaccatcgagcggggggccttccaggacctgaaggagctggagcggctgcggctgaacagaaaccacctgcagctgtttcctgagctgctcttcctgggcacagccaagctgtaccgcctggacctgtctgagaaccagatccaggccatccccaggaaggccttcagaggagctgtggacatcaagaacctgcagctggactacaaccagatcagctgcattgaagatggagccttccgggccctgcgggacctggaggtgctgaccctgaacaacaacaacatcacccggctgtctgtggccagcttcaaccacatgcccaagctgcggaccttccggctgcacagcaacaacctgtactgtgactgccacctggcctggctgagtgactggctgcggcagaggccccgggtgggcctgtacacccagtgcatgggccccagccacctgcggggccacaacgtggccgaggtgcagaagcgggagtttgtgtgcagtgatgaggaggagggccaccagagcttcatggcccccagctgcagcgtgctgcactgcccagctgcctgcacctgcagcaacaacatcgtggactgccggggcaagggcctgacagagatccccaccaacctgcctgagaccatcacagagatccggctggagcagaacaccatcaaggtgatccccccaggggccttcagcccctacaagaagctgcggagaattgacctgagcaacaaccagatcagcgagctggccccagatgccttccagggcctgcggagcctgaacagcctggtgctgtatggcaacaagatcacagagctgcccaagagcctgtttgagggcctcttcagcctgcagctgctgctgctgaatgccaacaagatcaactgcctgcgggtggatgccttccaggacctgcacaacctgaacctgctgagcctgtatgacaacaagctgcagaccatcgccaagggcaccttcagccccctgcgggccatccagaccatgcacctggcccagaaccccttcatctgtgactgccacctgaagtggctggccgactacctgcacaccaaccccatcgagaccagcggggcccgctgcaccagcccccggcggctggccaacaagagaattggccagatcaagagcaagaagttccgctgcagcggcacagaggactaccgcagcaagctgagcggggactgctttgctgacctggcctgcccagagaagtgccgctgtgagggcaccaccgtggactgcagcaaccagaagctgaacaagatccctgagcacatcccccagtacacagctgagctgcggctgaacaacaatgagttcaccgtgctggaggccaccggcatcttcaagaagctgccccagctgaggaagatcaacttcagcaacaacaagatcacagacatcgaggagggcgcctttgagggcgccagcggcgtgaatgagatcctgctgaccagcaaccggctggagaatgtgcagcacaagatgttcaagggcctggagagcctgaagaccctgatgctgcggagcaaccgcatcacctgtgtgggcaatgacagcttcatcggcctgagctctgtgcggctgctgagcctgtatgacaaccagatcaccaccgtggcccctggggcctttgacaccctgcacagcctgagcaccctgaacctgctggccaaccccttcaactgcaactgctacctggcctggctgggggagtggctgaggaagaagagaattgtgacaggcaacccccgctgccagaagccctacttcctgaaggagatccccatccaggatgtggccatccaggacttcacctgtgatgatggaaatgatgacaacagctgcagccccctgagccgctgccccacagagtgcacctgcctggacacagtggtgcgctgcagcaacaagggcctgaaggtgctgcccaagggcatccccagagatgtgacagagctgtacctggatggcaaccagttcaccctggtgcccaaggagctgagcaactacaagcacctgaccctgattgacctgagcaacaaccgcatcagcaccctgagcaaccagagcttcagcaacatgacccagctgctgaccctcatcctgagctacaaccggctgcgctgcatcccccccaggacctttgatggcctgaagagcctgcggctgctgagcctgcatggaaatgacatctctgtggtgcctgagggcgccttcaatgacctgagcgccctgagccacctggccatcggggccaaccccctgtactgtgactgcaacatgcagtggctgagtgactgggtgaagtctgagtacaaggagcccggcatcgcccgctgtgccggccctggagagatggctgacaagctgctgctgaccacccccagcaagaagttcacctgccagggccctgtggatgtgaacatcctggccaagtgcaacccctgcctgagcaacccctgcaagaatgatggcacctgcaacagcgaccctgtggacttctaccgctgcacctgcccctacggcttcaagggccaggactgtgatgtgcccatccacgcctgcatcagcaacccctgcaagcacggcggcacctgccacctgaaggagggggaggaggatggcttctggtgcatctgtgctgatggctttgaaggagagaactgtgaggtgaatgtggatgactgtgaagataatgactgtgagaacaacagcacctgtgtggatggcatcaacaactacacctgcctgtgccccccagagtacacaggagagctgtgtgaggagaagctggacttctgtgcccaggacctgaacccctgccagcacgacagcaagtgcatcctgacccccaagggcttcaagtgtgactgcaccccaggctacgtgggggagcactgtgacatcgactttgatgactgccaggacaacaagtgcaagaatggagcccactgcacagatgctgtgaatggctacacctgcatctgcccagagggctacagcggcctcttctgtgagttcagcccccccatggtgctgcccaggaccagcccctgtgacaactttgactgccagaatggagcccagtgcatcgtgcgcatcaatgagcccatctgccagtgcctgcccggctaccagggcgagaagtgtgagaagctggtgtctgtgaacttcatcaacaaggagagctacctgcagatccccagcgccaaggtgcggccccagaccaacatcaccctgcagatcgccacagatgaggacagcggcatcctgctgtacaagggggacaaggaccacatcgctgtggagctgtaccggggccgggtgcgggccagctatgacaccggcagccacccagccagcgccatctacagcgtggagaccatcaatgatggcaacttccacatcgtggagctgctggccctggaccagagcctgagcctgtctgtggatggcggcaaccccaagatcatcaccaacctgagcaagcagagcaccctgaactttgacagccccctgtatgtgggcggcatgcctgggaagagcaatgtggccagcctgcggcaggcccctggccagaatggcaccagcttccacggctgcatccggaacctgtacatcaacagcgagctgcaggacttccagaaggtgcccatgcagacaggcatcctgcccggctgtgagccctgccacaagaaggtgtgtgcccacggcacctgccagcccagcagccaggccggcttcacctgtgagtgccaggagggctggatgggccccctgtgtgaccagaggaccaatgacccctgcctgggcaacaagtgtgtgcacggcacctgcctgcccatcaatgccttctcctacagctgcaagtgcctggagggccatggaggagtgctgtgtgatgaggaggaggacctcttcaacccctgccaggccatcaagtgcaagcatggaaaatgtcggctgagcggcctgggccagccctactgtgaatgtagcagcggctacacaggagacagctgtgaccgggagatcagctgccgcggggagcgcatccgggactactaccagaagcagcagggctatgctgcctgccagaccaccaagaaggtgtcccggctggagtgccggggcggctgtgccggcggccagtgctgcggccccctgcggagcaagaggaggaagtacagctttgaatgtacagatggcagcagctttgtggatgaggtggagaaggtggtgaagtgtggctgcacccgctgtgtgtcctag

SEQ ID NO: 107850 - DNA, 4578 bp, Artificial Sequence
  derived and/or modified sequence
atgcggggcgtgggctggcagatgctgagcctgagcctgggcctggtgttggcaatcctgaataaggtggctccacaggcctgtcctgcgcagtgctcttgtagtggttctactgtggactgccacggattagccttacggtcagtaccacggaacataccacgaaatacagagagactggacttgaatgggaacaacatcactcgtatcaccaagacagattttgccggattgcgacacttgagggtgctgcagctcatggagaacaagatctcgaccatagaaagaggagcctttcaagacttgaaggagctcgaaaggttacgccttaatcgcaatcacctccagctgttcccagagctcttatttcttggcaccgctaagctgtataggctggacctgtccgagaaccaaatccaggcaattcctcgaaaggcttttcgaggcgccgtcgacatcaaaaatcttcagttggattataaccaaatatcatgcatcgaagacggtgctttcagagccctacgggatttggaagtgctgactctcaataataacaatattacccggctgagcgtggcctcattcaaccacatgcccaagcttaggaccttccgactgcatagtaataatttatactgtgactgccacctagcctggctgagcgattggctgcgacagcgcccccgcgtgggcttgtacacccagtgcatgggccccagccatctccgggggcacaacgtggccgaagtgcagaagagggaatttgtctgcagtggcaagggagagggccaccagtcgtttatggccccttcatgcagcgtactgcactgtccagccgcttgtacttgctctaacaatattgttgactgtcggggtaaaggtctgactgagattcccaccaacctcccggagactatcactgagatcagactggaacagaacactataaaggttataccacccggggccttttctccttacaagaagctccgacggatagacttgtcgaacaaccagatctcggaactggctcctgatgccttccaaggattacgttcacttaacagtctcgtactgtatggcaataagataacagagctgcctaaatccttgtttgaaggtctgttttcacttcagctcctgttattaaatgcgaacaaaatcaactgtctgcgcgtcgacgctttccaggatctgcataacctgaaccttctgagtctttacgataataagctccagactattgcaaaaggaacctttagccccctccgtgcaatccagacaatgcatctggctcagaatccctttatctgcgactgccatctgaaatggctggccgattacctccacacaaatcctattgaaaccagtggggcgaggtgtacctccccacggcgcctggcaaacaagcgcattgggcaaattaaatctaaaaagttcaggtgctccgggaccgaggactatagatccaagctgagcggcgattgtttcgccgacctggcctgcccagagaagtgccgttgtgaaggtacgacagtcgactgtagcaaccaaaagctcaacaagatcccggaacacataccgcaatatactgccgaactgcgcctgaataacaacgaatttaccgtactcgaggcaaccggaatttttaagaagctaccccagcttagaaaaattaatttttcaaataataagatcactgatattgaggaaggggccttcgagggagcctcgggggttaacgaaatcctactgacaagtaaccgtttagagaacgtgcaacacaagatgtttaaaggcctcgagtcattgaagactttaatgctgagatcaaatagaatcacctgtgtcggtaatgatagttttatcggtttgtcttccgtaaggctactgtccctctacgacaatcagatcaccactgtagccccgggcgcatttgataccctccatagcctctccacgctcaatctcctggccaatccgttcaactgtaactgctacctagcatggctgggggagtggctccggaagaagaggattgttactggaaatcctagatgtcaaaagccgtattttctaaaggaaatacctatccaggacgttgctatccaggactttacatgcgacgatgggaacgatgacaactcatgctcccctctgagtcgttgcccaaccgagtgcacatgtctggacaccgtggtgcgctgtagcaataaaggcctcaaagtgctacccaaggggattccaagagatgtgacagagctttatctggacggcaatcagtttacactggttcctaaagaattaagcaattataagcatctaaccctaattgatctctccaataaccggatcagcaccctgagtaatcagtcatttagcaatatgacgcagttgctaaccctcatcctttcctataatcgcctgcggtgtattccacccagaacattcgatggactcaagagtttacggctgctctctcttcatgggaacgacatatcggtagttccggagggagcttttaacgacctgagtgccctgtctcacttggctatcggcgccaatccattatattgtgactgcaatatgcagtggttgtccgactgggttaagtccgagtataaagagccaggaattgcacggtgtgctggaccaggcgagatggccgacaaactgctgctgaccaccccgtctaagaagtttacctgtcagggtcccgttgatgtgaacatactcgcaaaatgtaatccttgtttgtctaatccgtgcaaaaacgacggaacttgcaatagcgatccggttgacttctaccggtgcacatgcccttatgggtttaaaggacaagattgtgatgtgcctattcacgcctgcattagtaacccttgtaaacacggtggtacctgccacctgaaagagggcgaagaggatggcttttggtgcatttgcgccgacggctttgaaggagaaaactgtgaggtgaatgttgacgactgcgaagataacgattgcgagaacaactctacctgcgttgacgggattaacaactacacatgtctgtgtccaccagagtatacaggagaactgtgcgaggaaaaattggacttttgtgcccaggacttgaacccttgccaacatgactccaaatgtatcctgactccaaaaggcttcaaatgcgactgcactccgggctacgtaggggagcactgcgatatcgatttcgatgattgtcaggataacaaatgtaagaatggcgcccactgcactgatgcggtaaatggatatacctgcatctgtccggagggctatagtggattattttgtgaattttcccctccaatggtattacctcgcacgagcccctgcgataattttgattgccagaacggggctcagtgtatcgtccgtatcaacgagcctatctgccagtgcctgcctggataccagggcgaaaagtgtgagaagctggttagcgtcaacttcatcaacaaggaaagttatctgcagatacctagcgcaaaggtgagaccacagacaaatatcaccctgcaaattgctacagacgaggacagtggcatccttctctataagggggacaaagatcatatcgccgtcgagctgtaccggggccgcgtgagggcctcctacgatacaggttcacacccagcatctgccatatatagtgttgagacaattaatgacgggaactttcacatcgtggagttgctagctcttgaccaatctttatcactgtccgttgacggcggtaaccctaagatcattacaaacttaagcaaacagagtacccttaattttgatagccctctctacgtaggagggatgcctggcaagtctaacgtggcatcactgagacaggctcctggccagaacggcaccagcttccatggctgcatccgtaatctgtacattaacagtgaactgcaggatttccaaaaagtgcctatgcagaccggcatcctgccgggctgcgaaccatgccacaagaaagtttgcgcccacggcacatgccaaccatcttctcaggccgggttcacgtgtgaatgtcaagagggatggatgggcccgttgtgtgatcagcgaacaaatgacccttgccttgggaacaagtgtgtgcatggcacctgtctccctattaacgccttttcttattcctgtaagtgcctcgaggggcatggcggagtgctttgtgatgaagaggaagatctgtttaacccatgccaggctataaaatgtaagcatggcaagtgtcgactcagtgggttaggacagccttactgcgagtgctctagtggatacaccggcgactcatgcgaccgcgagatatcttgtaggggggaacggatcagagactactatcagaaacagcagggctacgctgcctgccaaactacaaagaaagtttccagattagaatgccgaggtgggtgcgccggggggcagtgctgtgggccactgcgcagtaagcgaagaaaatattcttttgagtgtacagacggctcctcgttcgtggacgaagtggagaaggtcgttaagtgcgggtgcacacgctgcgtttcctag

SEQ ID NO: 107851 - DNA, 4578 bp, Artificial Sequence
  derived and/or modified sequence
atgcggggcgtgggctggcagatgctgagcctgagcctgggcctggtgttggcaatattgaacaaagtcgcccctcaggcgtgtcctgcccaatgttcctgttccggcagtactgtcgattgtcatggtctggctctgaggtcagtccctagaaatataccacgcaacacggaacgacttgacttgaatgggaacaacataacccgaataactaagaccgattttgctggtctgcggcacttaagagtgcttcagttgatggaaaacaagatcagcacaattgaaagaggagctttccaagatctgaaggaactggagcgtttgagactaaacaggaatcaccttcagctgtttccagaactactgttccttggtaccgccaagctgtacagactggacctcagtgaaaatcagatccaggccatcccacgtaaggctttcagaggcgccgtagatattaaaaacctacagctcgactacaaccagattagctgtatagaggatggcgccttccgtgcactcagagatctggaggttttaacccttaacaataacaatataacacgcctgagtgtggctagctttaatcatatgcctaaactgcgcaccttccgacttcatagcaacaacctctattgcgattgtcaccttgcatggctctcagactggctccgccagcgtcctagagtggggctctatacacagtgtatgggcccctcacacctgcgtggccacaacgtggcagaggtgcagaaacgcgagtttgtgtgctccgacgaagaggagggccaccaatcttttatggcccctagctgctccgtgcttcattgcccggctgcctgcacttgttcaaataacattgtcgattgtcgggggaagggcttgaccgaaattccaactaacttaccagagacgatcacagagatccgattagaacagaatacaatcaaggttattcctccaggtgcctttagcccttataaaaaacttcggcgaattgatctttcaaataatcagatctccgaattggcccctgacgcatttcagggactgcgaagcctgaactctctcgtgctgtatggaaataagatcacagaattgccaaagtcgttgtttgaagggttatttagcttacagctcttactgttgaacgccaacaagatcaattgtctgagagtcgatgccttccaggatcttcataatctgaacctcctatcactgtacgataacaaactccagacaatagccaaaggcacattcagtccactgagagccatccagacaatgcacctcgctcagaaccccttcatctgtgactgccatctgaagtggttggcagattaccttcacaccaaccctatcgaaactagcggagcgagatgtacctcgccacggaggttggctaataagaggatcggtcagattaagtcaaagaaatttaggtgttccggaaccgaggactacagatctaagctaagcggcgactgttttgcagacctcgcttgccccgaaaagtgtcggtgcgaaggaaccaccgtggattgctcgaatcaaaaacttaacaagatccctgagcacattccccaatacactgcggagctcaggttaaacaataacgagtttacagtcttagaagctactgggattttcaagaaacttcctcagctgagaaagattaatttctctaataacaaaatcaccgatatcgaggaaggggctttcgaaggtgcgagcggcgtcaacgagatcctgctgacctcgaaccgcctggagaatgtacagcacaagatgttcaaaggtctcgagagcctcaaaacactcatgctgaggtccaatcggataacatgtgtcgggaatgactccttcataggactgtcaagtgttcgcttgctgtcattgtacgataaccagatcacaacagtcgcaccgggggcttttgacaccctacatagcctctctaccctcaacctacttgccaatccatttaattgcaattgctacctggcgtggctgggcgagtggttacggaagaaaaggatcgtcaccgggaaccctagatgtcagaaaccctacttcctgaaggaaattcccattcaggatgttgctattcaagattttacatgcgacgatggcaatgacgataacagctgctcgcctctaagtaggtgtccaaccgagtgtacctgcctggataccgttgtgaggtgctcaaacaaggggctgaaagtgctgcccaaggggattccacgcgacgttacggagctctacctcgatgggaaccagttcaccctggttcccaaagagctgtccaactataagcatctcactttaattgacttgagtaacaaccgcatctccaccctgagcaaccaaagtttttcaaacatgacacagctcctcaccctgattctctcctataaccgcttgcggtgtataccccccaggacatttgacggcctgaaatccttaagactgttatctttgcacggcaatgacatctctgtggtgcccgaaggagcctttaatgacttgtcagcattgagccacctcgcaattggcgcaaacccattatattgcgattgtaacatgcaatggctttctgactgggttaaatctgagtacaaagaacccgggattgctcggtgtgctggtcctggagagatggccgataagctactccttaccaccccttctaaaaaattcacatgtcaaggacctgtggatgttaacatcctggccaagtgcaacccttgcctgagcaatccctgcaaaaatgacgggacatgcaatagcgaccccgttgacttctatagatgcacctgtccttacggattcaaggggcaggactgtgacgtcccgatacacgcgtgcatttcaaatccctgtaaacacgggggcacatgtcacctgaaggaaggcgaggaggatggattctggtgcatctgtgcagatgggtttgaaggggagaattgtgaagttaatgtcgacgattgtgaagacaacgactgtgagaataactccacatgtgtggatggcatcaataactatacctgcctttgcccgcctgaatatacaggagaactgtgtgaggaaaagctcgacttctgcgcgcaggatcttaatccctgtcagcatgattcaaagtgtatacttacacccaaaggcttcaagtgtgactgtactcctggctatgtcggggaacattgcgacatcgacttcgatgattgccaggacaataaatgcaagaatggagcacactgcaccgatgcagtgaatggctatacctgcatttgccccgagggttacagtggcctgttttgtgagttctcgccacctatggtcctaccacgtacatctccgtgtgataatttcgattgccaaaacggggcgcagtgcatcgtgagaatcaacgaaccaatttgtcagtgcctgcccggttatcaaggagagaaatgcgagaaactggttagtgtcaacttcataaataaagaaagttacctgcagatccctagtgccaaagtgaggccacagacaaatataacattacagatcgccacggacgaggattccggcattcttctgtacaagggggataaagatcacatcgctgtggaactatatcgtggaagagtccgcgcttcttatgatacaggttcccaccctgcctccgccatttacagcgtagaaaccatcaacgacggaaactttcatatcgtggagcttttagcacttgaccagagtctctccttgtctgtggacggaggaaaccctaagatcataactaacctctctaagcagtcaacattgaatttcgacagccctctgtatgtgggcggcatgcctggaaagtcaaacgtcgccagcctgcgccaggcccccggccagaacgggacatcatttcatgggtgtatccgcaacctctacataaactcagaattacaggacttccagaaggtgcctatgcagaccgggatcctccccggttgtgagccttgtcataagaaggtgtgcgcccatgggacgtgtcaacctagctcacaggctggtttcacttgcgagtgccaggaaggatggatggggccgctgtgtgaccagaggacaaatgatccatgccttggtaataagtgcgttcacggcacgtgcttgccaataaatgctttttcttattcgtgcaaatgtctcgagggccatggaggcgtgctctgtgatgaggaggaggacttgttcaacccgtgtcaagccatcaagtgtaagcacgggaagtgccgcttgagcggactcgggcagccatactgcgagtgttcctctggctacaccggcgactcctgcgatcgcgagatctcgtgtagaggagagcggatccgggattactaccaaaaacagcaagggtacgctgcgtgtcagacaactaaaaaggtgagcaggctggagtgcagaggcgggtgtgctgggggccagtgctgcggtcctctccgatccaaaagacgaaaatacagctttgagtgtaccgacggcagctctttcgtcgatgaggtcgagaaagtcgttaagtgtgggtgtacccgatgcgtcagctag

SEQ ID NO: 107852 - DNA, 4578 bp, Artificial Sequence
  derived and/or modified sequence
atgaggggggtgggatggcagatgctatctctgtccctgggactggtcttagctatcctgaataaagttgctccccaagcctgcccagcccaatgcagctgctccggctctacagtggattgccacggcctggccttacggtctgtcccccgaaacatcccacggaatacagagcggctggacctgaacggtaacaacataactaggataacaaagactgatttcgctgggttaaggcatctcagggtgctacagttgatggagaacaaaattagtaccatagagcgcggtgccttccaggatctcaaggagctggagcgcctcagactgaatagaaaccacttacagctgttccctgaactcctctttctggggaccgccaaactgtaccgactcgacctttccgaaaaccagattcaggccatacccaggaaagctttccgaggcgctgtcgacatcaagaatctgcagctggactataaccagatctcatgcattgaagacggtgcctttcgcgcattgagggacctagaagtgctgacacttaacaacaataatatcacgcgcctgtcagtggcctccttcaaccatatgccaaaattaagaacctttaggctccacagtaacaatctatactgcgattgccaccttgcatggctgtctgattggttgcgacagaggcctagggtgggcttgtacacccaatgtatgggcccttctcaccttcggggacacaacgtggctgaggtacagaaacgtgaattcgtctgcagtgggaagggtgaaggccaccagagcttcatggccccttcatgctcagtgctccactgtcccgctgcttgtacctgcagcaataacatagtagattgtcggggaaagggtctgacagagatcccaacaaatctgccagaaaccattacggagattcgtctcgaacagaacaccattaaggtgattcctccaggtgcattttcaccctacaagaaattaaggcggattgatttgagtaacaaccaaatttcagaattagccccagacgcctttcaggggctgaggagcctgaattcgctcgtcctgtatggaaataagattacagaactgccgaaatctcttttcgaggggctgttcagcctgcaactccttcttctgaacgctaacaaaatcaattgtctccgggtggacgcttttcaggaccttcacaacctcaacttgctctccctgtacgacaataagctacagacaatcgccaagggcactttctccccactgcgcgctatccagaccatgcatcttgctcagaatcccttcatctgcgattgtcaccttaagtggctggctgattacttacacaccaatcccatcgagacttccggcgctagatgtaccagtcctcggcgacttgcgaacaagcgaattggccagattaaatctaaaaagttccgctgttccggaacagaggactacaggagtaagcttagtggggactgttttgccgaccttgcctgccctgaaaaatgtaggtgtgaaggaacaacggttgactgttcaaaccaaaaattgaataagatcccagagcacatccctcagtatacagccgaactcaggttgaacaataatgaatttactgtgctcgaagcgactggcatttttaagaagctgccccaactcaggaagatcaacttctcaaacaataaaataacagatattgaggaaggggcattcgagggtgcatccggcgttaatgaaatccttctgacctctaataggctggaaaacgtgcagcacaaaatgttcaaaggcctggaatccctaaagacactgatgctccgctcaaatcggatcacctgtgtcgggaatgattcctttatcgggctgtccagcgtcagactgctgtcattgtacgataaccagattacaacagtggccccaggggcattcgacacactgcacagcctgagtacattaaaccttctggcaaacccatttaattgtaactgctatctcgcctggctcggagaatggctccgtaaaaaacggattgtaacaggcaatccaagatgtcagaagccttatttcttgaaagaaatccctatccaggacgttgctatccaggacttcacctgtgacgacggcaacgatgataattcctgttcacctctgtcaaggtgccccaccgaatgtacctgtcttgacacggtcgttcggtgctccaacaaaggattgaaagttctgccaaaaggcatcccgcgagatgtgacagagttgtaccttgacggaaaccagtttaccctcgtgccgaaggagctttctaattacaaacatctgaccttgatagacctctccaacaaccgaataagcacgctcagtaaccagtcattctccaatatgacacagctactgaccctgattctgtcctataacaggctgcggtgcatcccacccagaacttttgacgggttgaagtctctcaggcttctcagtctccacggcaacgacatctcagtcgtgccagaaggggcatttaatgatctctcagctctgtcccacttggccattggcgcaaacccactgtactgtgattgcaacatgcagtggctatctgactgggtaaagtcagaatacaaggagcctggaatcgcacgctgcgccggaccaggagagatggcagataagctgcttctgactactccgtctaaaaaattcacatgccaagggccagtggatgtgaatatcctggcgaagtgtaatccctgtctgagtaatccgtgtaaaaacgacggtacctgcaatagcgacccagtcgatttctacaggtgcacctgtccctacggctttaaggggcaggactgcgatgtgccaatccatgcctgtattagcaacccctgtaagcacgggggaacctgccacctgaaggaaggtgaggaagacgggttttggtgtatttgtgccgatggttttgaaggtgagaactgtgaggttaatgtcgatgattgtgaggataatgactgtgaaaataacagtacctgtgttgatggcatcaacaattacacatgtctttgtccaccagagtacaccggcgaactgtgcgaggaaaagcttgacttctgcgcccaggacctaaacccctgccagcacgattccaagtgcatcctcactcccaaggggttcaagtgcgactgcaccccaggctacgtaggcgaacactgcgatattgattttgacgattgtcaggataataagtgcaagaatggagcccactgtacagatgccgtaaatgggtatacatgcatatgtccggaggggtacagtggtctcttctgcgagtttagcccccctatggtacttcctagaaccagcccctgtgacaactttgattgccaaaatggcgctcagtgcatcgtgaggattaacgaaccaatttgtcagtgcctgccaggatatcaaggcgagaagtgtgaaaagcttgtctcagtgaattttattaataaagagagctacctgcaaatcccctccgccaaggtccggcctcagacaaatatcacgctccagattgcaaccgatgaagactccgggatattactctacaagggcgacaaagatcacattgcagtggaactgtaccggggacgtgtccgtgcctcttacgacactggctcacacccagcctccgcgatctattccgtggagactataaacgacggtaattttcatatagtcgagttgcttgcgctggaccagtcactgtccctgtctgtggatggtggaaacccgaagataattacaaacctctctaagcagtctacgctgaattttgacagccctctgtacgtgggcggaatgccagggaagagtaatgttgctagcttgaggcaagcacctgggcagaatggaacatcattccatggttgcatcagaaacctttatattaacagcgagttacaggattttcagaaggtgcccatgcaaaccgggattttgccgggatgtgagccttgccataagaaagtctgcgcccacggtacatgccagcctagttcccaggccggttttacctgcgagtgtcaggaaggatggatggggccactttgcgaccagaggactaacgacccttgcttaggaaataaatgtgtgcacgggacttgccttccaatcaacgcctttagctactcgtgtaagtgccttgaaggccatgggggtgttttgtgtgacgaggaagaggatctgttcaacccttgccaggccatcaaatgtaaacatggcaaatgcaggctctccggccttggccagccttactgcgaatgttcctctggttacaccggcgatagctgtgaccgggagatatcctgcaggggggaacgaatccgagactactaccagaagcagcaagggtatgccgcttgccagaccacaaagaaggtgagcaggctcgaatgcaggggcggatgcgcagggggacagtgctgtggcccactgagatcaaaacgaaggaagtactctttcgaatgcactgacggctcctcctttgtagacgaggtggaaaaggtggtcaagtgcggctgcacacggtgcgtgtcatag

SEQ ID NO: 107853 - DNA, 4578 bp, Artificial Sequence
  derived and/or modified sequence
atgcgtggtgtcgggtggcagatgctgtcactctccctaggacttgtcctggccatccttaataaggttgcaccccaggcatgcccagctcagtgctcgtgtagcggctctactgtggattgccatggtctcgctttaaggagtgtgccgaggaatattcccaggaacaccgaacggctggatctgaatggcaacaacatcacccggattaccaagaccgatttcgccggtctgcgccacctgcgagtgctgcaactgatggaaaacaagatctccactatcgaacgcggtgcttttcaggacctcaaggaactagaacgcctacgtctcaaccggaaccacctgcaactcttcccagaactgctcttcctgggaactgccaagttatatcgcctggacctatcggaaaatcaaatacaagctatacctagaaaggctttccgcggagctgtggacatcaagaacttgcagttggactacaatcagatttcctgcatcgaggatggagcctttagggccttaagggacctggaggtattaacattgaacaacaataacatcacacgtctgtctgtggcgtcttttaatcatatgccaaaattgcgtacctttcgactgcattctaataatctctattgcgattgccacctggcctggctctctgattggctgcgtcagaggccaagagtggggctctacacccagtgcatgggcccatcacacctacgaggccataacgtggcggaggtgcagaaacgggagttcgtgtgttccgacgaagaagaaggacatcagtccttcatggcacctagttgcagcgtcttgcactgtcccgctgcatgtacatgcagtaacaacatcgtcgattgcagagggaagggactgacagaaatccctacgaacctgccggagactatcacggaaatccgattggaacaaaacactattaaggtaatacctccaggggctttcagcccttacaagaaacttcggcgtatagacctgtccaacaaccagatatctgagctcgcacccgatgcgttccaggggctgcggtccctgaattccctagtcctctatggcaacaaaataaccgaattacccaagtcactgtttgaagggctgttctctctgcaactgttattactgaacgcaaataaaattaactgccttagagtagatgcgtttcaggaccttcataatctgaacttactgagtttatacgataataagcttcagaccattgccaaggggacattcagccccctgcgagccattcagaccatgcatctggcccagaatccatttatttgcgattgtcatttgaaatggctcgcggattacctgcatacgaaccccattgaaacatccggtgcaaggtgtacaagtccacggagattagctaacaagaggatcggacaaataaaatccaaaaagtttcgctgcagcgggactgaggattaccgcagtaagctgagtggagactgcttcgccgacttggcatgtcccgaaaagtgccggtgtgaggggaccactgtggactgctctaatcaaaagcttaacaaaatccccgaacacatcccacagtatacggccgaactccgattgaataataacgaattcaccgttctcgaagccactggaattttcaagaaactgcctcaactgcgaaagatcaatttctctaataataagattactgacatcgaggagggcgcattcgaaggagcctccggcgtgaatgaaattcttcttaccagcaatcggttagagaacgtgcagcacaagatgtttaaaggcctagaaagcctgaagactctgatgctaagatcaaaccgaatcacttgcgtaggaaacgacagtttcatcggtctgtcgtcagtgcgactgctaagcctctacgataaccaaattaccaccgtcgctcccggagcttttgacactcttcattcactgtccactctcaacttacttgccaaccccttcaactgtaactgttaccttgcctggctaggcgagtggctgaggaagaagcgtatagtcacaggaaacccaagatgtcaaaaaccatatttccttaaggaaattcccatccaagacgtcgctatccaagattttacctgcgacgatggtaatgacgacaactcctgctctcccctcagtaggtgcccgaccgaatgtacttgcttggacactgtcgtgcgatgcagcaataaggggctcaaggtcttaccaaaaggcattccaagggacgtcactgaactttacttggatggtaatcagtttacgttggtcccaaaggagctttccaactacaaacacctgaccctgatcgacctctccaacaaccgcatctctacactgtccaatcaatccttttccaacatgacacaactgctcacactgattctctcctataaccgcctccgctgcattcctccccgtacattcgatggtctaaagtccctgcgcctcttatctctgcacggaaacgatatctctgtggtcccggaaggcgcatttaacgatctatcagcccttagccatctggcaatcggcgcaaatccgctgtactgtgattgcaacatgcagtggctgagtgattgggtgaagtctgaatataaagagccaggaatcgctcggtgtgcgggacctggggaaatggctgacaagctgctattgaccacgcccagcaagaagttcacctgccagggtcctgtggatgttaacattctggcgaaatgtaacccctgcttgagcaacccatgtaaaaacgatggaacttgcaacagcgaccccgtcgatttttatcggtgtacctgcccttacgggttcaaggggcaggattgtgacgtcccaatacacgcttgcatttcaaatccttgtaaacatgggggtacttgtcacctcaaagaaggggaggaggacggcttttggtgcatatgcgccgatggcttcgaaggggaaaattgtgaagtaaacgtggatgactgtgaggataatgattgtgagaacaattccacctgtgtagatgggatcaacaactatacttgcctgtgtcctcccgaatataccggagaactatgcgaggagaagttggatttctgcgcgcaggatctgaacccttgccagcacgattctaagtgtatactcaccccaaagggcttcaaatgtgactgcactcctggatacgtgggtgaacattgtgacatcgacttcgacgactgtcaagacaataaatgcaaaaacggtgctcactgtacagacgccgtcaacggatacacatgtatttgtccagagggatactctgggttgttctgcgagttctcgccaccaatggtgttgcctaggacctcaccgtgcgacaatttcgattgtcagaatggagctcagtgtattgtaagaatcaacgaaccaatttgtcagtgcctcccaggatatcaaggggagaaatgtgagaaacttgtgtcagtgaacttcatcaacaaggagagctacctgcagatcccttctgctaaagtgaggccacagaccaatattacgctgcagattgctaccgatgaggattctggaatcctgctgtataagggcgacaaggatcacatcgcagtcgaactgtatcgagggagggtgcgggcttcttacgacaccggtagccaccctgcctctgccatatatagtgtagagactattaacgacgggaatttccatattgtggagctgctggcgttggaccagtccctttccctttcagtggatggaggcaaccccaagatcatcactaatctctcgaaacagtccactctaaactttgattcaccattgtacgtggggggtatgccaggcaagtccaatgtggcttctctgcggcaggccccagggcaaaatggcactagttttcatgggtgtattagaaacctctacataaactcagagttacaggacttccagaaggtgccaatgcagaccggcatcttgcccggttgcgagccatgccacaagaaggtgtgcgcccacggtacctgccagccttcttctcaggcaggctttacttgcgaatgtcaggagggctggatgggtcctctctgcgaccaaagaactaatgatccctgcctcgggaacaagtgtgtccacgggacctgtcttcccataaatgctttctcttactcatgcaaatgtctggaggggcacggtggtgttttgtgcgacgaggaagaggatctcttcaacccgtgccaagcgatcaaatgtaagcacggaaaatgtaggttgtctggactcggccagccctactgcgagtgctcctctggctatacgggagattcctgtgaccgcgagatttcgtgccggggagaaagaatccgcgactactatcaaaagcagcagggctatgccgcttgccaaacaaccaaaaaagtcagccggctggagtgtagaggagggtgcgctggaggccaatgttgcggaccactgagaagcaaacgtcggaagtactcattcgaatgtaccgatgggagcagcttcgtggatgaagttgagaaggttgtcaaatgtggttgcactaggtgcgtttcctag

SEQ ID NO: 107854 - DNA, 4938 bp, Artificial Sequence
  derived and/or modified sequence
cagaggagggtggagagggcggtgggaggcgtgtgcctgagtgggctctactgccttgttccatattatttggtgcacattttccctggcactctgggttgctagccccgccgggcactgggcctcagacactgcgcggttccctcggagcagcaagctaaagaaagcccccagtgccggcgaggaaggaggcggcggggaaagatgcgcggcgttggctggcagatgctgtccctgtcgctggggttagtgctggcgatcctgaacaaggtggcaccgcaggcgtgcccggcgcagtgctcttgctcgggcagcacagtggactgtcacgggctggcgctgcgcagcgtgcccaggaatatcccccgcaacaccgagagactggatttaaatggaaataacatcacaagaattacgaagacagattttgctggtcttagacatctaagagttcttcagcttatggagaataagattagcaccattgaaagaggagcattccaggatcttaaagaactagagagactgcgtttaaacagaaatcaccttcagctgtttcctgagttgctgtttcttgggactgcgaagctatacaggcttgatctcagtgaaaaccaaattcaggcaatcccaaggaaagctttccgtggggcagttgacataaaaaatttgcaactggattacaaccagatcagctgtattgaagatggggcattcagggctctccgggacctggaagtgctcactctcaacaataacaacattactagactttctgtggcaagtttcaaccatatgcctaaacttaggacttttcgactgcattcaaacaacctgtattgtgactgccacctggcctggctctccgactggcttcgccaaaggcctcgggttggtctgtacactcagtgtatgggcccctcccacctgagaggccataatgtagccgaggttcaaaaacgagaatttgtctgcagtggtaagggagaaggtcaccagtcatttatggctccttcttgtagtgttttgcactgccctgccgcctgtacctgtagcaacaatatcgtagactgtcgtgggaaaggtctcactgagatccccacaaatcttccagagaccatcacagaaatacgtttggaacagaacacaatcaaagtcatccctcctggagctttctcaccatataaaaagcttagacgaattgacctgagcaataatcagatctctgaacttgcaccagatgctttccaaggactacgctctctgaattcacttgtcctctatggaaataaaatcacagaactccccaaaagtttatttgaaggactgttttccttacagctcctattattgaatgccaacaagataaactgccttcgggtagatgcttttcaggatctccacaacttgaaccttctctccctatatgacaacaagcttcagaccatcgccaaggggaccttttcacctcttcgggccattcaaactatgcatttggcccagaacccctttatttgtgactgccatctcaagtggctagcggattatctccataccaacccgattgagaccagtggtgcccgttgcaccagcccccgccgcctggcaaacaaaagaattggacagatcaaaagcaagaaattccgttgttcaggtacagaagattatcgatcaaaattaagtggagactgctttgcggatctggcttgccctgaaaagtgtcgctgtgaaggaaccacagtagattgctctaatcaaaagctcaacaaaatcccggagcacattccccagtacactgcagagttgcgtctcaataataatgaatttaccgtgttggaagccacaggaatctttaagaaacttcctcaattacgtaaaataaactttagcaacaataagatcacagatattgaggagggagcatttgaaggagcatctggtgtaaatgaaatacttcttacgagtaatcgtttggaaaatgtgcagcataagatgttcaagggattggaaagcctcaaaactttgatgttgagaagcaatcgaataacctgtgtggggaatgacagtttcataggactcagttctgtgcgtttgctttctttgtatgataatcaaattactacagttgcaccaggggcatttgatactctccattctttatctactctaaacctcttggccaatccttttaactgtaactgctacctggcttggttgggagagtggctgagaaagaagagaattgtcacgggaaatcctagatgtcaaaaaccatacttcctgaaagaaatacccatccaggatgtggccattcaggacttcacttgtgatgacggaaatgatgacaatagttgctccccactttctcgctgtcctactgaatgtacttgcttggatacagtcgtccgatgtagcaacaagggtttgaaggtcttgccgaaaggtattccaagagatgtcacagagttgtatctggatggaaaccaatttacactggttcccaaggaactctccaactacaaacatttaacacttatagacttaagtaacaacagaataagcacgctttctaatcagagcttcagcaacatgacccagctcctcaccttaattcttagttacaaccgtctgagatgtattcctcctcgcacctttgatggattaaagtctcttcgattactttctctacatggaaatgacatttctgttgtgcctgaaggtgctttcaatgatctttctgcattatcacatctagcaattggagccaaccctctttactgtgattgtaacatgcagtggttatccgactgggtgaagtcggaatataaggagcctggaattgctcgttgtgctggtcctggagaaatggcagataaacttttactcacaactccctccaaaaaatttacctgtcaaggtcctgtggatgtcaatattctagctaagtgtaacccctgcctatcaaatccgtgtaaaaatgatggcacatgtaatagtgatccagttgacttttaccgatgcacctgtccatatggtttcaaggggcaggactgtgatgtcccaattcatgcctgcatcagtaacccatgtaaacatggaggaacttgccacttaaaggaaggagaagaagatggattctggtgtatttgtgctgatggatttgaaggagaaaattgtgaagtcaacgttgatgattgtgaagataatgactgtgaaaataattctacatgtgtcgatggcattaataactacacatgcctttgcccacctgagtatacaggtgagttgtgtgaggagaagctggacttctgtgcccaggacctgaacccctgccagcacgattcaaagtgcatcctaactccaaagggattcaaatgtgactgcacaccagggtacgtaggtgaacactgcgacatcgattttgacgactgccaagacaacaagtgtaaaaacggagcccactgcacagatgcagtgaacggctatacgtgcatatgccccgaaggttacagtggcttgttctgtgagttttctccacccatggtcctccctcgtaccagcccctgtgataattttgattgtcagaatggagctcagtgtatcgtcagaataaatgagccaatatgtcagtgtttgcctggctatcagggagaaaagtgtgaaaaattggttagtgtgaattttataaacaaagagtcttatcttcagattccttcagccaaggttcggcctcagacgaacataacacttcagattgccacagatgaagacagcggaatcctcctgtataagggtgacaaagaccatatcgcggtagaactctatcgggggcgtgttcgtgccagctatgacaccggctctcatccagcttctgccatttacagtgtggagacaatcaatgatggaaacttccacattgtggaactacttgccttggatcagagtctctctttgtccgtggatggtgggaaccccaaaatcatcactaacttgtcaaagcagtccactctgaattttgactctccactctatgtaggaggcatgccagggaagagtaacgtggcatctctgcgccaggcccctgggcagaacggaaccagcttccacggctgcatccggaacctttacatcaacagtgagctgcaggacttccagaaggtgccgatgcaaacaggcattttgcctggctgtgagccatgccacaagaaggtgtgtgcccatggcacatgccagcccagcagccaggcaggcttcacctgcgagtgccaggaaggatggatggggcccctctgtgaccaacggaccaatgacccttgccttggaaataaatgcgtacatggcacctgcttgcccatcaatgcgttctcctacagctgtaagtgcttggagggccatggaggtgtcctctgtgatgaagaggaggatctgtttaacccatgccaggcgatcaagtgcaagcatgggaagtgcaggctttcaggtctggggcagccctactgtgaatgcagcagtggatacacgggggacagctgtgatcgagaaatctcttgtcgaggggaaaggataagagattattaccaaaagcagcagggctatgctgcttgccaaacaaccaagaaggtgtcccgattagagtgcagaggtgggtgtgcaggagggcagtgctgtggaccgctgaggagcaagcggcggaaatactctttcgaatgcactgacggctcctcctttgtggacgaggttgagaaagtggtgaagtgcggctgtacgaggtgtgtgtcctaaacacactcccggcagctctgtctttggaaaaggttgtatacttcttgaccgtgtgggactaatgaatgcttcatagtggaaatatttgaaatatattgtaaaatacagaacagacttatttttattatgagaataaagactttttttctgcatttg

SEQ ID NO: 107855 - DNA, 4752 bp, Artificial Sequence
  derived and/or modified sequence
atgcgcggcgttggctggcagatgctgtccctgtcgctggggttagtgctggcgatcctgaacaaggtggcaccgcaggcgtgcccggcgcagtgctcttgctcgggcagcacagtggactgtcacgggctggcgctgcgcagcgtgcccaggaatatcccccgcaacaccgagagactggatttaaatggaaataacatcacaagaattacgaagacagattttgctggtcttagacatctaagagttcttcagcttatggagaataagattagcaccattgaaagaggagcattccaggatcttaaagaactagagagactgcgtttaaacagaaatcaccttcagctgtttcctgagttgctgtttcttgggactgcgaagctatacaggcttgatctcagtgaaaaccaaattcaggcaatcccaaggaaagctttccgtggggcagttgacataaaaaatttgcaactggattacaaccagatcagctgtattgaagatggggcattcagggctctccgggacctggaagtgctcactctcaacaataacaacattactagactttctgtggcaagtttcaaccatatgcctaaacttaggacttttcgactgcattcaaacaacctgtattgtgactgccacctggcctggctctccgactggcttcgccaaaggcctcgggttggtctgtacactcagtgtatgggcccctcccacctgagaggccataatgtagccgaggttcaaaaacgagaatttgtctgcagtgatgaggaagaaggtcaccagtcatttatggctccttcttgtagtgttttgcactgccctgccgcctgtacctgtagcaacaatatcgtagactgtcgtgggaaaggtctcactgagatccccacaaatcttccagagaccatcacagaaatacgtttggaacagaacacaatcaaagtcatccctcctggagctttctcaccatataaaaagcttagacgaattgacctgagcaataatcagatctctgaacttgcaccagatgctttccaaggactacgctctctgaattcacttgtcctctatggaaataaaatcacagaactccccaaaagtttatttgaaggactgttttccttacagctcctattattgaatgccaacaagataaactgccttcgggtagatgcttttcaggatctccacaacttgaaccttctctccctatatgacaacaagcttcagaccatcgccaaggggaccttttcacctcttcgggccattcaaactatgcatttggcccagaacccctttatttgtgactgccatctcaagtggctagcggattatctccataccaacccgattgagaccagtggtgcccgttgcaccagcccccgccgcctggcaaacaaaagaattggacagatcaaaagcaagaaattccgttgttcaggtacagaagattatcgatcaaaattaagtggagactgctttgcggatctggcttgccctgaaaagtgtcgctgtgaaggaaccacagtagattgctctaatcaaaagctcaacaaaatcccggagcacattccccagtacactgcagagttgcgtctcaataataatgaatttaccgtgttggaagccacaggaatctttaagaaacttcctcaattacgtaaaataaactttagcaacaataagatcacagatattgaggagggagcatttgaaggagcatctggtgtaaatgaaatacttcttacgagtaatcgtttggaaaatgtgcagcataagatgttcaagggattggaaagcctcaaaactttgatgttgagaagcaatcgaataacctgtgtggggaatgacagtttcataggactcagttctgtgcgtttgctttctttgtatgataatcaaattactacagttgcaccaggggcatttgatactctccattctttatctactctaaacctcttggccaatccttttaactgtaactgctacctggcttggttgggagagtggctgagaaagaagagaattgtcacgggaaatcctagatgtcaaaaaccatacttcctgaaagaaatacccatccaggatgtggccattcaggacttcacttgtgatgacggaaatgatgacaatagttgctccccactttctcgctgtcctactgaatgtacttgcttggatacagtcgtccgatgtagcaacaagggtttgaaggtcttgccgaaaggtattccaagagatgtcacagagttgtatctggatggaaaccaatttacactggttcccaaggaactctccaactacaaacatttaacacttatagacttaagtaacaacagaataagcacgctttctaatcagagcttcagcaacatgacccagctcctcaccttaattcttagttacaaccgtctgagatgtattcctcctcgcacctttgatggattaaagtctcttcgattactttctctacatggaaatgacatttctgttgtgcctgaaggtgctttcaatgatctttctgcattatcacatctagcaattggagccaaccctctttactgtgattgtaacatgcagtggttatccgactgggtgaagtcggaatataaggagcctggaattgctcgttgtgctggtcctggagaaatggcagataaacttttactcacaactccctccaaaaaatttacctgtcaaggtcctgtggatgtcaatattctagctaagtgtaacccctgcctatcaaatccgtgtaaaaatgatggcacatgtaatagtgatccagttgacttttaccgatgcacctgtccatatggtttcaaggggcaggactgtgatgtcccaattcatgcctgcatcagtaacccatgtaaacatggaggaacttgccacttaaaggaaggagaagaagatggattctggtgtatttgtgctgatggatttgaaggagaaaattgtgaagtcaacgttgatgattgtgaagataatgactgtgaaaataattctacatgtgtcgatggcattaataactacacatgcctttgcccacctgagtatacaggtgagttgtgtgaggagaagctggacttctgtgcccaggacctgaacccctgccagcacgattcaaagtgcatcctaactccaaagggattcaaatgtgactgcacaccagggtacgtaggtgaacactgcgacatcgattttgacgactgccaagacaacaagtgtaaaaacggagcccactgcacagatgcagtgaacggctatacgtgcatatgccccgaaggttacagtggcttgttctgtgagttttctccacccatggtcctccctcgtaccagcccctgtgataattttgattgtcagaatggagctcagtgtatcgtcagaataaatgagccaatatgtcagtgtttgcctggctatcagggagaaaagtgtgaaaaattggttagtgtgaattttataaacaaagagtcttatcttcagattccttcagccaaggttcggcctcagacgaacataacacttcagattgccacagatgaagacagcggaatcctcctgtataagggtgacaaagaccatatcgcggtagaactctatcgggggcgtgttcgtgccagctatgacaccggctctcatccagcttctgccatttacagtgtggagacaatcaatgatggaaacttccacattgtggaactacttgccttggatcagagtctctctttgtccgtggatggtgggaaccccaaaatcatcactaacttgtcaaagcagtccactctgaattttgactctccactctatgtaggaggcatgccagggaagagtaacgtggcatctctgcgccaggcccctgggcagaacggaaccagcttccacggctgcatccggaacctttacatcaacagtgagctgcaggacttccagaaggtgccgatgcaaacaggcattttgcctggctgtgagccatgccacaagaaggtgtgtgcccatggcacatgccagcccagcagccaggcaggcttcacctgcgagtgccaggaaggatggatggggcccctctgtgaccaacggaccaatgacccttgccttggaaataaatgcgtacatggcacctgcttgcccatcaatgcgttctcctacagctgtaagtgcttggagggccatggaggtgtcctctgtgatgaagaggaggatctgtttaacccatgccaggcgatcaagtgcaagcatgggaagtgcaggctttcaggtctggggcagccctactgtgaatgcagcagtggatacacgggggacagctgtgatcgagaaatctcttgtcgaggggaaaggataagagattattaccaaaagcagcagggctatgctgcttgccaaacaaccaagaaggtgtcccgattagagtgcagaggtgggtgtgcaggagggcagtgctgtggaccgctgaggagcaagcggcggaaatactctttcgaatgcactgacggctcctcctttgtggacgaggttgagaaagtggtgaagtgcggctgtacgaggtgtgtgtcctaaacacactcccggcagctctgtctttggaaaaggttgtatacttcttgaccgtgtgggactaatgaatgcttcatagtggaaatatttgaaatatattgtaaaatacagaacagacttatttttattatgagaataaagactttttttctgcatttggaaaaaaaaaaaaagaaa

SEQ ID NO: 107856 - DNA, 4578 bp, Artificial Sequence
  derived and/or modified sequence
atgagaggcgtgggctggcagatgctgagcctgagcctgggcctggtgctggccatcctgaacaaggtggccccccaggcctgccccgcccagtgcagctgcagcggcagcaccgtggactgccacggcctggccctgagaagcgtgcccagaaacatccccagaaacaccgagagactggacctgaacggcaacaacatcaccagaatcaccaagaccgacttcgccggcctgagacacctgagagtgctgcagctgatggagaacaagatcagcaccatcgagagaggcgccttccaggacctgaaggagctggagagactgagactgaacagaaaccacctgcagctgttccccgagctgctgttcctgggcaccgccaagctgtacagactggacctgagcgagaaccagatccaggccatccccagaaaggccttcagaggcgccgtggacatcaagaacctgcagctggactacaaccagatcagctgcatcgaggacggcgccttcagagccctgagagacctggaggtgctgaccctgaacaacaacaacatcaccagactgagcgtggccagcttcaaccacatgcccaagctgagaaccttcagactgcacagcaacaacctgtactgcgactgccacctggcctggctgagcgactggctgagacagagacccagagtgggcctgtacacccagtgcatgggccccagccacctgagaggccacaacgtggccgaggtgcagaagagagagttcgtgtgcagcggcaagggcgagggccaccagagcttcatggcccccagctgcagcgtgctgcactgccccgccgcctgcacctgcagcaacaacatcgtggactgcagaggcaagggcctgaccgagatccccaccaacctgcccgagaccatcaccgagatcagactggagcagaacaccatcaaggtgatcccccccggcgccttcagcccctacaagaagctgagaagaatcgacctgagcaacaaccagatcagcgagctggcccccgacgccttccagggcctgagaagcctgaacagcctggtgctgtacggcaacaagatcaccgagctgcccaagagcctgttcgagggcctgttcagcctgcagctgctgctgctgaacgccaacaagatcaactgcctgagagtggacgccttccaggacctgcacaacctgaacctgctgagcctgtacgacaacaagctgcagaccatcgccaagggcaccttcagccccctgagagccatccagaccatgcacctggcccagaaccccttcatctgcgactgccacctgaagtggctggccgactacctgcacaccaaccccatcgagaccagcggcgccagatgcaccagccccagaagactggccaacaagagaatcggccagatcaagagcaagaagttcagatgcagcggcaccgaggactacagaagcaagctgagcggcgactgcttcgccgacctggcctgccccgagaagtgcagatgcgagggcaccaccgtggactgcagcaaccagaagctgaacaagatccccgagcacatcccccagtacaccgccgagctgagactgaacaacaacgagttcaccgtgctggaggccaccggcatcttcaagaagctgccccagctgagaaagatcaacttcagcaacaacaagatcaccgacatcgaggagggcgccttcgagggcgccagcggcgtgaacgagatcctgctgaccagcaacagactggagaacgtgcagcacaagatgttcaagggcctggagagcctgaagaccctgatgctgagaagcaacagaatcacctgcgtgggcaacgacagcttcatcggcctgagcagcgtgagactgctgagcctgtacgacaaccagatcaccaccgtggcccccggcgccttcgacaccctgcacagcctgagcaccctgaacctgctggccaaccccttcaactgcaactgctacctggcctggctgggcgagtggctgagaaagaagagaatcgtgaccggcaaccccagatgccagaagccctacttcctgaaggagatccccatccaggacgtggccatccaggacttcacctgcgacgacggcaacgacgacaacagctgcagccccctgagcagatgccccaccgagtgcacctgcctggacaccgtggtgagatgcagcaacaagggcctgaaggtgctgcccaagggcatccccagagacgtgaccgagctgtacctggacggcaaccagttcaccctggtgcccaaggagctgagcaactacaagcacctgaccctgatcgacctgagcaacaacagaatcagcaccctgagcaaccagagcttcagcaacatgacccagctgctgaccctgatcctgagctacaacagactgagatgcatcccccccagaaccttcgacggcctgaagagcctgagactgctgagcctgcacggcaacgacatcagcgtggtgcccgagggcgccttcaacgacctgagcgccctgagccacctggccatcggcgccaaccccctgtactgcgactgcaacatgcagtggctgagcgactgggtgaagagcgagtacaaggagcccggcatcgccagatgcgccggccccggcgagatggccgacaagctgctgctgaccacccccagcaagaagttcacctgccagggccccgtggacgtgaacatcctggccaagtgcaacccctgcctgagcaacccctgcaagaacgacggcacctgcaacagcgaccccgtggacttctacagatgcacctgcccctacggcttcaagggccaggactgcgacgtgcccatccacgcctgcatcagcaacccctgcaagcacggcggcacctgccacctgaaggagggcgaggaggacggcttctggtgcatctgcgccgacggcttcgagggcgagaactgcgaggtgaacgtggacgactgcgaggacaacgactgcgagaacaacagcacctgcgtggacggcatcaacaactacacctgcctgtgcccccccgagtacaccggcgagctgtgcgaggagaagctggacttctgcgcccaggacctgaacccctgccagcacgacagcaagtgcatcctgacccccaagggcttcaagtgcgactgcacccccggctacgtgggcgagcactgcgacatcgacttcgacgactgccaggacaacaagtgcaagaacggcgcccactgcaccgacgccgtgaacggctacacctgcatctgccccgagggctacagcggcctgttctgcgagttcagcccccccatggtgctgcccagaaccagcccctgcgacaacttcgactgccagaacggcgcccagtgcatcgtgagaatcaacgagcccatctgccagtgcctgcccggctaccagggcgagaagtgcgagaagctggtgagcgtgaacttcatcaacaaggagagctacctgcagatccccagcgccaaggtgagaccccagaccaacatcaccctgcagatcgccaccgacgaggacagcggcatcctgctgtacaagggcgacaaggaccacatcgccgtggagctgtacagaggcagagtgagagccagctacgacaccggcagccaccccgccagcgccatctacagcgtggagaccatcaacgacggcaacttccacatcgtggagctgctggccctggaccagagcctgagcctgagcgtggacggcggcaaccccaagatcatcaccaacctgagcaagcagagcaccctgaacttcgacagccccctgtacgtgggcggcatgcccggcaagagcaacgtggccagcctgagacaggcccccggccagaacggcaccagcttccacggctgcatcagaaacctgtacatcaacagcgagctgcaggacttccagaaggtgcccatgcagaccggcatcctgcccggctgcgagccctgccacaagaaggtgtgcgcccacggcacctgccagcccagcagccaggccggcttcacctgcgagtgccaggagggctggatgggccccctgtgcgaccagagaaccaacgacccctgcctgggcaacaagtgcgtgcacggcacctgcctgcccatcaacgccttcagctacagctgcaagtgcctggagggccacggcggcgtgctgtgcgacgaggaggaggacctgttcaacccctgccaggccatcaagtgcaagcacggcaagtgcagactgagcggcctgggccagccctactgcgagtgcagcagcggctacaccggcgacagctgcgacagagagatcagctgcagaggcgagagaatcagagactactaccagaagcagcagggctacgccgcctgccagaccaccaagaaggtgagcagactggagtgcagaggcggctgcgccggcggccagtgctgcggccccctgagaagcaagagaagaaagtacagcttcgagtgcaccgacggcagcagcttcgtggacgaggtggagaaggtggtgaagtgcggctgcaccagatgcgtgagctag

SEQ ID NO: 107857 - DNA, 4578 bp, Artificial Sequence
  derived and/or modified sequence
atgagaggcgtgggctggcagatgctgagcctgagcctgggcctggtgctggccatcctgaacaaggtggccccccaggcctgccccgcccagtgcagctgcagcggcagcaccgtggactgccacggcctggccctgagaagcgtgcccagaaacatccccagaaacaccgagagactggacctgaacggcaacaacatcaccagaatcaccaagaccgacttcgccggcctgagacacctgagagtgctgcagctgatggagaacaagatcagcaccatcgagagaggcgccttccaggacctgaaggagctggagagactgagactgaacagaaaccacctgcagctgttccccgagctgctgttcctgggcaccgccaagctgtacagactggacctgagcgagaaccagatccaggccatccccagaaaggccttcagaggcgccgtggacatcaagaacctgcagctggactacaaccagatcagctgcatcgaggacggcgccttcagagccctgagagacctggaggtgctgaccctgaacaacaacaacatcaccagactgagcgtggccagcttcaaccacatgcccaagctgagaaccttcagactgcacagcaacaacctgtactgcgactgccacctggcctggctgagcgactggctgagacagagacccagagtgggcctgtacacccagtgcatgggccccagccacctgagaggccacaacgtggccgaggtgcagaagagagagttcgtgtgcagcgacgaggaggagggccaccagagcttcatggcccccagctgcagcgtgctgcactgccccgccgcctgcacctgcagcaacaacatcgtggactgcagaggcaagggcctgaccgagatccccaccaacctgcccgagaccatcaccgagatcagactggagcagaacaccatcaaggtgatcccccccggcgccttcagcccctacaagaagctgagaagaatcgacctgagcaacaaccagatcagcgagctggcccccgacgccttccagggcctgagaagcctgaacagcctggtgctgtacggcaacaagatcaccgagctgcccaagagcctgttcgagggcctgttcagcctgcagctgctgctgctgaacgccaacaagatcaactgcctgagagtggacgccttccaggacctgcacaacctgaacctgctgagcctgtacgacaacaagctgcagaccatcgccaagggcaccttcagccccctgagagccatccagaccatgcacctggcccagaaccccttcatctgcgactgccacctgaagtggctggccgactacctgcacaccaaccccatcgagaccagcggcgccagatgcaccagccccagaagactggccaacaagagaatcggccagatcaagagcaagaagttcagatgcagcggcaccgaggactacagaagcaagctgagcggcgactgcttcgccgacctggcctgccccgagaagtgcagatgcgagggcaccaccgtggactgcagcaaccagaagctgaacaagatccccgagcacatcccccagtacaccgccgagctgagactgaacaacaacgagttcaccgtgctggaggccaccggcatcttcaagaagctgccccagctgagaaagatcaacttcagcaacaacaagatcaccgacatcgaggagggcgccttcgagggcgccagcggcgtgaacgagatcctgctgaccagcaacagactggagaacgtgcagcacaagatgttcaagggcctggagagcctgaagaccctgatgctgagaagcaacagaatcacctgcgtgggcaacgacagcttcatcggcctgagcagcgtgagactgctgagcctgtacgacaaccagatcaccaccgtggcccccggcgccttcgacaccctgcacagcctgagcaccctgaacctgctggccaaccccttcaactgcaactgctacctggcctggctgggcgagtggctgagaaagaagagaatcgtgaccggcaaccccagatgccagaagccctacttcctgaaggagatccccatccaggacgtggccatccaggacttcacctgcgacgacggcaacgacgacaacagctgcagccccctgagcagatgccccaccgagtgcacctgcctggacaccgtggtgagatgcagcaacaagggcctgaaggtgctgcccaagggcatccccagagacgtgaccgagctgtacctggacggcaaccagttcaccctggtgcccaaggagctgagcaactacaagcacctgaccctgatcgacctgagcaacaacagaatcagcaccctgagcaaccagagcttcagcaacatgacccagctgctgaccctgatcctgagctacaacagactgagatgcatcccccccagaaccttcgacggcctgaagagcctgagactgctgagcctgcacggcaacgacatcagcgtggtgcccgagggcgccttcaacgacctgagcgccctgagccacctggccatcggcgccaaccccctgtactgcgactgcaacatgcagtggctgagcgactgggtgaagagcgagtacaaggagcccggcatcgccagatgcgccggccccggcgagatggccgacaagctgctgctgaccacccccagcaagaagttcacctgccagggccccgtggacgtgaacatcctggccaagtgcaacccctgcctgagcaacccctgcaagaacgacggcacctgcaacagcgaccccgtggacttctacagatgcacctgcccctacggcttcaagggccaggactgcgacgtgcccatccacgcctgcatcagcaacccctgcaagcacggcggcacctgccacctgaaggagggcgaggaggacggcttctggtgcatctgcgccgacggcttcgagggcgagaactgcgaggtgaacgtggacgactgcgaggacaacgactgcgagaacaacagcacctgcgtggacggcatcaacaactacacctgcctgtgcccccccgagtacaccggcgagctgtgcgaggagaagctggacttctgcgcccaggacctgaacccctgccagcacgacagcaagtgcatcctgacccccaagggcttcaagtgcgactgcacccccggctacgtgggcgagcactgcgacatcgacttcgacgactgccaggacaacaagtgcaagaacggcgcccactgcaccgacgccgtgaacggctacacctgcatctgccccgagggctacagcggcctgttctgcgagttcagcccccccatggtgctgcccagaaccagcccctgcgacaacttcgactgccagaacggcgcccagtgcatcgtgagaatcaacgagcccatctgccagtgcctgcccggctaccagggcgagaagtgcgagaagctggtgagcgtgaacttcatcaacaaggagagctacctgcagatccccagcgccaaggtgagaccccagaccaacatcaccctgcagatcgccaccgacgaggacagcggcatcctgctgtacaagggcgacaaggaccacatcgccgtggagctgtacagaggcagagtgagagccagctacgacaccggcagccaccccgccagcgccatctacagcgtggagaccatcaacgacggcaacttccacatcgtggagctgctggccctggaccagagcctgagcctgagcgtggacggcggcaaccccaagatcatcaccaacctgagcaagcagagcaccctgaacttcgacagccccctgtacgtgggcggcatgcccggcaagagcaacgtggccagcctgagacaggcccccggccagaacggcaccagcttccacggctgcatcagaaacctgtacatcaacagcgagctgcaggacttccagaaggtgcccatgcagaccggcatcctgcccggctgcgagccctgccacaagaaggtgtgcgcccacggcacctgccagcccagcagccaggccggcttcacctgcgagtgccaggagggctggatgggccccctgtgcgaccagagaaccaacgacccctgcctgggcaacaagtgcgtgcacggcacctgcctgcccatcaacgccttcagctacagctgcaagtgcctggagggccacggcggcgtgctgtgcgacgaggaggaggacctgttcaacccctgccaggccatcaagtgcaagcacggcaagtgcagactgagcggcctgggccagccctactgcgagtgcagcagcggctacaccggcgacagctgcgacagagagatcagctgcagaggcgagagaatcagagactactaccagaagcagcagggctacgccgcctgccagaccaccaagaaggtgagcagactggagtgcagaggcggctgcgccggcggccagtgctgcggccccctgagaagcaagagaagaaagtacagcttcgagtgcaccgacggcagcagcttcgtggacgaggtggagaaggtggtgaagtgcggctgcaccagatgcgtgagctag

SEQ ID NO: 107858 - protein, 1521 aa, Artificial Sequence
  derived and/or modified sequence
MRGVGWQMLSLSLGLVLAILNKVAPQACPAQCSCSGSTVDCHGLALRSVPRNIPRNTERLDLNGNNITRITKTDFAGLRHLRVLQLMENKISTIERGAFQDLKELERLRLNRNHLQLFPELLFLGTAKLYRLDLSENQIQAIPRKAFRGAVDIKNLQLDYNQISCIEDGAFRALRDLEVLTLNNNNITRLSVASFNHMPKLRTFRLHSNNLYCDCHLAWLSDWLRQRPRVGLYTQCMGPSHLRGHNVAEVQKREFVCSGHQSFMAPSCSVLHCPAACTCSNNIVDCRGKGLTEIPTNLPETITEIRLEQNTIKVIPPGAFSPYKKLRRIDLSNNQISELAPDAFQGLRSLNSLVLYGNKITELPKSLFEGLFSLQLLLLNANKINCLRVDAFQDLHNLNLLSLYDNKLQTIAKGTFSPLRAIQTMHLAQNPFICDCHLKWLADYLHTNPIETSGARCTSPRRLANKRIGQIKSKKFRCSGTEDYRSKLSGDCFADLACPEKCRCEGTTVDCSNQKLNKIPEHIPQYTAELRLNNNEFTVLEATGIFKKLPQLRKINFSNNKITDIEEGAFEGASGVNEILLTSNRLENVQHKMFKGLESLKTLMLRSNRITCVGNDSFIGLSSVRLLSLYDNQITTVAPGAFDTLHSLSTLNLLANPFNCNCYLAWLGEWLRKKRIVTGNPRCQKPYFLKEIPIQDVAIQDFTCDDGNDDNSCSPLSRCPTECTCLDTVVRCSNKGLKVLPKGIPRDVTELYLDGNQFTLVPKELSNYKHLTLIDLSNNRISTLSNQSFSNMTQLLTLILSYNRLRCIPPRTFDGLKSLRLLSLHGNDISVVPEGAFNDLSALSHLAIGANPLYCDCNMQWLSDWVKSEYKEPGIARCAGPGEMADKLLLTTPSKKFTCQGPVDVNILAKCNPCLSNPCKNDGTCNSDPVDFYRCTCPYGFKGQDCDVPIHACISNPCKHGGTCHLKEGEEDGFWCICADGFEGENCEVNVDDCEDNDCENNSTCVDGINNYTCLCPPEYTGELCEEKLDFCAQDLNPCQHDSKCILTPKGFKCDCTPGYVGEHCDIDFDDCQDNKCKNGAHCTDAVNGYTCICPEGYSGLFCEFSPPMVLPRTSPCDNFDCQNGAQCIVRINEPICQCLPGYQGEKCEKLVSVNFINKESYLQIPSAKVRPQTNITLQIATDEDSGILLYKGDKDHIAVELYRGRVRASYDTGSHPASAIYSVETINDGNFHIVELLALDQSLSLSVDGGNPKIITNLSKQSTLNFDSPLYVGGMPGKSNVASLRQAPGQNGTSFHGCIRNLYINSELQDFQKVPMQTGILPGCEPCHKKVCAHGTCQPSSQAGFTCECQEGWMGPLCDQRTNDPCLGNKCVHGTCLPINAFSYSCKCLEGHGGVLCDEEEDLFNPCQAIKCKHGKCRLSGLGQPYCECSSGYTGDSCDREISCRGERIRDYYQKQQGYAACQTTKKVSRLECRGGCAGGQCCGPLRSKRRKYSFECTDGSSFVDEVEKVVKCGCTRCVS

SEQ ID NO: 107859 - DNA, 4566 bp, Artificial Sequence
  derived and/or modified sequence
atgcgcggcgtgggttggcagatgctctcacttagtctgggacttgtgcttgctattttaaacaaagtggcccctcaggcatgcccagctcagtgctcatgctctgggtcaacagtcgattgtcacggccttgctcttaggtctgtacctcgaaacatccctaggaatacagagcggctggacctgaatgggaacaatataacacgcataaccaagacagattttgccggcctccgccacctgagggtgttacagctcatggaaaataagatcagcactatcgaaaggggggccttccaggaccttaaggaactggagcgtttgcgcctgaatcggaaccatcttcagctgtttcccgagttattgtttttggggacagcaaagctctaccggctggatctttcggaaaaccagatccaggcgattccacggaaggcctttcgaggagccgtcgacattaaaaacctgcagctggactacaaccaaatctcttgcatcgaggatggcgcatttagagccctaagggacctggaagtgctgaccctcaacaacaacaacattaccagactctccgtcgcttcgtttaaccatatgccaaagctcaggaccttccgactacacagtaacaacctttactgtgactgtcatcttgcctggctgtctgactggctcaggcagcgacccagggtaggactatacacccaatgcatgggcccatcacatctgagaggacacaatgtggcagaggtgcaaaagcgggaattcgtgtgttccgggcatcagagcttcatggctcctagctgtagcgttctccactgccccgccgcctgcacatgtagcaataacatcgtagattgcaggggtaaaggtctaacagagatccccaccaatttgccagagactataacagaaatacgactggaacagaacacgataaaggtgattccgccgggcgccttctcgccatacaagaaactgaggcgaatagatctgagcaacaaccaaattagtgaactcgctcccgacgccttccaaggccttaggagtctgaactccctcgttctgtacggtaacaagattacagagctcccaaaaagtctttttgagggactgttcagtcttcagttgttactgctgaacgcaaataaaattaattgtctcagagtcgatgcatttcaggatctgcacaatttaaacctactctcactatatgataacaaactccagacaattgctaaaggtacattcagccctttacgggcgatccagaccatgcacttagctcaaaaccccttcatctgcgactgccacctaaaatggctagccgactaccttcacaccaatccaatagaaacaagtggagcacggtgtacatcgccacgcaggctggctaacaaacggatagggcagattaagagtaagaagttcaggtgcagtggaactgaggactatagatccaaactttcaggcgactgctttgccgatctagcatgccctgagaagtgccgctgcgagggtaccacggtggattgttctaatcagaaattgaacaagattcctgaacacattccacagtacaccgcggagctgcgcctgaacaacaacgagtttaccgtcttggaggccactggcatctttaagaagctcccccaactgaggaaaatcaacttctctaataataagatcaccgacatcgaagaaggcgccttcgagggagcaagcggagttaacgaaattctgctcacgagcaaccgtctggagaatgtgcagcataaaatgtttaagggcttagagtccttaaagacattgatgctgaggagcaatcgaattacttgcgtcggcaacgactccttcattggcctgtcatccgtgcgtctgctaagcctctacgataaccagattacaaccgtagcaccaggagcttttgatacactgcacagcctgagtactctgaacctgttggccaatccatttaactgtaactgttacctcgcctggcttggcgagtggttgcgtaaaaagcgtatcgtgactggaaatccccgctgccaaaagccctacttcttgaaagagattcctatccaggatgtcgccatccaggatttcacctgcgatgacgggaatgatgacaattcctgctccccgctgtcacggtgtccaactgaatgtacatgccttgacaccgtggttcgttgctccaataaagggttgaaggtgctccccaaaggtattccacgcgatgtcacagaattgtatctggatggaaatcaattcacactagttccgaaggaactgtccaactacaagcacctgacacttattgatcttagtaacaaccgcatcagcaccctctctaatcaaagtttctctaatatgacacaactgctcaccctgattctctcttataataggttgaggtgcatcccacctcgaaccttcgatggcctcaaatctctgcggctgctgtcattgcatgggaatgacatctctgtggtcccagaaggcgcgttcaatgacctgagcgccctgagtcaccttgcaatcggagcaaatccgctttactgcgattgtaacatgcagtggttgtcagactgggtgaaaagtgaatataaagaacctggcattgctcgttgcgctgggccgggtgagatggccgacaaacttctcttgacaacgccctcgaagaaattcacgtgccaggggcctgtagatgtcaatatccttgctaagtgtaacccctgtctgtccaatccctgtaagaacgacggaacttgtaattccgaccctgtggatttctataggtgtacctgcccttacggctttaaagggcaggactgcgatgtgcccatccatgcatgcattagtaatccatgtaaacatggcggcacgtgtcacctgaaggaaggggaggaggacggtttctggtgtatctgcgctgacgggtttgaaggcgagaattgtgaagtcaatgtggacgactgtgaggacaacgactgcgaaaacaattcaacctgtgtggatggaataaataactatacctgtttatgccctcctgaatacacaggggagctttgtgaggagaagctggacttttgcgcacaggatcttaacccttgccagcatgattctaaatgtatcctgaccccgaaggggtttaagtgcgattgcacgcctggttacgtgggagaacactgcgacatcgatttcgacgactgccaggacaataagtgcaaaaacggcgctcattgtacagatgccgtgaacggatacacttgtatctgccctgaaggatactctggcctgttttgcgagttcagtcctcctatggtactccctaggacttcaccatgcgacaactttgactgtcaaaacggcgcccagtgcatcgtccggatcaatgagccaatctgtcaatgtctcccgggatatcagggggagaaatgcgagaagctggtttcagtgaatttcatcaataaagagtcttacctgcagattccctctgccaaggtacgcccacagacgaacattaccctgcagatcgccaccgacgaagattccggtatacttctgtataaaggagataaagaccacattgcagtcgagctctacagagggcgtgtaagagcgtcctacgacaccggttcccaccccgcgtccgcgatctactccgtggaaacaattaatgatggtaactttcatatcgtggaactgttagcactggatcagtctctgagtctcagcgtggatggaggaaatcccaaaatcatcacgaatctcagcaaacagagcaccttgaacttcgattctcccctgtacgtaggcggtatgcctggcaaatcgaatgtggcatccttaagacaggccccaggacaaaacggaaccagcttccacggatgcattcggaatctgtatatcaatagtgaattgcaagatttccagaaagtcccgatgcaaacagggatactgccaggatgtgagccttgccataaaaaagtgtgtgcccatggcacctgccaaccatcctcgcaggccggatttacgtgcgagtgtcaggaagggtggatgggtccactgtgcgaccagagaaccaacgatccatgcttgggcaacaaatgcgtacacgggacatgcctccctattaacgcgttcagctacagctgcaaatgcttggagggccacggcggggtgttgtgcgacgaagaagaggatctatttaacccctgtcaagccattaagtgcaaacacgggaagtgtagactttcaggtctgggacaaccttactgcgagtgctcttctggctatactggagactcttgcgacagggaaataagctgtcggggcgagcggatcagggattactaccagaagcagcaaggatacgccgcctgccagacaactaagaaggtgtcacgtttagagtgccgaggcggctgcgcgggaggtcagtgctgtgggcccctacgaagtaaaagaagaaagtacagcttcgagtgtactgacggtagttcatttgtggacgaagtcgagaaggttgtcaaatgcggctgcaccagatgcgtgtcatag

SEQ ID NO: 107860 - DNA, 4566 bp, Artificial Sequence
  derived and/or modified sequence
atgagaggagtgggctggcagatgctgagcctgagcctgggcctggtgctggccatcctgaacaaggtggccccccaggcctgcccagcccagtgcagctgcagcggcagcacagtggactgccacggcctggccctgcggtctgtgcccaggaacatccccaggaacacagagcggctggacctgaatggaaacaacatcacccgcatcaccaagacagactttgctggcctgcggcacctgcgggtgctgcagctgatggagaacaagatcagcaccatcgagcggggggccttccaggacctgaaggagctggagcggctgcggctgaacagaaaccacctgcagctgtttcctgagctgctcttcctgggcacagccaagctgtaccgcctggacctgtctgagaaccagatccaggccatccccaggaaggccttcagaggagctgtggacatcaagaacctgcagctggactacaaccagatcagctgcattgaagatggagccttccgggccctgcgggacctggaggtgctgaccctgaacaacaacaacatcacccggctgtctgtggccagcttcaaccacatgcccaagctgcggaccttccggctgcacagcaacaacctgtactgtgactgccacctggcctggctgagtgactggctgcggcagaggccccgggtgggcctgtacacccagtgcatgggccccagccacctgcggggccacaacgtggccgaggtgcagaagcgggagtttgtgtgcagcggccaccagagcttcatggcccccagctgcagcgtgctgcactgcccagctgcctgcacctgcagcaacaacatcgtggactgccggggcaagggcctgacagagatccccaccaacctgcctgagaccatcacagagatccggctggagcagaacaccatcaaggtgatccccccaggggccttcagcccctacaagaagctgcggagaattgacctgagcaacaaccagatcagcgagctggccccagatgccttccagggcctgcggagcctgaacagcctggtgctgtatggcaacaagatcacagagctgcccaagagcctgtttgagggcctcttcagcctgcagctgctgctgctgaatgccaacaagatcaactgcctgcgggtggatgccttccaggacctgcacaacctgaacctgctgagcctgtatgacaacaagctgcagaccatcgccaagggcaccttcagccccctgcgggccatccagaccatgcacctggcccagaaccccttcatctgtgactgccacctgaagtggctggccgactacctgcacaccaaccccatcgagaccagcggggcccgctgcaccagcccccggcggctggccaacaagagaattggccagatcaagagcaagaagttccgctgcagcggcacagaggactaccgcagcaagctgagcggggactgctttgctgacctggcctgcccagagaagtgccgctgtgagggcaccaccgtggactgcagcaaccagaagctgaacaagatccctgagcacatcccccagtacacagctgagctgcggctgaacaacaatgagttcaccgtgctggaggccaccggcatcttcaagaagctgccccagctgaggaagatcaacttcagcaacaacaagatcacagacatcgaggagggcgcctttgagggcgccagcggcgtgaatgagatcctgctgaccagcaaccggctggagaatgtgcagcacaagatgttcaagggcctggagagcctgaagaccctgatgctgcggagcaaccgcatcacctgtgtgggcaatgacagcttcatcggcctgagctctgtgcggctgctgagcctgtatgacaaccagatcaccaccgtggcccctggggcctttgacaccctgcacagcctgagcaccctgaacctgctggccaaccccttcaactgcaactgctacctggcctggctgggggagtggctgaggaagaagagaattgtgacaggcaacccccgctgccagaagccctacttcctgaaggagatccccatccaggatgtggccatccaggacttcacctgtgatgatggaaatgatgacaacagctgcagccccctgagccgctgccccacagagtgcacctgcctggacacagtggtgcgctgcagcaacaagggcctgaaggtgctgcccaagggcatccccagagatgtgacagagctgtacctggatggcaaccagttcaccctggtgcccaaggagctgagcaactacaagcacctgaccctgattgacctgagcaacaaccgcatcagcaccctgagcaaccagagcttcagcaacatgacccagctgctgaccctcatcctgagctacaaccggctgcgctgcatcccccccaggacctttgatggcctgaagagcctgcggctgctgagcctgcatggaaatgacatctctgtggtgcctgagggcgccttcaatgacctgagcgccctgagccacctggccatcggggccaaccccctgtactgtgactgcaacatgcagtggctgagtgactgggtgaagtctgagtacaaggagcccggcatcgcccgctgtgccggccctggagagatggctgacaagctgctgctgaccacccccagcaagaagttcacctgccagggccctgtggatgtgaacatcctggccaagtgcaacccctgcctgagcaacccctgcaagaatgatggcacctgcaacagcgaccctgtggacttctaccgctgcacctgcccctacggcttcaagggccaggactgtgatgtgcccatccacgcctgcatcagcaacccctgcaagcacggcggcacctgccacctgaaggagggggaggaggatggcttctggtgcatctgtgctgatggctttgaaggagagaactgtgaggtgaatgtggatgactgtgaagataatgactgtgagaacaacagcacctgtgtggatggcatcaacaactacacctgcctgtgccccccagagtacacaggagagctgtgtgaggagaagctggacttctgtgcccaggacctgaacccctgccagcacgacagcaagtgcatcctgacccccaagggcttcaagtgtgactgcaccccaggctacgtgggggagcactgtgacatcgactttgatgactgccaggacaacaagtgcaagaatggagcccactgcacagatgctgtgaatggctacacctgcatctgcccagagggctacagcggcctcttctgtgagttcagcccccccatggtgctgcccaggaccagcccctgtgacaactttgactgccagaatggagcccagtgcatcgtgcgcatcaatgagcccatctgccagtgcctgcccggctaccagggcgagaagtgtgagaagctggtgtctgtgaacttcatcaacaaggagagctacctgcagatccccagcgccaaggtgcggccccagaccaacatcaccctgcagatcgccacagatgaggacagcggcatcctgctgtacaagggggacaaggaccacatcgctgtggagctgtaccggggccgggtgcgggccagctatgacaccggcagccacccagccagcgccatctacagcgtggagaccatcaatgatggcaacttccacatcgtggagctgctggccctggaccagagcctgagcctgtctgtggatggcggcaaccccaagatcatcaccaacctgagcaagcagagcaccctgaactttgacagccccctgtatgtgggcggcatgcctgggaagagcaatgtggccagcctgcggcaggcccctggccagaatggcaccagcttccacggctgcatccggaacctgtacatcaacagcgagctgcaggacttccagaaggtgcccatgcagacaggcatcctgcccggctgtgagccctgccacaagaaggtgtgtgcccacggcacctgccagcccagcagccaggccggcttcacctgtgagtgccaggagggctggatgggccccctgtgtgaccagaggaccaatgacccctgcctgggcaacaagtgtgtgcacggcacctgcctgcccatcaatgccttctcctacagctgcaagtgcctggagggccatggaggagtgctgtgtgatgaggaggaggacctcttcaacccctgccaggccatcaagtgcaagcatggaaaatgtcggctgagcggcctgggccagccctactgtgaatgtagcagcggctacacaggagacagctgtgaccgggagatcagctgccgcggggagcgcatccgggactactaccagaagcagcagggctatgctgcctgccagaccaccaagaaggtgtcccggctggagtgccggggcggctgtgccggcggccagtgctgcggccccctgcggagcaagaggaggaagtacagctttgaatgtacagatggcagcagctttgtggatgaggtggagaaggtggtgaagtgtggctgcacccgctgtgtgtcctag

SEQ ID NO: 107861 - DNA, 4566 bp, Artificial Sequence
  derived and/or modified sequence
atgcggggcgtgggctggcagatgctgagcctgagcctgggcctggtgttggcgatcctgaataaggttgctcctcaggcctgcccagcacaatgcagttgttccggaagcactgtcgactgtcacggcttggctctgcgatcagtccccaggaacatcccccggaacactgagcgacttgacctgaatggtaataacattacccgcatcactaagacagatttcgcgggtctccgacatctccgcgttttacaactgatggagaacaagatctccactatcgagaggggcgcttttcaggatctcaaagagctggagcgactgcgattaaaccgtaaccatcttcagctgtttcctgaactgctctttctgggaacagcaaagttgtatcggctggatttgagcgagaaccagattcaggctatccccaggaaagccttccgtggagcagtggatatcaagaatctccagttggattacaatcagatctcttgtatcgaagacggggccttccgagcactgagagatttggaagtgctaaccctaaataataacaacatcaccaggttatccgtagcaagttttaaccatatgccgaaattgagaaccttcaggctccattctaacaatctttattgtgattgccatctggcttggttgagcgattggctccgacagaggccccgtgtaggcctgtatacccaatgtatgggtccctcgcatctgcgcggccataacgtagcggaggtgcagaaaagggagttcgtgtgtagcggacaccagagcttcatggcgccaagctgttctgtactgcattgtcctgccgcgtgcacttgttccaacaacattgtggactgcagaggcaaaggacttaccgagattccgacaaatctgcctgagaccatcaccgagataagacttgaacagaacactatcaaagtcataccccccggagccttttccccttataagaagcttcgtcggattgatttaagcaacaaccaaataagtgaactggctcctgatgcctttcagggcctaagatcactgaactcactagttctatacgggaacaagattaccgagctcccaaagtcactattcgaggggcttttcagcctgcagctgctgctcttgaacgcgaacaagataaattgcctgcgggttgacgcctttcaagatctgcataatctgaatctgctttccctgtatgacaataaacttcagaccattgctaaaggcaccttcagtcctctccgggccatccaaacaatgcacctggcccagaacccatttatctgcgactgccatttgaagtggctagcagattacctgcacaccaatccaatagaaactagtggcgcaagatgcacgtctcctagaagactagcgaataagcggatcgggcagattaaaagtaagaagttccgctgcagcggcaccgaggattaccgcagcaaacttagcggcgattgcttcgccgacttggcctgccccgagaaatgccgctgcgaaggcacaacagtggattgcagcaaccaaaagctgaataagatacccgagcacattccgcaatacactgctgagctgcggctcaacaataacgaatttaccgttctggaagctactggcatcttcaagaagctgcctcaactacgtaagattaatttcagcaacaacaaaatcacagacatcgaggagggcgcattcgagggagcgagtggcgtgaacgagattttattaacaagcaatagactcgaaaacgttcaacacaagatgtttaaggggctggagagtctaaaaacactgatgctgagatccaatcgcatcacctgcgtcggtaatgatagcttcatcggcctgtcgtctgtcaggctgttgtccctgtacgataaccagattactacagtcgcacccggggccttcgacactctccacagcttgtccacactaaatctgctcgcgaacccctttaattgtaattgttaccttgcatggctgggagaatggctaaggaagaagcgcatcgtcactggcaatcctcgctgtcagaagccttacttccttaaagagatccctatccaggacgttgctatccaggacttcacatgtgatgatgggaacgacgacaactcctgcagtcctctcagccgctgccccacagagtgcacttgtctggatacagttgtacgctgctctaacaagggactgaaagtgctgccgaaaggaattcctagggacgtaacagaactctacctggacggaaaccagtttacactcgtcccgaaagagctcagcaattacaagcacctaactctgattgatctatctaacaaccggatatcgacactgtctaatcagtcgtttagcaatatgacacagctattgactttgatcctaagctacaaccgacttagatgtatccccccgcgaaccttcgacggactgaagtccctgcgtctgctgagccttcatggcaacgacataagcgttgtgcctgaaggagcgttcaatgatctgagcgcattatcgcacctggccataggtgctaaccccctttactgtgactgcaacatgcagtggctgtcagactgggtcaagagtgaatacaaagagcccggcatagctaggtgtgccgggcctggcgaaatggctgacaagctactcctgaccaccccctctaagaaattcacttgtcaagggccggttgacgttaacatcttagccaaatgcaatccatgtctgagcaatccctgtaaaaacgatggaacttgcaactctgacccggtggacttctataggtgtacctgtccttacggctttaaagggcaggattgcgacgtcccaattcacgcgtgcatctccaacccgtgcaaacatgggggaacttgccacctgaaggaaggggaggaagacggcttttggtgtatatgcgcggacggctttgaaggtgagaattgtgaagtgaatgtggatgattgcgaggataacgactgtgagaacaattcaacttgcgtggacgggatcaataactatacatgcctttgtcccccagagtataccggcgaactgtgcgaggagaagctggacttctgtgcccaggatctgaatccttgccaacatgattccaaatgtattctcacaccaaagggttttaagtgtgattgcacgccaggctacgtgggggaacactgcgatatcgactttgacgactgccaggacaataagtgtaaaaacggcgctcattgcacagacgccgttaatgggtatacctgcatatgcccagaaggctactcaggtctgttctgcgagttttctccaccgatggtgcttcctcgtaccagcccttgtgacaattttgattgtcagaatggtgctcaatgtattgttcgcattaatgaaccaatctgtcagtgtctaccaggttaccagggtgagaaatgcgaaaaactggtttccgtgaattttattaacaaagagtcctatctacaaattccatctgccaaagtgcgaccacaaaccaatatcactctgcagattgcaacagatgaagattccgggattttgttgtataagggcgataaagaccacattgcagtggagctgtatcggggccgcgtccgggcctcctacgacactggttcccaccctgcgagcgccatttattctgtggaaacaatcaatgacgggaacttccacatcgtggaactcctcgccttagaccaaagtctgtctctgtctgttgatggcggcaacccaaaaattattaccaacctgtcaaaacaaagtaccctaaactttgacagtccattgtacgtgggtgggatgcccggcaaatctaatgtggcctccctgcggcaggcaccagggcagaacgggacaagcttccatgggtgcattagaaatctgtacatcaactctgaattgcaagacttccagaaggtgccgatgcaaacagggattcttcccggttgcgagccctgtcacaaaaaggtgtgcgcccacgggacgtgccagccctcctcacaggccggctttacttgcgagtgccaggagggctggatgggacctctgtgcgaccagagaaccaatgatccatgtctgggtaacaaatgtgtgcacggtacctgcttacccattaacgccttctcctactcctgcaagtgcctcgagggacatggcggagtgctgtgcgatgaagaggaggatctcttcaacccatgccaagctattaaatgtaaacacggcaaatgtcgtctgtccggtttgggacagccatactgtgagtgctctagcggctacactggtgattcctgtgatcgggagattagctgccggggggagcggataagagactactaccagaagcagcagggctacgctgcctgccagacgaccaaaaaggtgtcaaggttagagtgccgcggcggatgcgccggcggccagtgctgcgggccgttaagaagcaagcgacgcaaatattcattcgaatgcaccgacggatcctcttttgtggatgaggtggaaaaagtggtgaaatgcggatgcacaaggtgcgtgagttag

SEQ ID NO: 107862 - DNA, 4566 bp, Artificial Sequence
  derived and/or modified sequence
atgagaggtgtgggctggcagatgctctctcttagtcttggcctcgtgctggcgattctgaacaaggtggcccctcaggcatgcccggcacagtgctcctgttccggatccactgtcgactgccacggactagccctcaggagcgtgccacggaacattccccgaaacactgagcggctggacctaaacggtaacaatatcacgcgtatcactaagaccgactttgccggtttgcgacacttgcgggttctccagctgatggaaaataagatctccactatcgaacgtggcgctttccaggatctgaaagagctagagaggttaaggctaaacagaaaccatttacagctgttcccggagcttctattcctcgggacagccaagctgtaccgactggatctaagtgagaatcagatacaggcaattcccaggaaagcttttcggggtgcagtggacatcaagaacctgcagctcgattacaatcaaatatcatgcatcgaagacggcgctttccgcgctctgcgagaccttgaagtcctcacactcaataacaataatataacacgtttatcagttgccagttttaatcacatgccgaagctgaggacctttcgactccactctaataatttgtactgcgactgtcatctggcttggctgtccgattggctgaggcagcggccacgggtgggactctacactcagtgcatgggcccaagccacctaagaggccacaacgtggctgaggttcaaaagcgcgagtttgtgtgctcgggacatcagtcctttatggctccctcatgtagcgttcttcattgtccagcagcatgtacctgctctaacaacatcgtcgattgtagaggcaaggggctgacagagatccccacgaatctacctgagaccatcaccgagattcgccttgagcagaacactatcaaagttattccccctggtgctttctcaccctacaagaagctgcggagaatcgacttaagcaacaaccagatatccgaactggcacctgacgcatttcaaggtctcagatctctgaatagtttggttctgtacgggaacaaaattacagaactgcccaaaagcctgtttgaaggcttgttttctctccagttgttactgttgaacgccaataaaatcaactgtctgcgcgtcgacgcattccaggatctccataacctgaacctgcttagcctctacgacaacaaactgcagacaatcgcaaagggcactttcagccccctgcgcgcaatacagacaatgcacctggcccagaatccattcatctgcgattgccacttgaagtggctggctgactatttacacaccaacccgatcgaaacctctggggcacgctgtacatctccacgcagactcgccaacaagcgtatcggtcagattaaaagcaaaaagttccgatgttcggggacagaagactatcgatctaaactcagcggagactgctttgccgatctggcatgtcccgaaaaatgccgctgtgagggcaccacagtggattgcagcaatcaaaaacttaacaagatccccgaacacatcccccagtataccgctgagctccgcctgaacaacaacgaatttacggtcctggaggccactggaatttttaagaagctccctcagctaagaaaaatcaatttttctaacaacaaaatcacagatatcgaagagggcgcatttgagggcgcatcaggtgtgaatgaaattttgttgacttctaatcgcctggaaaatgtgcagcacaaaatgttcaaaggacttgagtccctcaaaacactgatgctgcgtagcaaccggatcacatgcgtggggaacgactctttcatagggttgagctctgtaagactgttgagtctctatgataaccagatcactaccgtggcaccaggagcattcgatacccttcactccctgagcaccctgaacctccttgctaatcccttcaactgtaactgctatctggcgtggctcggggagtggctccgaaaaaagagaatcgtcacggggaatcctcgttgtcagaaaccttatttcttaaaagaaattcccatacaggacgtagccatccaagacttcacttgcgatgatggcaacgatgacaactcttgcagtcccttgtcccggtgccccacagagtgcacttgtctcgacactgtggtacgctgcagtaacaaaggccttaaggtcctccccaaggggatccctagggacgtaaccgaactctacctggatgggaaccagttcacactggtccctaaagaactgtctaactacaaacacttaacactaatcgatctgtctaacaaccgaatctcaacactctccaatcaatcctttagcaatatgacacagctgctgactctgatcttatcgtacaaccgccttcggtgcatcccgccacgaacattcgacggtctcaaatcactgcgcctacttagcctccatggtaatgatatttcagtggtccctgaaggggcttttaacgacctctctgctttatcccacttagccattggagctaatcccttgtactgcgactgcaatatgcagtggttaagcgattgggtaaaatcggagtataaagaaccgggaatagcccgatgtgcaggtcctggggagatggccgataaactgctcctgaccactccaagtaaaaagttcacctgccaggggccagttgacgtcaacattctggccaagtgtaatccgtgtttgtctaacccttgcaaaaatgacggcacttgcaacagcgaccctgtggacttctataggtgtacttgtccatacggattcaaagggcaagactgcgatgttcccattcatgcttgcatcagcaatccctgtaaacacggaggtacatgccacttgaaggaaggagaagaagatggcttttggtgcatttgtgccgatgggttcgaaggagagaattgcgaagtcaacgtggacgactgcgaggacaatgactgcgaaaataatagcacctgcgtggacggcattaacaactacacatgcctgtgtcctcccgagtacaccggagaactttgtgaggagaaactagatttttgcgctcaggatttaaatccatgtcagcacgacagtaaatgcatcctgacccccaagggctttaagtgtgattgtactccagggtatgtcggggaacactgcgatattgactttgatgactgccaggataataaatgtaaaaatggcgcacattgtaccgatgcagtgaatggatacacctgcatttgtcctgaagggtacagcggtctattctgtgagttctctccgcctatggtactgccacggacttccccgtgcgataacttcgactgtcagaatggagcccaatgtatcgttcggattaacgagccaatctgtcaatgcctgcccggataccaaggagagaaatgcgagaaactggtgtcggtcaactttatcaacaaggagtcctacctccagattcctagcgccaaggtgagaccccagactaacatcaccctgcagatcgccaccgacgaggacagcgggatactgttgtacaagggagacaaggaccacatagctgtcgagctctatagggggagggtgcgggcttcctatgatactggctctcatcccgcatccgcaatctactcagtggaaaccatcaacgacggcaacttccatattgtggagctgctggccttggatcagagccttagtctgtcggtggacggaggtaatccgaagatcattactaatctcagcaagcagtcaacacttaactttgattccccgctgtacgttgggggaatgcccggaaagtccaacgtagcaagccttcgccaggcccctgggcaaaatgggacgtccttccatggatgcatccgaaacctgtacatcaacagcgaactgcaagatttccagaaggtgccaatgcagaccgggattcttcctgggtgtgagccctgtcacaaaaaggtctgcgcgcatggcacctgtcagcctagctcccaagcaggattcacatgcgaatgccaggagggctggatgggcccactctgtgatcaacgcaccaacgacccctgcttgggcaacaagtgtgtgcacggcacttgcttgcctatcaacgcgttcagctacagctgtaagtgtctcgaaggccacgggggtgtgctgtgtgacgaggaggaggatttgtttaatccgtgtcaagctattaagtgtaagcacggtaaatgtagactgagcggcctaggacagccatattgtgagtgcagttccggatacactggagattcgtgcgatagggaaatatcgtgccgtggtgaacggatccgagactactatcagaagcagcaaggatacgccgcatgtcagaccaccaaaaaggtgtctagactcgagtgtaggggaggatgcgctggtggccagtgctgtggacccctgcgctctaaaagaagaaaatactctttcgaatgtacagatggtagcagcttcgttgacgaagttgagaaagtggttaagtgtgggtgcacccggtgcgtgagctag

SEQ ID NO: 107863 - DNA, 5233 bp, Artificial Sequence
  derived and/or modified sequence
tgccccgcgcgctctgctacgggcccgctgggcttccgcgccttctagcttccggagcccactttgatcggggccataatacctattgagatcccctcttctgtcttgtaccttcgccactggcatcggatttgcagaagcgtgcgtgggatcagaggaccgccctccccacaacaaccggcccctgcatcttagcagccgttggaagccccagctcttttaccgccaagttcatccttgggagacagaagacgcgtgatctcctctccgctgctcttggggtctccttgcagccctggccaggcggattcatcctcaggacctaaagttgcccaaggagctcctgctctgccagaggagggtggagagggcggtgggaggcgtgtgcctgagtgggctctactgccttgttccatattatttggtgcacattttccctggcactctgggttgctagccccgccgggcactgggcctcagacactgcgcggttccctcggagcagcaagctaaagaaagcccccagtgccggcgaggaaggaggcggcggggaaagatgcgcggcgttggctggcagatgctgtccctgtcgctggggttagtgctggcgatcctgaacaaggtggcaccgcaggcgtgcccggcgcagtgctcttgctcgggcagcacagtggactgtcacgggctggcgctgcgcagcgtgcccaggaatatcccccgcaacaccgagagactggatttaaatggaaataacatcacaagaattacgaagacagattttgctggtcttagacatctaagagttcttcagcttatggagaataagattagcaccattgaaagaggagcattccaggatcttaaagaactagagagactgcgtttaaacagaaatcaccttcagctgtttcctgagttgctgtttcttgggactgcgaagctatacaggcttgatctcagtgaaaaccaaattcaggcaatcccaaggaaagctttccgtggggcagttgacataaaaaatttgcaactggattacaaccagatcagctgtattgaagatggggcattcagggctctccgggacctggaagtgctcactctcaacaataacaacattactagactttctgtggcaagtttcaaccatatgcctaaacttaggacttttcgactgcattcaaacaacctgtattgtgactgccacctggcctggctctccgactggcttcgccaaaggcctcgggttggtctgtacactcagtgtatgggcccctcccacctgagaggccataatgtagccgaggttcaaaaacgagaatttgtctgcagtggtcaccagtcatttatggctccttcttgtagtgttttgcactgccctgccgcctgtacctgtagcaacaatatcgtagactgtcgtgggaaaggtctcactgagatccccacaaatcttccagagaccatcacagaaatacgtttggaacagaacacaatcaaagtcatccctcctggagctttctcaccatataaaaagcttagacgaattgacctgagcaataatcagatctctgaacttgcaccagatgctttccaaggactacgctctctgaattcacttgtcctctatggaaataaaatcacagaactccccaaaagtttatttgaaggactgttttccttacagctcctattattgaatgccaacaagataaactgccttcgggtagatgcttttcaggatctccacaacttgaaccttctctccctatatgacaacaagcttcagaccatcgccaaggggaccttttcacctcttcgggccattcaaactatgcatttggcccagaacccctttatttgtgactgccatctcaagtggctagcggattatctccataccaacccgattgagaccagtggtgcccgttgcaccagcccccgccgcctggcaaacaaaagaattggacagatcaaaagcaagaaattccgttgttcaggtacagaagattatcgatcaaaattaagtggagactgctttgcggatctggcttgccctgaaaagtgtcgctgtgaaggaaccacagtagattgctctaatcaaaagctcaacaaaatcccggagcacattccccagtacactgcagagttgcgtctcaataataatgaatttaccgtgttggaagccacaggaatctttaagaaacttcctcaattacgtaaaataaactttagcaacaataagatcacagatattgaggagggagcatttgaaggagcatctggtgtaaatgaaatacttcttacgagtaatcgtttggaaaatgtgcagcataagatgttcaagggattggaaagcctcaaaactttgatgttgagaagcaatcgaataacctgtgtggggaatgacagtttcataggactcagttctgtgcgtttgctttctttgtatgataatcaaattactacagttgcaccaggggcatttgatactctccattctttatctactctaaacctcttggccaatccttttaactgtaactgctacctggcttggttgggagagtggctgagaaagaagagaattgtcacgggaaatcctagatgtcaaaaaccatacttcctgaaagaaatacccatccaggatgtggccattcaggacttcacttgtgatgacggaaatgatgacaatagttgctccccactttctcgctgtcctactgaatgtacttgcttggatacagtcgtccgatgtagcaacaagggtttgaaggtcttgccgaaaggtattccaagagatgtcacagagttgtatctggatggaaaccaatttacactggttcccaaggaactctccaactacaaacatttaacacttatagacttaagtaacaacagaataagcacgctttctaatcagagcttcagcaacatgacccagctcctcaccttaattcttagttacaaccgtctgagatgtattcctcctcgcacctttgatggattaaagtctcttcgattactttctctacatggaaatgacatttctgttgtgcctgaaggtgctttcaatgatctttctgcattatcacatctagcaattggagccaaccctctttactgtgattgtaacatgcagtggttatccgactgggtgaagtcggaatataaggagcctggaattgctcgttgtgctggtcctggagaaatggcagataaacttttactcacaactccctccaaaaaatttacctgtcaaggtcctgtggatgtcaatattctagctaagtgtaacccctgcctatcaaatccgtgtaaaaatgatggcacatgtaatagtgatccagttgacttttaccgatgcacctgtccatatggtttcaaggggcaggactgtgatgtcccaattcatgcctgcatcagtaacccatgtaaacatggaggaacttgccacttaaaggaaggagaagaagatggattctggtgtatttgtgctgatggatttgaaggagaaaattgtgaagtcaacgttgatgattgtgaagataatgactgtgaaaataattctacatgtgtcgatggcattaataactacacatgcctttgcccacctgagtatacaggtgagttgtgtgaggagaagctggacttctgtgcccaggacctgaacccctgccagcacgattcaaagtgcatcctaactccaaagggattcaaatgtgactgcacaccagggtacgtaggtgaacactgcgacatcgattttgacgactgccaagacaacaagtgtaaaaacggagcccactgcacagatgcagtgaacggctatacgtgcatatgccccgaaggttacagtggcttgttctgtgagttttctccacccatggtcctccctcgtaccagcccctgtgataattttgattgtcagaatggagctcagtgtatcgtcagaataaatgagccaatatgtcagtgtttgcctggctatcagggagaaaagtgtgaaaaattggttagtgtgaattttataaacaaagagtcttatcttcagattccttcagccaaggttcggcctcagacgaacataacacttcagattgccacagatgaagacagcggaatcctcctgtataagggtgacaaagaccatatcgcggtagaactctatcgggggcgtgttcgtgccagctatgacaccggctctcatccagcttctgccatttacagtgtggagacaatcaatgatggaaacttccacattgtggaactacttgccttggatcagagtctctctttgtccgtggatggtgggaaccccaaaatcatcactaacttgtcaaagcagtccactctgaattttgactctccactctatgtaggaggcatgccagggaagagtaacgtggcatctctgcgccaggcccctgggcagaacggaaccagcttccacggctgcatccggaacctttacatcaacagtgagctgcaggacttccagaaggtgccgatgcaaacaggcattttgcctggctgtgagccatgccacaagaaggtgtgtgcccatggcacatgccagcccagcagccaggcaggcttcacctgcgagtgccaggaaggatggatggggcccctctgtgaccaacggaccaatgacccttgccttggaaataaatgcgtacatggcacctgcttgcccatcaatgcgttctcctacagctgtaagtgcttggagggccatggaggtgtcctctgtgatgaagaggaggatctgtttaacccatgccaggcgatcaagtgcaagcatgggaagtgcaggctttcaggtctggggcagccctactgtgaatgcagcagtggatacacgggggacagctgtgatcgagaaatctcttgtcgaggggaaaggataagagattattaccaaaagcagcagggctatgctgcttgccaaacaaccaagaaggtgtcccgattagagtgcagaggtgggtgtgcaggagggcagtgctgtggaccgctgaggagcaagcggcggaaatactctttcgaatgcactgacggctcctcctttgtggacgaggttgagaaagtggtgaagtgcggctgtacgaggtgtgtgtcctaaacacactcccggcagctctgtctttggaaaaggttgtatacttcttgaccgtgtgggactaatgaatgcttcatagtggaaatatttgaaatatattgtaaaatacagaac

SEQ ID NO: 107864 - DNA, 4566 bp, Artificial Sequence
  derived and/or modified sequence
atgagaggcgtgggctggcagatgctgagcctgagcctgggcctggtgctggccatcctgaacaaggtggccccccaggcctgccccgcccagtgcagctgcagcggcagcaccgtggactgccacggcctggccctgagaagcgtgcccagaaacatccccagaaacaccgagagactggacctgaacggcaacaacatcaccagaatcaccaagaccgacttcgccggcctgagacacctgagagtgctgcagctgatggagaacaagatcagcaccatcgagagaggcgccttccaggacctgaaggagctggagagactgagactgaacagaaaccacctgcagctgttccccgagctgctgttcctgggcaccgccaagctgtacagactggacctgagcgagaaccagatccaggccatccccagaaaggccttcagaggcgccgtggacatcaagaacctgcagctggactacaaccagatcagctgcatcgaggacggcgccttcagagccctgagagacctggaggtgctgaccctgaacaacaacaacatcaccagactgagcgtggccagcttcaaccacatgcccaagctgagaaccttcagactgcacagcaacaacctgtactgcgactgccacctggcctggctgagcgactggctgagacagagacccagagtgggcctgtacacccagtgcatgggccccagccacctgagaggccacaacgtggccgaggtgcagaagagagagttcgtgtgcagcggccaccagagcttcatggcccccagctgcagcgtgctgcactgccccgccgcctgcacctgcagcaacaacatcgtggactgcagaggcaagggcctgaccgagatccccaccaacctgcccgagaccatcaccgagatcagactggagcagaacaccatcaaggtgatcccccccggcgccttcagcccctacaagaagctgagaagaatcgacctgagcaacaaccagatcagcgagctggcccccgacgccttccagggcctgagaagcctgaacagcctggtgctgtacggcaacaagatcaccgagctgcccaagagcctgttcgagggcctgttcagcctgcagctgctgctgctgaacgccaacaagatcaactgcctgagagtggacgccttccaggacctgcacaacctgaacctgctgagcctgtacgacaacaagctgcagaccatcgccaagggcaccttcagccccctgagagccatccagaccatgcacctggcccagaaccccttcatctgcgactgccacctgaagtggctggccgactacctgcacaccaaccccatcgagaccagcggcgccagatgcaccagccccagaagactggccaacaagagaatcggccagatcaagagcaagaagttcagatgcagcggcaccgaggactacagaagcaagctgagcggcgactgcttcgccgacctggcctgccccgagaagtgcagatgcgagggcaccaccgtggactgcagcaaccagaagctgaacaagatccccgagcacatcccccagtacaccgccgagctgagactgaacaacaacgagttcaccgtgctggaggccaccggcatcttcaagaagctgccccagctgagaaagatcaacttcagcaacaacaagatcaccgacatcgaggagggcgccttcgagggcgccagcggcgtgaacgagatcctgctgaccagcaacagactggagaacgtgcagcacaagatgttcaagggcctggagagcctgaagaccctgatgctgagaagcaacagaatcacctgcgtgggcaacgacagcttcatcggcctgagcagcgtgagactgctgagcctgtacgacaaccagatcaccaccgtggcccccggcgccttcgacaccctgcacagcctgagcaccctgaacctgctggccaaccccttcaactgcaactgctacctggcctggctgggcgagtggctgagaaagaagagaatcgtgaccggcaaccccagatgccagaagccctacttcctgaaggagatccccatccaggacgtggccatccaggacttcacctgcgacgacggcaacgacgacaacagctgcagccccctgagcagatgccccaccgagtgcacctgcctggacaccgtggtgagatgcagcaacaagggcctgaaggtgctgcccaagggcatccccagagacgtgaccgagctgtacctggacggcaaccagttcaccctggtgcccaaggagctgagcaactacaagcacctgaccctgatcgacctgagcaacaacagaatcagcaccctgagcaaccagagcttcagcaacatgacccagctgctgaccctgatcctgagctacaacagactgagatgcatcccccccagaaccttcgacggcctgaagagcctgagactgctgagcctgcacggcaacgacatcagcgtggtgcccgagggcgccttcaacgacctgagcgccctgagccacctggccatcggcgccaaccccctgtactgcgactgcaacatgcagtggctgagcgactgggtgaagagcgagtacaaggagcccggcatcgccagatgcgccggccccggcgagatggccgacaagctgctgctgaccacccccagcaagaagttcacctgccagggccccgtggacgtgaacatcctggccaagtgcaacccctgcctgagcaacccctgcaagaacgacggcacctgcaacagcgaccccgtggacttctacagatgcacctgcccctacggcttcaagggccaggactgcgacgtgcccatccacgcctgcatcagcaacccctgcaagcacggcggcacctgccacctgaaggagggcgaggaggacggcttctggtgcatctgcgccgacggcttcgagggcgagaactgcgaggtgaacgtggacgactgcgaggacaacgactgcgagaacaacagcacctgcgtggacggcatcaacaactacacctgcctgtgcccccccgagtacaccggcgagctgtgcgaggagaagctggacttctgcgcccaggacctgaacccctgccagcacgacagcaagtgcatcctgacccccaagggcttcaagtgcgactgcacccccggctacgtgggcgagcactgcgacatcgacttcgacgactgccaggacaacaagtgcaagaacggcgcccactgcaccgacgccgtgaacggctacacctgcatctgccccgagggctacagcggcctgttctgcgagttcagcccccccatggtgctgcccagaaccagcccctgcgacaacttcgactgccagaacggcgcccagtgcatcgtgagaatcaacgagcccatctgccagtgcctgcccggctaccagggcgagaagtgcgagaagctggtgagcgtgaacttcatcaacaaggagagctacctgcagatccccagcgccaaggtgagaccccagaccaacatcaccctgcagatcgccaccgacgaggacagcggcatcctgctgtacaagggcgacaaggaccacatcgccgtggagctgtacagaggcagagtgagagccagctacgacaccggcagccaccccgccagcgccatctacagcgtggagaccatcaacgacggcaacttccacatcgtggagctgctggccctggaccagagcctgagcctgagcgtggacggcggcaaccccaagatcatcaccaacctgagcaagcagagcaccctgaacttcgacagccccctgtacgtgggcggcatgcccggcaagagcaacgtggccagcctgagacaggcccccggccagaacggcaccagcttccacggctgcatcagaaacctgtacatcaacagcgagctgcaggacttccagaaggtgcccatgcagaccggcatcctgcccggctgcgagccctgccacaagaaggtgtgcgcccacggcacctgccagcccagcagccaggccggcttcacctgcgagtgccaggagggctggatgggccccctgtgcgaccagagaaccaacgacccctgcctgggcaacaagtgcgtgcacggcacctgcctgcccatcaacgccttcagctacagctgcaagtgcctggagggccacggcggcgtgctgtgcgacgaggaggaggacctgttcaacccctgccaggccatcaagtgcaagcacggcaagtgcagactgagcggcctgggccagccctactgcgagtgcagcagcggctacaccggcgacagctgcgacagagagatcagctgcagaggcgagagaatcagagactactaccagaagcagcagggctacgccgcctgccagaccaccaagaaggtgagcagactggagtgcagaggcggctgcgccggcggccagtgctgcggccccctgagaagcaagagaagaaagtacagcttcgagtgcaccgacggcagcagcttcgtggacgaggtggagaaggtggtgaagtgcggctgcaccagatgcgtgagctag

SEQ ID NO: 107865 - protein, 295 aa, Artificial Sequence
  derived and/or modified sequence
MPVHTLSPGAPSAPALPCRLRTRVPGYLLRGPADGGARKPSAVERLEADKAKYVKSLHVANTRQEPVQPLLSKQPLFSPETRRTVLTPSRRALPGPCRRPQLDLDILSSLIDLCDSPVSPAEASRTPGRAEGAGRPPPATPPRPPPSTSAVRRVDVRPLPASPARPCPSPGPAAASSPARPPGLQRSKSDLSERFSRAAADLERFFNFCGLDPEEARGLGVAHLARASSDIVSLAGPSAGPGSSEGGCSRRSSVTVEERARERVPYGVSVVERNARVIKWLYGLRQARESPAAEG

SEQ ID NO: 107866 - DNA, 888 bp, Artificial Sequence
  derived and/or modified sequence
atgccggtgcacacattgtctcccggggccccttctgcacctgcactgccttgccgtctgagaactcgggtgcccgggtacctccttcgcggccccgctgacggcggcgctagaaagcccagtgcagtggaaaggctcgaagctgataaggcgaagtacgtgaaaagcctacacgtggccaatacaagacaagaacctgttcaaccattgttgtccaaacagccacttttttcccccgaaactcgtagaaccgttctgacgccctcaagaagggctttaccaggcccctgtcgaagaccacagctcgatttagacatcctgagctcactaatcgacctatgtgattcccccgtgtcgccggcggaggcaagcaggacccccggaagagcggaaggagccggacgccctccacccgccaccccccctagaccaccgccatccaccagcgcagtgagaagagtggacgtccgcccattgcccgcctctcccgccaggccatgcccttcgcccgggcccgccgcagcctcaagtccagcaagacccccagggctgcaaagatctaagagcgacctgagtgagagattctcaagggctgcagccgatcttgagaggttttttaacttctgtgggttggatcccgaagaggctagggggcttggcgtggcccacctagccagggcaagttcagatatcgtgtctctggctggtccatcagcaggacctggatcctccgagggcggttgctcaagacggagctccgtaacggtcgaagaacgggcccgcgagagggtgccgtacggagtcagtgtggtggagcgcaatgccagggtgatcaagtggttatacggactgagacaggcgcgcgagtcgcctgccgctgaaggatag

SEQ ID NO: 107867 - DNA, 888 bp, Artificial Sequence
  derived and/or modified sequence
atgcctgttcacaccctttcgcccggggcccccagtgctcccgcgttgccctgtcgcttaagaaccagggtgccaggttatctgcttagaggccctgctgacgggggggccagaaaaccttcggccgtcgagcgcctcgaagctgataaagcaaaatacgtcaagtccctccacgtcgctaatactagacaggagcctgtccagcccctgctgtctaaacagcccctgttctccccagaaacccgccgcactgtgctgactcccagccgaagggctttgccaggaccctgccggaggccacagctagatttagatattctgtcgagcttaattgacctgtgcgacagccccgttagtccagcagaggcaagccggaccccgggccgcgctgagggagccgggagaccccctcctgccacgccgcctcgcccccccccgtccaccagcgccgtgagacgcgtagatgttaggccccttccggcatccccggcccgtccgtgcccatcccccgggcccgcggcggcatcttctccggccagacctccagggcttcagcggtctaaaagtgatctcagtgagcgcttttcacgggccgccgccgatctcgagagattctttaacttttgcggcctcgatccagaggaggctcgcggtttgggagtagcacacctggctagagccagctcagacatagttagtctggccgggcccagtgccggccccggttctagtgagggtggatgtagtaggcgaagctcagtaactgttgaagaaagggcacgggagcgcgtcccatacggcgttagtgtcgtggagcgaaatgcacgtgtgattaaatggctgtacggactccggcaggcaagggaaagtcccgccgccgagggttag

SEQ ID NO: 107868 - DNA, 888 bp, Artificial Sequence
  derived and/or modified sequence
atgcctgtgcatactctgtctcccggggcgccgagcgctccagctctcccatgccgactgcgaacacgcgttccagggtatttgcttcgcgggcctgccgacggcggtgcaagaaagcccagcgctgtggaacgacttgaggccgacaaggcaaagtacgtgaagagtctgcatgtggccaataccaggcaagagcctgtgcaacctttgctctccaagcaacccctcttctcgccagagacccggagaactgttctcacacccagcagaagggcactccctgggccatgccgaagaccacagctggatctagatattctgagctctttgattgatctgtgcgattcccccgtcagcccggccgaagcctccagaacccccggtcgcgccgagggggcaggacgcccccctccagccaccccccctcggccgccaccgtcaacgtctgcggtccggagagtagacgtgcgacctctgcctgcttcacctgcaaggccttgtccatcccccggacctgcagcagcttcctccccggccagaccaccaggactacaacggtccaagtccgacctgtccgaacggtttagccgtgcggccgcagatctggagcgtttcttcaacttttgtgggctagacccagaggaggcccgcgggctgggagtggcacatctcgccagggcaagctccgacatcgtcagcctcgctggcccgagtgcaggtccaggctcttccgaaggaggctgctcgcgtaggtcaagcgtaacagtggaggaaagggctcgggaaagagtcccctacggggtttccgtggttgaacggaatgcgcgtgtgatcaagtggctttacggactgaggcaggcccgagagtctcccgccgcagagggttag

SEQ ID NO: 107869 - DNA, 888 bp, Artificial Sequence
  derived and/or modified sequence
atgcctgttcacaccctttcccctggggccccaagtgccccagcgctcccctgtcgattacggacacgcgtcccggggtatctcctgcgggggcctgctgacggaggggccagaaaaccctccgcagtggaacgtctcgaagctgacaaggccaagtatgtcaagtcacttcacgtggcaaacactcgacaggaacctgtgcaacccctattgtctaaacagcctctcttttccccggagacacggcggacagttcttactccttcccgcagggctttgcccgggccttgtaggcggccacagcttgatctggatatactcagctctttgattgatctttgcgattctcctgtgtcccccgccgaagccagccgtacacccgggagggcagagggagctggccgccccccccctgctactccacctcgcccaccgccttcaacttccgcagtcaggcgagttgacgtgcgtcccctacctgcaagtcccgctagaccctgcccatcccccgggcctgctgccgcatctagccctgcccggccgcctggcctacaacgcagcaagtcagatctgtctgagaggtttagcagggccgctgcagacctagagaggttttttaacttctgtgggctagatcctgaagaagctcgcgggttgggcgttgcccatctggcgagggcctctagcgacatcgtaagcttggcgggaccttctgccggcccaggcagcagtgaagggggctgcagccggagatcttctgtgacagtggaggagagagcccgggagcgtgtgccctatggagtttcagtcgtcgagcgcaacgctcgagtgatcaagtggctctacggtctgcgccaggccagggagtcccctgccgcggaagggtag

SEQ ID NO: 107870 - DNA, 888 bp, Artificial Sequence
  derived and/or modified sequence
atgccggttcatacactgtcacccggcgcaccatcagcgcctgccttaccgtgtaggcttaggaccagagttcctggatacctccttcgcggacccgcggatggcggcgccagaaaaccaagtgccgtcgagcggttagaggccgacaaggctaaatacgtaaaatctctgcacgtggcaaatactagacaggagccagttcagcccctgctcagtaagcagcctttgttctccccagagacccgaaggacagtgctgactcccagccggcgcgctctccccggaccatgccgtcgtccgcagctggatctggatattctgtcctcactcatcgacctttgcgactcgccagtgtctcctgcagaggcgtcccgcacgccaggccgtgcagagggcgctggacgccctcccccagccacaccgccccgaccaccgccaagcacttctgccgtacgaagggtggacgtgcggccccttcccgcatcaccggcccgaccttgtccatcacctggccccgcagcagccagctcaccagctaggccccctggcttgcagaggagcaagagcgatctgagcgaaaggttttcccgggcagccgcagatctcgagaggttctttaacttctgtggactggaccctgaagaggcgagaggcctcggggtggcgcaccttgcacgagcgtccagcgacatcgtcagcttggccggacctagcgcaggaccgggttcttcagaaggcgggtgctccagacgcagtagtgtaactgtggaggaaagagctcgtgaaagggtgccttacggggtgagcgttgttgaaaggaacgcccgcgtaattaagtggttgtatggccttaggcaggcgcgagagtcccccgccgcggaaggttag

SEQ ID NO: 107871 - DNA, 888 bp, Artificial Sequence
  derived and/or modified sequence
atgcctgtgcacaccctgagccctggggcccccagcgccccagccctgccctgccgcctgcggaccagggtgcccggctacctgctgcggggccctgcagatggaggagccaggaagcccagcgctgtggagcggctggaggccgacaaggccaagtatgtgaagagcctgcacgtggccaacacccggcaggagcctgtgcagcccctgctgagcaagcagcccctcttcagccctgagaccaggagaacagtgctgacccccagccggcgggccctgcccggcccctgccggcggccccagctggacctggacatcctgagcagcctgattgacctgtgtgacagccctgtgtccccagctgaggccagcaggaccccaggccgggcagagggcgccggccggcccccaccagccaccccaccccggcccccacccagcaccagcgctgtgcggcgggtggatgtgcggcccctgcctgccagccctgcccggccctgccccagccctggccctgctgctgccagcagccctgcccggcccccaggcctgcagaggagcaagagtgacctgtctgagcgcttcagcagagctgctgctgacctggagcgcttcttcaacttctgtggcctggaccctgaggaggcccggggcctgggcgtggcccacctggcccgggccagcagtgacatcgtgtccctggccggccccagcgctggccctggcagcagcgagggcggctgcagccgccgcagctctgtgacagtggaggagcgggcccgggagcgggtgccctacggcgtgtctgtggtggagagaaatgcccgggtcatcaagtggctgtatggcctgcggcaggcccgggagagccctgctgctgagggctag

SEQ ID NO: 107872 - DNA, 1737 bp, Artificial Sequence
  derived and/or modified sequence
tcagctcgaccgcggagggcagctccaaaggggaccccaaaggtgcccacgcggggctggggcctcctgggcgtcgttgggagcggccactaccggcccgggtccgagctgtcagcctctccaaagcctgcgcgagaggagccgggacacgcctagcgcgggctccagtggccggtgtccagctgcctactttctgcccggatctctggctcctcatctctccggtctccgcagactaaagccctcgggatatgcagcagccatgcctgtgcacacgctgagccccggagccccgtccgcccccgccctaccttgccgcctgcggaccagggtccctggctacctgctacgggggccggcagatggtggagcccggaaaccgagcgctgtggagcgcctggaggccgacaaggccaagtacgtcaagagcctgcacgtggccaacacccgccaggagcctgtgcagcccctgctgtccaaacagccgctctttagccctgagactcgccgcacagtgctcacgcccagccgccgagccctgcctggcccctgccgacggccccagctggacctggacatcctcagcagcctcatcgacttgtgtgacagccccgtgtcccctgccgaggccagccgcactcctggacgggccgagggagccggccgtcctcccccagccacccctccgcgaccgccgcccagtacctctgcggtccgccgggtggacgtccgccccctgcccgcctcgcctgcccggccctgcccatcacccggccctgccgccgcctccagcccagcccggccgccgggtttgcaacgctccaagtcggacttgagcgagcgcttttctagggcagccgctgatctcgagcgcttttttaacttctgcggcctggacccggaggaggcgagagggttgggtgtggcccacctggcacgggccagctcggatatcgtgtccctggcagggcccagtgctgggccgggcagctctgaagggggctgctcccgccgcagctcggtgactgttgaggagcgggcccgggagcgcgttccctatggcgtgtcggtggtggagcgcaatgcccgcgtgatcaagtggttgtatgggctaaggcaggctcgggagagcccagcagctgaaggctaggcgccactgggcctggaattcgccacaggacggatcttacagaggcaagtggtccctggacctctcttgcatccattctctagacggccgtgtcagaggctccaccctgttgtgaacttggtatggaggcaaaggcttagaggctggaccagcattgttgggcaaggactgactctccaagggttttgttcttggctttggacacctgagaaccccctcctcccctcccccaatacaaggtttttgacatgagtgtactcctgcttagttcctcttgtggggctgcatttgcggtgctttgccctccccactgtgagtgaggggccaagggatctcctcaatcctgtctccccagcggctctgtttcctccttccttccttggcctctgtcctttgctgacttcctcttccttacccagcagaactcaccctggggtcggggcagtggggaggggcctatccactgctcttcctagtccttggcagctggcctaggtgggcagactataggagggactggttaggagtctgcattgctttgacttccctctccttggttaataaacacaaatgcttgtttctcaagg

SEQ ID NO: 107873 - DNA, 1809 bp, Artificial Sequence
  derived and/or modified sequence
acttccccttccacggcgccccagggactttccctgcggtgggggccttcgacagtgagggccacccgctcagctcgaccgcggagggcagctccaaaggggaccccaaaggtgcccacgcggggctggggcctcctgggcgtcgttgggagcggccactaccggcccgggtccgagctgtcagcctctccaaagcctgcgcgagaggagccgggacacgcctagcgcgggctccagcagtggccggtgtccagctgcctactttctgcccggatctctggctcctcatctctccggtctccgcagactaaagccctcgggatatgcagcagccatgcctgtgcacacgctgagccccggagccccgtccgcccccgccctaccttgccgcctgcggaccagggtccctggctacctgctacgggggccggcagatggtggagcccggaaaccgagcgctgtggagcgcctggaggccgacaaggccaagtacgtcaagagcctgcacgtggccaacacccgccaggagcctgtgcagcccctgctgtccaaacagccgctctttagccctgagactcgccgcacagtgctcacgcccagccgccgagccctgcctggcccctgccgacggccccagctggacctggacatcctcagcagcctcatcgacttgtgtgacagccccgtgtcccctgccgaggccagccgcactcctggacgggccgagggagccggccgtcctcccccagccacccctccgcgaccgccgcccagtacctctgcggtccgccgggtggacgtccgccccctgcccgcctcgcctgcccggccctgcccatcacccggccctgccgccgcctccagcccagcccggccgccgggtttgcaacgctccaagtcggacttgagcgagcgcttttctagggcagccgctgatctcgagcgcttttttaacttctgcggcctggacccggaggaggcgagagggttgggtgtggcccacctggcacgggccagctcggatatcgtgtccctggcagggcccagtgctgggccgggcagctctgaagggggctgctcccgccgcagctcggtgactgttgaggagcgggcccgggagcgcgttccctatggcgtgtcggtggtggagcgcaatgcccgcgtgatcaagtggttgtatgggctaaggcaggctcgggagagcccagcagctgaaggctaggcgccactgggcctggaattcgccacaggacggatcttacagaggcaagtggtccctggacctctcttgcatccattctctagacggccgtgtcagaggctccaccctgttgtgaacttggtatggaggcaaaggcttagaggctggaccagcattgttgggcaaggactgactctccaagggttttgttcttggctttggacacctgagaaccccctcctcccctcccccaatacaaggtttttgacatgagtgtactcctgcttagttcctcttgtggggctgcatttgcggtgctttgccctccccactgtgagtgaggggccaagggatctcctcaatcctgtctccccagcggctctgtttcctccttccttccttggcctctgtcctttgctgacttcctcttccttacccagcagaactcaccctggggtcggggcagtggggaggggcctatccactgctcttcctagtccttggcagctggcctaggtgggcagactataggagggactggttaggagtctgcattgctttgacttccctctccttggttaataaacacaaatgcttgtttctcaagg

SEQ ID NO: 107874 - DNA, 888 bp, Artificial Sequence
  derived and/or modified sequence
atgcccgtgcacaccctgagccccggcgcccccagcgcccccgcccttccttgccgtctgcgcactcgcgtgccgggctatttactgcgcggtcccgctgatggaggcgctcgaaagccatccgctgtggaacggctggaggcggacaaggccaagtacgtcaagtccctgcatgttgctaacacccgccaggagcccgtgcaacctttgctttctaaacaacctctttttagtcctgagacccgccggaccgtgctgactccgtcacgcagagccttacctgggccatgccgaagaccccagttggaccttgatatcctgagttccctgatagatctttgtgactctcccgtgtctccggcagaagcctctaggacacccggccgggctgaaggggctggacgccctccccccgccacccctccaaggcctcctcctagcactagtgcagtcaggagagtcgacgtccgaccgctgcccgcctccccggcacgtccctgcccatctcccggacccgccgccgcgagttcccccgcccggccccctggtctccagaggtccaaaagtgacctttcggaacgcttttcgcgggctgccgctgatctcgaacggttctttaacttctgtggacttgaccccgaggaggcccggggcctcggcgtcgcgcatctcgctagagcttctagcgatattgtgtcgcttgccggtccatcggcagggcctggcagctcagaaggtggctgcagtagaagaagttctgttacagttgaggaaagagctcgggagagggttccctacggagtatcggtggtagaaaggaatgcccgtgtgatcaagtggctctatgggctgaggcaagctcgagaatcccctgccgccgaggggtag

SEQ ID NO: 107875 - DNA, 888 bp, Artificial Sequence
  derived and/or modified sequence
atgcccgtgcacaccctgagccccggcgcccccagcgcccccgccttgccttgtcggcttcgtaccagagtaccagggtatctacttagggggccagccgatggcggagcacgaaagccatccgccgtggaaaggctcgaagccgataaagcgaaatacgtcaagtccctgcacgtcgcaaatacccggcaagagcctgtccagccactgctgtctaagcaaccactgttctcacccgagacacgcaggaccgtgctcacaccttctaggagagcactcccgggcccatgccgacgtccacagcttgacctggacattctgagctcgttgatcgatctgtgcgactctccagtctccccggccgaagcatcgcgtacgcctggaagggccgaaggggccggccgacccccccctgccacccccccaaggcccccaccctctacctccgctgtgcggcgggtcgatgtgagacccctcccggcttctcccgcccggccctgtccttcgcctgggcccgcggccgcctcatctcctgctcgcccccctgggctgcaaagatctaagtcggatttgtctgaacgatttagccgggccgccgcagatttggaaaggttttttaatttttgtggcctggatccggaggaagcacgggggctgggcgtggcccacttggctcgggcctcttcagacatcgtcagtctagcggggccatccgccgggcctggtagttccgaaggcggctgtagcagaaggagctccgtcaccgtcgaggagcgcgcgagggaaagagtgccttacggggtctctgtcgtagagagaaacgccagggttatcaagtggctgtatggactgaggcaggctagagaaagcccggctgccgaagggtag

SEQ ID NO: 107876 - DNA, 888 bp, Artificial Sequence
  derived and/or modified sequence
atgcccgtgcacaccctgagccccggcgcccccagcgcccccgccctgccatgtaggctcaggacacgcgtacccggctacctgttaaggggccccgccgatgggggcgcgaggaagccatcagccgtcgaacgtttagaagccgataaggccaaatacgtaaagtcgcttcacgttgccaatactcgccaggaacccgtgcaacctctgttgagtaaacagcccctcttcagccccgagaccagaagaactgttctgacaccctcacggagagcgctcccaggaccgtgccgaaggcctcagcttgatctcgatattctgagtagtctgatagacctctgtgactcaccagtctctcccgccgaagcatccaggacccccggaagagctgagggtgctggtaggcctcccccagccactcctcccaggcctcctcccagcacctcagctgtgcgtcgggtggatgtaaggcctttgcctgcttccccggcccggccatgtcccagccccggccctgccgccgcaagcagccccgctaggccgccggggctccagcgatccaagtcagacctgagtgagcgatttagtagagcggctgccgatctggagcgttttttcaacttctgtggcttggaccctgaggaggcaaggggtcttggagtggcgcatctggccagagcttcttctgatattgtgtccctggcagggccaagcgcaggccccgggtcatctgaaggcgggtgtagcagacgttcctctgtgacagtggaggagcgcgcacgcgagcgggttccatatggcgtgagcgttgtcgagcgtaacgcaagggtaatcaaatggctttacgggctccggcaggcccgtgaatccccagcagctgagggctag

SEQ ID NO: 107877 - DNA, 888 bp, Artificial Sequence
  derived and/or modified sequence
atgcccgtgcacaccctgagccccggcgcccccagcgcccccgccctcccatgccggctgcgtactcgggtgccaggatacctcttaagggggcccgctgatgggggggcccgcaaaccttctgccgtcgaaaggttagaagctgacaaggcaaagtatgtaaaatctctgcacgtagccaacactagacaggagccagtgcagcctttactctctaaacagcctctgttctccccagagacaaggaggaccgtgttgactccctccaggagggccttacctggcccttgtcggagaccccagcttgacctggacattctgagttctctcatcgacctatgcgattctcctgtctcacccgctgaagcatcaagaacacccggaagagcagagggtgcaggtagaccgccgcccgctactccgccaaggccacccccttccacttccgcagtgagaagggtcgatgtcagacctcttcccgcttcacctgcaaggccttgccccagtccaggccctgcagccgcctcctcccccgctaggccacctggcctccaaagaagtaaaagcgaccttagcgaaagattttccagggccgctgctgatctggagcggttctttaatttttgcggcctcgatcccgaagaggctcgggggcttggagtggcccatctggcccgagcttctagcgatattgtgagcttggcaggacccagtgccggacctggctcttcagaaggcggatgcagccgccggagcagcgttaccgtggaagagcgcgctcgagaacgcgtgccctatggcgtgtcagttgtggagcggaacgcacgcgttataaaatggttgtacgggttacgtcaagctcgggagtcacccgctgccgagggttag

SEQ ID NO: 107878 - DNA, 888 bp, Artificial Sequence
  derived and/or modified sequence
atgcccgtgcacaccctgagccccggcgcccccagcgcccccgccctgccctgtcggttgcgcacccgcgttccggggtacctgttacgcgggccagcagatggcggtgcccgaaagcctagcgctgttgaaaggctggaggccgacaaagcaaaatacgtaaaaagcttacatgtagctaacactcgccaggaacctgtgcagccactgctgtccaagcagcccttattcagccctgagacccgcagaaccgtcctcactccctctaggcgggcgctcccaggaccctgtagaagaccccagctggacctggacattctgtcctcactcatagacttatgtgattcccctgtgtctccagctgaggcttctaggacccctggaagggcagagggagcaggacggccgccccccgccacaccaccccgcccacccccttccacaagtgctgtgagacgagttgacgtgagaccgctgccggcatccccggcgagaccctgtccgagccctggtccagccgcagccagctctcctgcaagacctccggggctacagagatcaaaatctgatctgagtgagaggttctccagagccgctgcagatctagaacggtttttcaatttttgcggacttgacccagaggaagcaagaggtctgggagtcgcccatcttgcccgagcttcctccgacattgtatctctggccggcccttctgccggcccaggatcttccgaaggaggatgctcccgacgtagttcggtcaccgtggaggagagggctcgtgaacgggtaccgtatggggttagcgtcgtggagaggaatgctagggtcatcaagtggttgtacggactccgccaagccagggaatcgcccgctgcagaaggctag

SEQ ID NO: 107879 - DNA, 888 bp, Artificial Sequence
  derived and/or modified sequence
atgccagttcacaccctgtcacctggcgcaccctctgcccctgccttgccatgcagactgcggaccagggttcctggatacctactccggggacccgcagatgggggagctcgcaagccttcagcagttgaacgtttagaggcagacaaggcaaagtatgtgaaaagccttcatgttgccaatacgcggcaagaacccgtacagcccctgctttctaagcagcccctgttcagtccagagacccggcgaacggtgctgacgccttctcgcagagccctccccggaccttgtaggaggccccagctggatcttgacatactctcgtctctgatcgacctttgcgattcccccgtttcacctgctgaagcctccagaaccccaggacgggcagaaggtgccggaaggccacccccagccacaccacctagacctccaccttcaactagtgctgtccgaagagtggacgtccgcccactgccagcatcacctgccagaccttgccccagtcccggacctgccgcagcaagttctcccgctagacccccaggattgcagcggagcaagagcgacctttcagaaaggtttagcagagccgctgccgaccttgagcggttctttaatttttgtggcttggaccccgaggaagccagaggcttgggggtagcgcaccttgctagagcctcctccgacattgtgtctctggctggtccctcagcgggaccagggagctctgaggggggatgctctaggaggtctagtgtgactgttgaggaacgcgctcgggagagggtcccatatggggtgagcgttgtcgaacggaacgcaagagtgatcaaatggctttatgggttgcggcaggcccgagaatcaccagctgcggagggttag

SEQ ID NO: 107880 - DNA, 888 bp, Artificial Sequence
  derived and/or modified sequence
atgcctgtccatacgctctccccaggagccccttccgctccagcgctgccatgccgcctgcggacgcgtgtgcccggatacttgctcagggggccagccgatggcggtgcacggaaacccagcgcggtggaacgtctggaggcagataaggccaaatacgttaaatccctgcacgtggccaatacaagacaggaaccggtccaaccacttcttagcaaacagcccctctttagcccagagaccagacgcacggttctgaccccgtctcgtcgggcactgcctggcccatgcaggcgaccacagctcgacttggatatcttatcatcgctaatagacctttgcgacagtccagtgagccctgccgaggcatcccgcaccccgggaagagccgagggtgcaggtcgccctcccccagcaactcccccacggcctcctccctctaccagtgcggtaagacgcgtggatgtccgtcccctgccagcctctccagctagaccctgcccttcgcctggccctgcggcagccagttcgcctgctagacctccagggttgcaacgttcaaaaagcgacctgtctgagcgtttcagtagggcagccgcagacttagaaagattctttaatttctgcggattagatccagaggaggccaggggcttgggagtcgcacacctggctcgggcatcctccgacatcgtaagccttgctggcccttcagcaggtccaggctcttctgaaggcggttgttctcgacgatctagcgtgactgttgaggagagagctcgcgagcgcgtcccatatggagtcagcgtcgtcgagcgaaacgcaagggtgataaagtggctctatggcttgcgccaggccagggagagcccagctgctgaaggttag

SEQ ID NO: 107881 - DNA, 1619 bp, Artificial Sequence
  derived and/or modified sequence
ctttacaagtatgaactcatttaattccctcaactctgtgatataagcagtggccggtgtccagctgcctactttctgcccggatctctggctcctcatctctccggtctccgcagactaaagccctcgggatatgcagcagccatgcctgtgcacacgctgagccccggagccccgtccgcccccgccctaccttgccgcctgcggaccagggtccctggctacctgctacgggggccggcagatggtggagcccggaaaccgagcgctgtggagcgcctggaggccgacaaggccaagtacgtcaagagcctgcacgtggccaacacccgccaggagcctgtgcagcccctgctgtccaaacagccgctctttagccctgagactcgccgcacagtgctcacgcccagccgccgagccctgcctggcccctgccgacggccccagctggacctggacatcctcagcagcctcatcgacttgtgtgacagccccgtgtcccctgccgaggccagccgcactcctggacgggccgagggagccggccgtcctcccccagccacccctccgcgaccgccgcccagtacctctgcggtccgccgggtggacgtccgccccctgcccgcctcgcctgcccggccctgcccatcacccggccctgccgccgcctccagcccagcccggccgccgggtttgcaacgctccaagtcggacttgagcgagcgcttttctagggcagccgctgatctcgagcgcttttttaacttctgcggcctggacccggaggaggcgagagggttgggtgtggcccacctggcacgggccagctcggatatcgtgtccctggcagggcccagtgctgggccgggcagctctgaagggggctgctcccgccgcagctcggtgactgttgaggagcgggcccgggagcgcgttccctatggcgtgtcggtggtggagcgcaatgcccgcgtgatcaagtggttgtatgggctaaggcaggctcgggagagcccagcagctgaaggctaggcgccactgggcctggaattcgccacaggacggatcttacagaggcaagtggtccctggacctctcttgcatccattctctagacggccgtgtcagaggctccaccctgttgtgaacttggtatggaggcaaaggcttagaggctggaccagcattgttgggcaaggactgactctccaagggttttgttcttggctttggacacctgagaaccccctcctcccctcccccaatacaaggtttttgacatgagtgtactcctgcttagttcctcttgtggggctgcatttgcggtgctttgccctccccactgtgagtgaggggccaagggatctcctcaatcctgtctccccagcggctctgtttcctccttccttccttggcctctgtcctttgctgacttcctcttccttacccagcagaactcaccctggggtcggggcagtggggaggggcctatccactgctcttcctagtccttggcagctggcctaggtgggcagactataggagggactggttaggagtctgcattgctttgacttccctctccttggttaataaacacaaatgcttgtttctcaagg

SEQ ID NO: 107882 - DNA, 888 bp, Artificial Sequence
  derived and/or modified sequence
atgccggtgcacacgctctcacccggtgctccctctgccccagcactaccctgcagattaaggacccgggtcccgggttacttgcttcggggaccagccgatggcggtgcgagaaagcctagcgcagtagagcgtttggaggctgataaggcgaagtacgttaaaagtttacatgtggctaacacacggcaggagcccgtgcagccgcttcttagtaagcagccgttgttctccccggagacccggaggaccgtattgacacctagtcgccgagcgctccccggaccctgccgcagaccccagcttgacctggatatcctgtccagcctcatcgatctctgtgatagcccagtgtccccagccgaagcatcgagaaccccaggcagggccgagggcgctggcaggccgccaccagccaccccaccaagacctccacctagcacatctgctgtacgcagggtggatgttagaccccttcctgcgagccccgctaggccctgcccgtcaccaggcccagccgctgccagctcccctgccaggccccctggcctgcagcggtccaaatccgatctgtccgaacgattttcccgcgctgctgccgatctggagcggttttttaacttctgcggtctggacccagaggaagctagggggcttggagtagcccacctcgcgcgtgccagctcagatattgtgtctctggccggaccctccgcgggacccggaagctccgaaggtgggtgttccagacgatcgtccgtgaccgtggaagagcgcgctcgggagcgggtcccatacggcgtgagtgtggtagagagaaatgccagggtgataaaatggctgtacggactaagacaggctcgcgagtcgcctgctgccgagggctag

SEQ ID NO: 107883 - DNA, 888 bp, Artificial Sequence
  derived and/or modified sequence
atgcccgtgcacaccttgagcccaggtgctccatccgctcccgctcttccttgcaggctcaggaccagagtgccaggatatctgctaagagggcctgcggacggaggggcaagaaagccaagtgcggtggagagattagaggcagacaaagccaaatatgtaaagagtctacacgtggccaatacaaggcaggaacctgttcagcccttactgtctaaacagcccttattctctcccgagacacggagaacagtgctgacacccagcaggagagcactgccgggaccctgccgacgtccgcagcttgatttggacatcctcagttctcttatcgacctgtgtgactctcccgtctctccagcagaagccagcagaacgccaggcagagccgaaggcgctggtcggccaccacctgcaacgccccctcggccaccacccagtacatcggctgtgcggagggtcgatgtgaggcccctgccagcttcaccagcccgtccatgtccctcccctggccctgccgcagcttccagccccgcacggcctccagggcttcaacgatcaaaaagtgacctctcagagaggttttccagagcggctgccgacctcgaaaggtttttcaacttctgtggcctggatccagaagaggcacgcggactcggcgtagcacacctcgcgcgagcctcctcggacattgtgtctcttgcagggccatctgctggtccaggttccagcgagggtggatgtagtcggagaagctctgtaaccgtggaagaaagggccagagaacgggttccatatggagtgtcagtcgtggagcgtaacgcgcgtgtcattaagtggttgtatggactgcgacaggcaagggagtcccccgctgctgaggggtag

SEQ ID NO: 107884 - DNA, 888 bp, Artificial Sequence
  derived and/or modified sequence
atgcctgtccacacactatctcctggtgccccatccgctccagctctgccatgtaggctcaggactagagttcccggttatctgctgcggggacccgcagacggtggtgcacggaagccaagtgctgtagaacgactcgaagccgacaaagcaaagtacgtgaagtcgctgcatgtagcaaatacccggcaggaaccagtccagcccctcttgtccaaacaacccctgttttcacctgagacacgccgtactgtgctgactccttccagaagggcgttgcctgggccatgtagaaggccacagcttgacctggatattctatcgtcactcatagatttatgcgatagccctgtgtccccagcggaggcgagccggacaccaggccgtgccgaaggagccggacggcctcctccagccactccgcctagaccccctccctctaccagcgccgtccgtcgcgttgatgtgcgccctctgcccgcttcccctgcgagaccctgcccgagtccaggacctgctgctgccagcagtcccgcacgcccaccgggtctgcaacgctctaagtctgatctctccgagaggttttcgagggcggctgcggacttggaaagattttttaatttttgcggactcgaccccgaggaggcccgtgggctgggtgtggcgcatcttgccagggcatcgtcagacattgtatctctggcaggcccatccgcgggtcctggtagctccgagggcggttgttcccgtcgatctagcgtgaccgtcgaggagagagccagagaacgagtgccctatggtgtctcagtggtggagagaaacgcacgggtgatcaagtggctttacgggctccggcaggccagagagagtcccgcagccgaggggtag

SEQ ID NO: 107885 - DNA, 1638 bp, Artificial Sequence
  derived and/or modified sequence
cgcggctgagcctctttgtctgagcgcgctcggcttttttttttttttctctctccttccctgcagcagtggccggtgtccagctgcctactttctgcccggatctctggctcctcatctctccggtctccgcagactaaagccctcgggatatgcagcagccatgcctgtgcacacgctgagccccggagccccgtccgcccccgccctaccttgccgcctgcggaccagggtccctggctacctgctacgggggccggcagatggtggagcccggaaaccgagcgctgtggagcgcctggaggccgacaaggccaagtacgtcaagagcctgcacgtggccaacacccgccaggagcctgtgcagcccctgctgtccaaacagccgctctttagccctgagactcgccgcacagtgctcacgcccagccgccgagccctgcctggcccctgccgacggccccagctggacctggacatcctcagcagcctcatcgacttgtgtgacagccccgtgtcccctgccgaggccagccgcactcctggacgggccgagggagccggccgtcctcccccagccacccctccgcgaccgccgcccagtacctctgcggtccgccgggtggacgtccgccccctgcccgcctcgcctgcccggccctgcccatcacccggccctgccgccgcctccagcccagcccggccgccgggtttgcaacgctccaagtcggacttgagcgagcgcttttctagggcagccgctgatctcgagcgcttttttaacttctgcggcctggacccggaggaggcgagagggttgggtgtggcccacctggcacgggccagctcggatatcgtgtccctggcagggcccagtgctgggccgggcagctctgaagggggctgctcccgccgcagctcggtgactgttgaggagcgggcccgggagcgcgttccctatggcgtgtcggtggtggagcgcaatgcccgcgtgatcaagtggttgtatgggctaaggcaggctcgggagagcccagcagctgaaggctaggcgccactgggcctggaattcgccacaggacggatcttacagaggcaagtggtccctggacctctcttgcatccattctctagacggccgtgtcagaggctccaccctgttgtgaacttggtatggaggcaaaggcttagaggctggaccagcattgttgggcaaggactgactctccaagggttttgttcttggctttggacacctgagaaccccctcctcccctcccccaatacaaggtttttgacatgagtgtactcctgcttagttcctcttgtggggctgcatttgcggtgctttgccctccccactgtgagtgaggggccaagggatctcctcaatcctgtctccccagcggctctgtttcctccttccttccttggcctctgtcctttgctgacttcctcttccttacccagcagaactcaccctggggtcggggcagtggggaggggcctatccactgctcttcctagtccttggcagctggcctaggtgggcagactataggagggactggttaggagtctgcattgctttgacttccctctccttggttaataaacacaaatgcttgtttctcaagg

SEQ ID NO: 107886 - DNA, 1856 bp, Artificial Sequence
  derived and/or modified sequence
cacccgctcagctcgaccgcggagggcagctccaaaggggaccccaaaggtgcccacgcggggctggggcctcctgggcgtcgttgggagcggccactaccggcccgggtccgagctgtcagcctctccaaagcctgcgcgagaggagccgggacacgcctagcgcgggctccaggtggctgaccacgtccacgaccacatctgcctctaaactggaattcggttgctgacccagccccagcctcggctttcttgtcagcaccagggggcacagaacaccgtctcagtggccggtgtccagctgcctactttctgcccggatctctggctcctcatctctccggtctccgcagactaaagccctcgggatatgcagcagccatgcctgtgcacacgctgagccccggagccccgtccgcccccgccctaccttgccgcctgcggaccagggtccctggctacctgctacgggggccggcagatggtggagcccggaaaccgagcgctgtggagcgcctggaggccgacaaggccaagtacgtcaagagcctgcacgtggccaacacccgccaggagcctgtgcagcccctgctgtccaaacagccgctctttagccctgagactcgccgcacagtgctcacgcccagccgccgagccctgcctggcccctgccgacggccccagctggacctggacatcctcagcagcctcatcgacttgtgtgacagccccgtgtcccctgccgaggccagccgcactcctggacgggccgagggagccggccgtcctcccccagccacccctccgcgaccgccgcccagtacctctgcggtccgccgggtggacgtccgccccctgcccgcctcgcctgcccggccctgcccatcacccggccctgccgccgcctccagcccagcccggccgccgggtttgcaacgctccaagtcggacttgagcgagcgcttttctagggcagccgctgatctcgagcgcttttttaacttctgcggcctggacccggaggaggcgagagggttgggtgtggcccacctggcacgggccagctcggatatcgtgtccctggcagggcccagtgctgggccgggcagctctgaagggggctgctcccgccgcagctcggtgactgttgaggagcgggcccgggagcgcgttccctatggcgtgtcggtggtggagcgcaatgcccgcgtgatcaagtggttgtatgggctaaggcaggctcgggagagcccagcagctgaaggctaggcgccactgggcctggaattcgccacaggacggatcttacagaggcaagtggtccctggacctctcttgcatccattctctagacggccgtgtcagaggctccaccctgttgtgaacttggtatggaggcaaaggcttagaggctggaccagcattgttgggcaaggactgactctccaagggttttgttcttggctttggacacctgagaaccccctcctcccctcccccaatacaaggtttttgacatgagtgtactcctgcttagttcctcttgtggggctgcatttgcggtgctttgccctccccactgtgagtgaggggccaagggatctcctcaatcctgtctccccagcggctctgtttcctccttccttccttggcctctgtcctttgctgacttcctcttccttacccagcagaactcaccctggggtcggggcagtggggaggggcctatccactgctcttcctagtccttggcagctggcctaggtgggcagactataggagggactggttaggagtctgcattgctttgacttccctctccttggttaataaacacaaatgcttgtttctcaagg

SEQ ID NO: 107887 - DNA, 888 bp, Artificial Sequence
  derived and/or modified sequence
atgcccgtgcacaccctgagccccggcgcccccagcgcccccgccctgccctgcagactgagaaccagagtgcccggctacctgctgagaggccccgccgacggcggcgccagaaagcccagcgccgtggagagactggaggccgacaaggccaagtacgtgaagagcctgcacgtggccaacaccagacaggagcccgtgcagcccctgctgagcaagcagcccctgttcagccccgagaccagaagaaccgtgctgacccccagcagaagagccctgcccggcccctgcagaagaccccagctggacctggacatcctgagcagcctgatcgacctgtgcgacagccccgtgagccccgccgaggccagcagaacccccggcagagccgagggcgccggcagacccccccccgccaccccccccagacccccccccagcaccagcgccgtgagaagagtggacgtgagacccctgcccgccagccccgccagaccctgccccagccccggccccgccgccgccagcagccccgccagaccccccggcctgcagagaagcaagagcgacctgagcgagagattcagcagagccgccgccgacctggagagattcttcaacttctgcggcctggaccccgaggaggccagaggcctgggcgtggcccacctggccagagccagcagcgacatcgtgagcctggccggccccagcgccggccccggcagcagcgagggcggctgcagcagaagaagcagcgtgaccgtggaggagagagccagagagagagtgccctacggcgtgagcgtggtggagagaaacgccagagtgatcaagtggctgtacggcctgagacaggccagagagagccccgccgccgagggctag

SEQ ID NO: 107888 - DNA, 303 bp, Artificial Sequence
  derived and/or modified sequence
atgggtacatcatcaatctttctgtgtgtgctgtttctctgtggtgcactgggacttaccatgagccctgcccggggaaggctacggtgttatatctgcggcttcaccaagccttgtcaccctgtaccgacggagtgtagagatgacgaggcttgcgggatcagtatagggactagtggcaggaccctggtccaatggccattttctcggcggttgcccactagcattcaccctgcctttccggtggctcccgcatctgcatgtctgttccacccgacggatcagtccgaaataacggaatag

SEQ ID NO: 107889 - DNA, 399 bp, Artificial Sequence
  derived and/or modified sequence
atgtcgcagccttggctgtactctcaatgtataatctcgggtaaacccagtgaagaggccgctggagaaaacgggtccatcagtgccgctttgcggcctttgctgctcgtggcagacgtgccggtactcggttatctgtgtcctagctccgtcagttcaggtgtttgcgaagctaagctgctcggatggggtcttggaggcgtctccgctgccccagaggctaagactaaagcagaggccgaagctgaggctgaggcgaccttggtcagaagaaagctccaggttgaaaagctggtggacagagatctggatctgaccgtaatactcatggtaccaatgccttcagcacggaggcctccagcgctcgcaacaactggatcttgctccccccctggatag

SEQ ID NO: 107890 - protein, 194 aa, Artificial Sequence
  derived and/or modified sequence
MGQRDQGLDRERKGPQDDPGSYQGPERRNFLKEDAMKTKTHYHAMHADCLQELRRYLESGVVLRRTVPPMVNVTRSEASEGNITVTCRASSFYPRNIILTWRQDGVSLSHDTQQWGDVLPDGNGTYQTWVATRICRGEEQRFTCYMEHSGNHSTHPVPSGKVLVLQSHWQTFHVSAVAAGCCYFCYYYFLCPLL

SEQ ID NO: 107891 - DNA, 585 bp, Artificial Sequence
  derived and/or modified sequence
atgggccagagggaccaaggactggatagagagagaaagggcccccaggacgatcctggatcttaccagggacccgagcgccggaacttcctgaaggaagacgccatgaaaaccaaaacacactaccacgcaatgcatgccgattgtcttcaggaattgaggcgatatttggaatccggagtcgtgctgcgcagaacggtgccacctatggtgaatgtcacccggagcgaagcctctgaaggtaatatcacggtaacatgccgagccagctccttttatccccgaaacatcatcctaacatggaggcaggacggcgtaagtttaagccacgatacacagcagtggggggacgtcctgccagacggcaacggtacctaccagacctgggtggccacaagaatctgcagaggcgaggagcaacgctttacgtgttacatggaacatagcggaaaccacagcactcaccctgtgccatccggcaaggtgcttgtcttgcagtctcattggcagacctttcatgtctccgcggtcgccgccggatgctgctacttttgttactactacttcttatgccctctgttatag

SEQ ID NO: 107892 - DNA, 585 bp, Artificial Sequence
  derived and/or modified sequence
atgggacagagggatcagggtctggacagagaacggaagggtccccaagacgaccccggaagttaccaggggcccgaacgcaggaacttcctgaaggaggatgccatgaagacaaagacccactaccacgccatgcatgccgattgcctccaggagctgcggcgatatttggagtccggcgtagtgttaagacgcactgtgcctcccatggtaaatgtgactcgtagtgaagccagcgaagggaatattaccgtcacatgccgggcatctagcttttatccccgaaacattatcctcacctggcggcaggatggagtgagtctgtcacacgacacccagcagtggggggacgtgttgccagacggtaatgggacataccagacatgggtcgcaacaaggatttgccgaggagaggaacagcgcttcacatgttatatggagcatagtgggaatcacagtacccatccagtaccttcgggaaaggtgctggttttgcaaagtcattggcagacctttcatgtatctgctgttgccgcaggctgctgttacttctgctattactattttctctgtcccttactgtag

SEQ ID NO: 107893 - DNA, 585 bp, Artificial Sequence
  derived and/or modified sequence
atgggacaaagggatcaagggttagaccgggaacggaagggaccccaggatgaccccggcagctaccaaggccccgagcggcggaactttctgaaagaagacgctatgaaaaccaagacccactaccacgcaatgcacgctgattgcctgcaggaactgcggcgttacctagagtcaggggtcgttctgcggagaactgtgcctcctatggttaacgtgacccgatccgaggcgagcgaggggaatataacagtgacgtgtcgcgcttccagcttttatccaaggaatataatactgacatggaggcaggatggagtgagcctctcccatgatactcaacagtggggcgacgtgctgcccgatggtaatgggacctatcagacatgggtcgccacaaggatctgtaggggtgaggagcaaaggttcacctgttatatggagcacagcggcaatcacagcacacaccccgttcccagcggaaaggtgctagtgttgcagtctcactggcagacttttcacgtgagcgctgttgcagccgggtgttgttacttttgttactactattttctctgtccactgttgtag

SEQ ID NO: 107894 - DNA, 585 bp, Artificial Sequence
  derived and/or modified sequence
atgggccagagggaccagggcctggaccgggagaggaagggcccccaggatgatcctggcagctaccagggccctgagaggaggaacttcctgaaggaggatgccatgaagaccaagacccactaccacgccatgcatgctgactgcctgcaggagctgcggcgctacctggagagcggcgtggtgctgcggaggacagtgccccccatggtgaatgtgaccaggtctgaggccagcgagggcaacatcaccgtgacctgccgggccagcagcttctaccccaggaacatcatcctgacctggaggcaggatggagtgtccctgagccatgacacccagcagtggggagatgtgctgcctgatggaaatggcacctaccagacctgggtggccacccgcatctgccgcggggaggagcagcgcttcacctgctacatggagcacagcggcaaccacagcacccaccctgtgcccagcggcaaggtgctggtgctgcagagccactggcagaccttccacgtgtctgctgtggccgccggctgctgctacttctgctactactacttcctgtgccccctgctgtag

SEQ ID NO: 107895 - DNA, 2070 bp, Artificial Sequence
  derived and/or modified sequence
gtatcatttcagtgaaggtcactccagtctttcatggaggccaaactaagggtgtaaattaggatcctcactgaagtggcgggaccctaagaggctttttcctggccccttagttgtgggttttcctgcgggcggcgcagccggtttccatcagaaccgcccagaggcggacgctgccttcctggggtgacggagcagcaggaagcgttttcggatcctggaatacgtgggcggcccgtgggaggggctgaggcgcagtttcctactcacccggatccgaatcctccgcggtgctgtttcaagagagccggattccagatcacgctccagcccggactcggaattcctgccctgcgggtctgcattttcataacgggcaggtgtgagtgccctgcagctggagaccagaagcctgaaggcagctcggccctccccagcccacagcgccgttattccgtttctatatcagtaaacacatttcattttccgtagaccagggcggggtgacgggtgatcccagtcctcgcagtgaattccgggcagcaaaattcaaaacacatgcggccaaggccgggcacggtggttcacgcctgtaatcccagcactttgggaggtcgaggcgggcgatcacctgaggtcgggagctcgagaccaacctgaccaacatggggaaatcccgtctctactaaaaatataaaattagacgggcttggtggtgaatgcctgtaatcccagctagtcgggaggctgaggcaggagaatcgcttaaaccttggaggcggaggttgcggtgagccgagatcgcgccattgcacttcagcctgggcaacaagagggaaaactccgtcgcaaaaactttcgggggcggagcggagccccgccctgggttatgtaagcgaccgcgctgggccgtttctctttcttttccggaccctgcagtggcgcctaaagtctgagagagggaagtcgcctctgtgctcagccccacagtcttcgttataacctcacggtgctgtcctgggatggatctgtgcagtcagggtttcttgctgaggtacatctggatggtcagcccttcctgcgctatgacaggcagaaatgcagggcaaagccccagggacagtgggcagaagatgtcctgggaaataagacatgggacagagagaccagggacttgacagggaacggaaaggacctcaggatgaccctggctcatatcaaggaccagaaagaaggaatttcttgaaggaagatgccatgaagaccaagacacactatcacgctatgcatgcagactgcctgcaggaactacggcgatatctagaatccggcgtagtcctgaggagaacagtgccccccatggtgaatgtcacccgcagcgaggcctcagagggcaacatcaccgtgacatgcagggcttccagcttctatccccggaatatcatactgacctggcgtcaggatggggtatctttgagccacgacacccagcagtggggggatgtcctgcctgatgggaatggaacctaccagacctgggtggccaccaggatttgccgaggagaggagcagaggttcacctgctacatggaacacagcgggaatcacagcactcaccctgtgccctctgggaaagtgctggtgcttcagagtcattggcagacattccatgtttctgctgttgctgctggctgctgctatttttgttattattattttctatgtccgttgttgtaagaagaaaacatcagctgcagagggtccagagctcgtgagcctgcaggtcctggatcaacacccagttgggacgagtgaccacagggatgccacacagctcggatttcagcctctgatgtcagctcttgggtccactggctccactgagggcacctagactctacagccaggcggctggaattgaattccctgcctggatctcacaagcactttccctcttggtgcctcagtttcctgacctatgaaacagagaaaataaaagcacttatttattgttgttggaggctgcaaaatgttagtagatatgaggcatttgcagctgtgccatattaa

SEQ ID NO: 107896 - DNA, 2070 bp, Artificial Sequence
  derived and/or modified sequence
gtatcatttcagtgaaggtcactccagtctttcatggaggccaaactaagggtgtaaattaggatcctcactgaagtggcgggaccctaagaggctttttcctggccccttagttgtgggttttcctgcgggcggcgcagccggtttccatcagaaccgcccagaggcggacgctgccttcctggggtgacggagcagcaggaagcgttttcggatcctggaatacgtgggcggcccgtgggaggggctgaggcgcagtttcctactcacccggatccgaatcctccgcggtgctgtttcaagaaagccggattccagatcgcgctccagcccggactcggaattcctgccctgcgggtctgcattttcataacgggcaggtgtgagtgccctgcagctggagaccagaagcctgaaggcagctcggccctccccagcccacagcgccgttattccgtttctatatcagtaaacacatttcattttccgtagaccagggcggggtgacgggtgatcccagtcctcgcagtgaattccgggcagcaaaattcaaaacacatgcggccaaggccgggcacggtggttcacgcctgtaatcccagcactttgggaggtcgaggcgggcgatcacctgaggtcgggagctcgagaccaacctgaccaacatggggaaatcccgtctctactaaaaatataaaattagacgggcttggtggtgaatgcctgtaatcccagctagtcgggaggctgaggcaggagaatcgcttaaaccttggaggcggaggttgcggtgagccgagatcgcgccattgcacttcagcctgggcaacaagagggaaaactccgtcgcaaaaactttcgggggcggagcggagccccgccctgggttatgtaagcgaccgcgctgggccgtttctctttcttttccggaccctgcagtggcgcctaaagtctgagagagggaagtcgcctctgtgctcagccccacagtcttcgttataacctcacggtgctgtcctgggatggatctgtgcagtcagggtttcttgctgaggtacatctggatggtcagcccttcctgcgctatgacaggcagaaatgcagggcaaagccccagggacagtgggcagaagatgtcctgggaaataagacatgggacagagagaccagggacttgacagggaacggaaaggacctcaggatgaccctggctcatatcaaggaccagaaagaaggaatttcttgaaggaagatgccatgaagaccaagacacactatcacgctatgcatgcagactgcctgcaggaactacggcgatatctagaatccggcgtagtcctgaggagaacagtgccccccatggtgaatgtcacccgcagcgaggcctcagagggcaacatcaccgtgacatgcagggcttccagcttctatccccggaatatcatactgacctggcgtcaggatggggtatctttgagccacgacacccagcagtggggggatgtcctgcctgatgggaatggaacctaccagacctgggtggccaccaggatttgccgaggagaggagcagaggttcacctgctacatggaacacagcgggaatcacagcactcaccctgtgccctctgggaaagtgctggtgcttcagagtcattggcagacattccatgtttctgctgttgctgctggctgctgctatttttgttattattattttctatgtccgttgttgtaagaagaaaacatcagctgcagagggtccagagctcgtgagcctgcaggtcctggatcaacacccagttgggacgagtgaccacagggatgccacacagctcggatttcagcctctgatgtcagctcttgggtccactggctccactgagggcacctagactctacagccaggcggctggaattgaattccctgcctggatctcacaagcactttccctcttggtgcctcagtttcctgacctatgaaacagagaaaataaaagcacttatttattgttgttggaggctgcaaaatgttagtagatatgaggcatttgcagctgtgccatattaa

SEQ ID NO: 107897 - DNA, 585 bp, Artificial Sequence
  derived and/or modified sequence
atgggccagcgggaccagggcctggaccgggagcggaagggcccccaagacgaccccggctcttatcagggacccgagagaaggaattttctgaaggaggatgctatgaagaccaaaacacactatcatgccatgcacgctgactgtttacaggagctccgccgatatcttgaaagcggagtggtccttagaaggactgttccccccatggtgaacgtgacccgcagcgaggcaagcgaaggaaatatcaccgtgacatgcagagcatcgagcttctacccgcgaaacataatacttacgtggcggcaggatggagtgtcactgtcacacgatacccaacagtggggcgacgttctgcctgacgggaacggtacatatcagacatgggttgcaacaagaatttgcagaggggaggaacaaaggttcacctgttatatggaacatagcggaaaccacagtacccaccccgtgccctcaggcaaggtgctcgtcctgcagtcccactggcagacattccatgtttccgcggtcgcagcagggtgttgttatttctgttattactacttcctatgtccgttactttag

SEQ ID NO: 107898 - DNA, 585 bp, Artificial Sequence
  derived and/or modified sequence
atgggccagcgggaccagggcctggaccgggagcggaagggcccccaagacgaccctgggtcgtaccaggggcccgagagacgcaacttcttaaaggaagatgccatgaaaaccaaaacacattatcatgcaatgcacgctgactgtctgcaggagctcagaaggtacctagagtccggtgtggtgctgcggagaaccgtccccccgatggtcaacgtcacaagaagtgaagctagtgagggaaacattactgtgacatgcagggccagttcattttaccctcgaaatataatactaacctggaggcaggatggggtgtctcttagtcacgatactcagcaatggggggacgtcctgcctgacggtaacggaacataccagacttgggtcgccaccaggatttgcaggggagaggagcagcgattcacctgctatatggagcattccgggaatcatagcacccacccagtcccatctggaaaggtgttggtgttgcaatcgcactggcagaccttccatgtaagcgccgttgccgccggatgctgctatttctgttattattacttcctgtgcccactgctatag

SEQ ID NO: 107899 - DNA, 585 bp, Artificial Sequence
  derived and/or modified sequence
atgggccagcgggaccagggcctggaccgggagcggaagggcccccaggacgatccgggtagttaccaagggccagaaaggaggaactttttgaaagaggatgccatgaagaccaagactcattatcacgcgatgcacgccgattgcctgcaggagttaagaaggtacctcgaaagcggagtggtgctcagacgaacggtgccgccgatggtgaatgtgaccaggagcgaagcatcagagggcaatattacagtgacgtgcagggccagctcgttctaccctagaaacatcatactaacatggcgtcaggacggtgttagtctgtcccacgacacacaacagtggggagacgtgttgccagacgggaacggcacatatcagacttgggtggcaaccaggatttgtaggggtgaggagcaacgctttacatgctatatggaacattccggaaaccactccacacaccctgttccatcaggtaaggtactcgtgttgcaatcccactggcaaacctttcatgtgtccgccgtggctgcaggatgttgctatttctgttattattactttctatgccccctgttatag

SEQ ID NO: 107900 - DNA, 585 bp, Artificial Sequence
  derived and/or modified sequence
atggggcaacgagaccagggtctggaccgggagcgtaagggcccacaggatgaccctggcagctaccagggccctgagagacgaaactttctgaaagaagatgccatgaagacaaagacccactatcatgcaatgcacgcggattgccttcaggaactgcggagatatttagagagcggagtggtgctgcgcaggacagtgcctccaatggtaaacgtgactagaagcgaggcgtccgaaggcaacatcacagttacatgtcgcgcaagctccttctaccccagaaacatcatactgacatggcgccaggacggcgtatctcttagtcacgatactcaacagtggggtgacgtactgcccgacggaaatgggacctaccaaacctgggtggccacaaggatctgcaggggtgaagagcagcgattcacatgttacatggagcattcgggaaatcacagcacacaccctgtgcccagtgggaaagtgctcgtgcttcagtcacactggcagacgttccacgtgtcagctgtggccgcaggctgttgctatttttgctactactacttcctgtgtcccctgctctag

SEQ ID NO: 107901 - DNA, 585 bp, Artificial Sequence
  derived and/or modified sequence
atgggtcagagagaccaaggactggatcgcgaaagaaaaggaccacaggacgatccgggtagctaccagggtcctgagaggcgtaattttctgaaggaagacgctatgaagacaaagacccattatcacgctatgcatgccgactgcctgcaggagcttcggaggtatctagagtcaggggtggttctgcgtagaacagtgccccctatggtcaacgtaacccgttccgaggcatccgagggaaacataaccgtcacttgtagagcttcttctttctatccccgaaatattatactgacatggaggcaggacggagtgtccctgtcccatgatacccagcagtggggggatgtccttcccgatggaaacggcacatatcagacatgggtggccactcgcatctgtaggggcgaggagcagaggttcacctgctatatggagcactccggtaaccattccacacaccctgtcccatcaggtaaagtcctcgtgctgcagagtcactggcaaaccttccacgtgtctgctgtcgccgctggctgctgctatttttgctactattatttcctctgtcctcttctgtag

SEQ ID NO: 107902 - DNA, 585 bp, Artificial Sequence
  derived and/or modified sequence
atgggccagcgagatcagggactggaccgggagcgcaaaggcccacaggacgatcctggaagttatcaggggccagagcgcagaaattttctgaaggaagacgccatgaagactaaaacccattatcatgcgatgcatgcagactgccttcaggaactcaggagataccttgaatctggcgtggtactgagaagaacggtcccacctatggtgaacgtgacacgttcagaagcgagtgagggtaatatcactgttacatgtagagcatcaagcttttatcccaggaacataattctgacatggaggcaggatggggtcagtctgagccacgacacccaacaatggggtgacgtgctcccagacggcaatggaacctatcagacatgggtcgccacgcgtatctgccgcggagaagaacagcgatttacctgttacatggagcactccgggaatcactctactcatcccgtaccttccgggaaggttctggtcctccagagtcattggcaaacattccacgtgagcgcagtcgccgctggatgctgctacttttgttattactatttcctctgtcctctgctttag

SEQ ID NO: 107903 - DNA, 585 bp, Artificial Sequence
  derived and/or modified sequence
atgggccagagagaccagggcctggacagagagagaaagggcccccaggacgaccccggcagctaccagggccccgagagaagaaacttcctgaaggaggacgccatgaagaccaagacccactaccacgccatgcacgccgactgcctgcaggagctgagaagatacctggagagcggcgtggtgctgagaagaaccgtgccccccatggtgaacgtgaccagaagcgaggccagcgagggcaacatcaccgtgacctgcagagccagcagcttctaccccagaaacatcatcctgacctggagacaggacggcgtgagcctgagccacgacacccagcagtggggcgacgtgctgcccgacggcaacggcacctaccagacctgggtggccaccagaatctgcagaggcgaggagcagagattcacctgctacatggagcacagcggcaaccacagcacccaccccgtgcccagcggcaaggtgctggtgctgcagagccactggcagaccttccacgtgagcgccgtggccgccggctgctgctacttctgctactactacttcctgtgccccctgctgtag

SEQ ID NO: 107904 - protein, 267 aa, Artificial Sequence
  derived and/or modified sequence
MGSNSEVARLLASSDPLAQIAEDKPYAELWMGTHPRGDAKILDNRISQKTLSQWIAENQDSLGSKVKDTFNGNLPFLFKVLSVETPLSIQAHPNKELAEKLHLQAPQHYPDANHKPEMAIALTPFQGLCGFRPVEEIVTFLKKVPEFQFLIGDEAATHLKQTMSHDSQAVASSLQSCFSHLMKSEKKVVVEQLNLLVKRISQQAAAGNNMEDIFGELLLQLHQQYPGDIGCFAIYFLNLLTLKPGEAMFLEANVPHAYLKGGPWLCH

SEQ ID NO: 107905 - DNA, 804 bp, Artificial Sequence
  derived and/or modified sequence
atgggaagcaattccgaggtggctagactcctcgcctcgtctgatccactggctcagatcgcagaagacaagccgtacgcagagctctggatgggtacccaccccagaggcgacgctaagatcctcgacaatagaattagccaaaaaaccctctcacagtggatcgccgaaaaccaggacagtttgggaagcaaagtgaaagatacatttaatggtaatctgccttttctgttcaaagtcctcagtgtggagacgcctttaagcattcaggcccatcctaataaagagctggccgagaagttacatttgcaggccccacagcattaccctgacgcgaaccacaaacccgagatggcgattgcactcaccccctttcaggggctgtgtgggtttcgacctgtggaggaaattgtgacctttctcaaaaaagtgcctgaatttcaatttctgatcggagatgaggccgctacccatttgaagcagacaatgagtcacgactctcaagctgttgcatcgagcctgcagtcttgtttcagccatctgatgaaatctgaaaaaaaggttgtggtggagcagctaaatctgctggtaaaacgcatttcacagcaagcggcagcgggcaataacatggaggatatcttcggcgagctgcttctgcagctacaccaacagtatcctggcgatattgggtgtttcgccatctactttctgaatctccttacccttaaacccggggaggctatgttcctggaggccaacgtacctcatgcatacctgaagggaggaccatggctgtgccactag

SEQ ID NO: 107906 - DNA, 804 bp, Artificial Sequence
  derived and/or modified sequence
atgggcagcaacagcgaggtggcccggctgctggccagcagtgaccccctggcccagattgctgaggacaagccctatgcagagctgtggatgggcacccaccccagaggagatgccaagatcctggacaaccgcatcagccagaagaccctgagccagtggattgctgagaaccaggacagcctgggcagcaaggtgaaggacaccttcaatggaaacctgcccttcctgttcaaggtgctgtctgtggagacccccctgagcatccaggcccaccccaacaaggagctggccgagaagctgcacctgcaggccccccagcactacccagatgccaaccacaagccagagatggccatcgccctgacccccttccagggcctgtgtggcttccggcctgtggaggagatcgtgaccttcctgaagaaggtgcctgagttccagttcctgattggagatgaagctgccacccacctgaagcagaccatgagccatgacagccaggccgtggccagcagcctgcagagctgcttcagccacctgatgaagtctgagaagaaggtggtggtggagcagctgaacctgctggtgaagaggatcagccagcaggccgccgccggcaacaacatggaggacatctttggagagctgctgctgcagctgcaccagcagtacccaggggacatcggctgctttgccatctacttcctgaacctgctgaccctgaagccaggagaggccatgttcctggaggccaacgtgccccacgcctacctgaagggcggcccctggctgtgccactag

SEQ ID NO: 107907 - DNA, 1587 bp, Artificial Sequence
  derived and/or modified sequence
tgcttaatcctggtgcagggggcgagcatggccgctccgcgaggtattcccactttcctgtgcggtgcagcagtatgcctgggggaagatgggttccaacagcgaagtggcgcggctgttggccagcagtgatccactggcccagatcgcagaggacaagccttatgcagagttgtggatggggactcacccccgaggggatgccaagatccttgacaaccgcatctcacagaagaccctaagccagtggattgctgagaaccaggacagcttgggctcaaaggtcaaggacacctttaatggcaacctgcccttcctcttcaaagtgctctcagttgaaacacccctgtccatccaggcacaccctaacaaggagctggcagagaagctgcacctccaggctccgcagcactaccccgatgccaaccacaagccagagatggccattgccctcacccccttccagggcttgtgtggcttccggccagttgaggagattgtaacctttctaaagaaggtgcctgagtttcagttcctgattggagatgaggcagcaacacacctgaagcagaccatgagccatgactcccaggctgtggcctcctctctgcagagctgtttctcccacctgatgaagagtgagaagaaggtggtggtggaacagctcaacctgttggtgaagcggatctcccagcaagcggctgccggaaacaacatggaggacatctttggggagcttttgctacagctgcaccagcagtacccaggtgatatcggctgctttgccatctacttcctgaacctgcttaccctgaagcctggggaggccatgtttctggaggccaacgtaccccatgcctacctgaaaggaggtccctggctctgtcactgaatacaaggtcttggcactggactctgccagcatcctcctgatggtacaggggacagtaatagccagcacacccacaacccagacaccaatccctctgcaacgtggtggcgtgctcttcattggggccaatgagagtgtctcactgaagcttactgagccgaaggacctgctgatattccgtgcctgctgtctgctgtaaaggctgcagcctccccagctctcctctgccagccaccctaaattccagccaacctcacctcctcgggcccagctcaagcccccttccttgctctggaccccttaggtataccctggaagagctggggtgggggaggagggagcgtgaaggtagtgactcctgaacacacccaggtggaaccatctttggggaggagaggcccgtgtgaggggtctgatactccctttgtcttccctctctactcctcgctacacctgagccaggctcttgccaactctgttccagcctatggctttaggctagctgttaaatatgtgacccagcattagctcagcatctgtcagagcaagagaccaggtaatttctaagaacagggttctagcgatgggactgcccatttcctcagctgcagaggaggaaagggaaagggtaggcctgtagactaacgctgtttacacccttgttctgtcaaagcaattaaagatcacttgtgttg

SEQ ID NO: 107908 - DNA, 804 bp, Artificial Sequence
  derived and/or modified sequence
atgggcagcaacagcgaggtggcccggctgctggccagcagcgacccactggcgcagatcgcagaggacaagccttacgccgaactgtggatgggaacacaccccaggggtgacgctaagatacttgacaatcgaattagccaaaaaactctgtcacagtggatcgccgagaaccaggatagcttgggttcgaaggtcaaagacacttttaatggcaatttgccattcctattcaaggtgctgagcgtggagacccccctgtccattcaggcccatccgaataaggagctcgcagaaaagctgcacttgcaggctccccagcattatccggatgcaaaccataaaccggagatggctatcgcccttacaccatttcaaggtctctgcggtttccggcccgtcgaggagattgtgaccttcttgaaaaaagtgcctgagttccagttccttatcggcgatgaggcagccacacacctgaagcaaactatgagccacgatagccaggcggttgccagcagtttgcagtcatgtttcagccacctgatgaaaagtgaaaagaaggtggttgtggagcaacttaatctccttgtgaaaaggatcagccagcaggccgccgcggggaacaacatggaggacattttcggggaactcctgcttcaactacatcagcagtatcccggggatatcggctgtttcgctatctatttcctcaacctgttgaccttgaaacctggagaggccatgttcttggaggccaacgtcccccatgcttatctcaagggcggaccttggctctgccactag

SEQ ID NO: 107909 - DNA, 804 bp, Artificial Sequence
  derived and/or modified sequence
atggggtctaactcagaagttgctcgccttctcgccagttccgaccctctggcccagatcgctgaggacaaaccatacgctgaactctggatgggtacccaccccagaggtgacgctaaaatcctggataatcgaatcagccaaaaaacactgtctcagtggattgcggagaatcaggattccctaggttcgaaggtgaaagacaccttcaatggcaaccttccgttcctgtttaaggtgctgtcggtggaaacgcctctaagcatacaagctcaccccaataaggagttggccgaaaagctgcatctccaggctcctcagcactaccctgacgccaaccacaagccagagatggctatcgccttgactccgttccaagggctctgcgggtttaggcccgtggaagagatcgtgacttttctcaagaaggtgccggagtttcagtttctgattggcgacgaggctgcaacacaccttaaacagacaatgagccacgactctcaggccgtggccagttcgcttcagtcttgcttctctcacctaatgaagagcgagaagaaagttgtggttgagcaactcaatctgctggtgaagcggattagtcaacaggccgcagccggaaataacatggaggacatttttggtgaactcttgttgcagcttcatcaacaatacccaggagatataggatgctttgcaatttattttttaaatctgctcactctgaagccgggagaggcaatgttcctcgaagcaaatgtgccacatgcctacctcaagggcggtccctggctttgccactag

SEQ ID NO: 107910 - DNA, 804 bp, Artificial Sequence
  derived and/or modified sequence
atgggcagcaacagcgaggtggccagactgctggccagcagcgaccccctggcccagatcgccgaggacaagccctacgccgagctgtggatgggcacccaccccagaggcgacgccaagatcctggacaacagaatcagccagaagaccctgagccagtggatcgccgagaaccaggacagcctgggcagcaaggtgaaggacaccttcaacggcaacctgcccttcctgttcaaggtgctgagcgtggagacccccctgagcatccaggcccaccccaacaaggagctggccgagaagctgcacctgcaggccccccagcactaccccgacgccaaccacaagcccgagatggccatcgccctgacccccttccagggcctgtgcggcttcagacccgtggaggagatcgtgaccttcctgaagaaggtgcccgagttccagttcctgatcggcgacgaggccgccacccacctgaagcagaccatgagccacgacagccaggccgtggccagcagcctgcagagctgcttcagccacctgatgaagagcgagaagaaggtggtggtggagcagctgaacctgctggtgaagagaatcagccagcaggccgccgccggcaacaacatggaggacatcttcggcgagctgctgctgcagctgcaccagcagtaccccggcgacatcggctgcttcgccatctacttcctgaacctgctgaccctgaagcccggcgaggccatgttcctggaggccaacgtgccccacgcctacctgaagggcggcccctggctgtgccactag

SEQ ID NO: 107911 - DNA, 1122 bp, Artificial Sequence
  derived and/or modified sequence
atggggacacacccacggggcgacgcaaagatcttggacaatcgaatctcccaaaagaccctcagccagtggattgcggaaaatcaggactcgttgggcagcaaagttaaggataccttcaatgggaacctgccgtttctctttaaggttctatcggttgagacgcctctctccattcaggcacatcccaacaaagagctggcggagaaacttcatttgcaggctccccagcattatcccgatgctaaccacaagccagagatggcaattgcccttacgcctttccagggcctgtgtggttttcgtcccgtggaagagatagtgacctttttaaagaaggtccccgagttccagttcctgatcggagatgaagccgctacccacctgaaacaaacgatgagccacgacagtcaggccgtggcctcatctttgcaatcatgcttctcacacctcatgaagtcagaaaaaaaagtagttgtggagcagttgaatctgcttgtcaagcgtatctcacagcaggcagccgctggaaacaatatggaagatattttcggagagttgcttctgcagctacaccagcagtatccaggagacattgggtgctttgctatctattttctgaatctgttgacccttaaacccggtgaggctatgtttctggaagctaatgtcccccacgcctatctcaaaggtgactgtgtggagtgcatggcttgtagcgacaataccgtgagagctggactgacccccaaatttattgacgtgcctactttgtgcgaaatgctcagttataccccatctagcagcaaggatcgtctgtttctgcccacgaggagccaagaagatccttatctgagtatatacgatcctcctgtccctgatttcacgatcatgaagactgaagtgcctggttcagtgacagagtacaaggttcttgctctggactccgcgagcatcctgctgatggtccagggaactgtcatcgcaagtacccccaccactcagactcccatacctctacagcggggcggagtgctcttcataggcgctaatgagtctgtctctctgaagctcacagaacctaaagacctcctcattttccgagcttgctgcttgttgtag

SEQ ID NO: 107912 - DNA, 1122 bp, Artificial Sequence
  derived and/or modified sequence
atgggcacccaccccagaggagatgccaagatcctggacaaccgcatcagccagaagaccctgagccagtggattgctgagaaccaggacagcctgggcagcaaggtgaaggacaccttcaatggaaacctgcccttcctgttcaaggtgctgtctgtggagacccccctgagcatccaggcccaccccaacaaggagctggccgagaagctgcacctgcaggccccccagcactacccagatgccaaccacaagccagagatggccatcgccctgacccccttccagggcctgtgtggcttccggcctgtggaggagatcgtgaccttcctgaagaaggtgcctgagttccagttcctgattggagatgaagctgccacccacctgaagcagaccatgagccatgacagccaggccgtggccagcagcctgcagagctgcttcagccacctgatgaagtctgagaagaaggtggtggtggagcagctgaacctgctggtgaagaggatcagccagcaggccgccgccggcaacaacatggaggacatctttggagagctgctgctgcagctgcaccagcagtacccaggggacatcggctgctttgccatctacttcctgaacctgctgaccctgaagccaggagaggccatgttcctggaggccaacgtgccccacgcctacctgaagggggactgtgtggagtgcatggcctgcagcgacaacacagtgcgggccggcctgacccccaagttcattgatgtgcccaccctgtgtgagatgctgagctacacccccagcagcagcaaggacaggctcttcctgcccaccaggagccaggaggacccctacctgagcatctatgacccccctgtgcctgacttcaccatcatgaagacagaggtgcccggctctgtgacagagtacaaggtgctggccctggacagcgccagcatcctgctgatggtgcagggcaccgtcatcgccagcacccccaccacccagacccccatccccctgcagagaggaggagtgctcttcatcggggccaatgaatctgtgtccctgaagctgacagagcccaaggacctgctgatcttccgggcctgctgcctgctgtag

SEQ ID NO: 107913 - DNA, 1122 bp, Artificial Sequence
  derived and/or modified sequence
atgggcacccacccccggggcgacgccaagatcctggacaaccggatatcgcagaagaccctgtctcagtggattgccgaaaatcaagattcactggggagcaaggtgaaggacactttcaacgggaatttgccttttttgtttaaagtcctctctgtggagacgcccctcagcatccaagctcaccccaacaaagagctcgcggaaaagctgcatcttcaggccccacaacattatcctgatgccaaccacaaaccggagatggcaatcgctcttaccccttttcagggtttatgtgggtttcggccagtggaggagatcgtaacatttctcaaaaaggtccctgagtttcagtttctgataggagatgaggccgccacccatttgaaacagacaatgagccatgatagccaggccgtcgctagctccctacagtcctgcttctcccacctgatgaagtcagagaagaaggtggtcgtcgagcagctgaacttgctggtgaagaggatttcacaacaggctgccgctggcaacaatatggaggacattttcggggaattacttttgcagttgcaccagcagtatccgggcgacataggctgcttcgctatctacttcctgaatttgctgacgctcaaacctggcgaggccatgtttttggaggctaacgtgcctcatgcctatcttaaaggtgactgtgtagaatgcatggcctgcagcgacaacaccgtgcgggcgggactcacccctaaattcatcgacgttccaacactctgcgagatgctgtcttacaccccttcatcaagcaaagatagactgtttctgccaaccagaagtcaggaagacccatatctgtccatctatgatccaccagtgccagatttcactatcatgaaaacagaggtccccgggtctgtgacggaatacaaggtgctggctctcgatagtgccagcatcctcttgatggtgcaaggcaccgttatagctagcacaccaacaacccaaaccccaatcccactgcaaaggggtggagttttgtttataggtgcaaatgaatcagtttccctaaagctgacagagcccaaagatctgcttatcttccgggcgtgttgcttgctctag

SEQ ID NO: 107914 - DNA, 1122 bp, Artificial Sequence
  derived and/or modified sequence
atgggcacacatccacgcggtgatgccaagatcctggataaccgtattagccagaagactctgtcacagtggattgcagaaaaccaagattccttgggcagcaaggtcaaagacacatttaatggtaaccttccctttttattcaaggtcctgagtgtggagacccccttgagcatacaggcccacccgaacaaggagttggctgagaagcttcacctgcaagctccccaacattatcctgatgccaaccacaagcctgaaatggccatcgccctgactccttttcaagggttgtgtggatttcggccagttgaggagatcgtaacattcctcaagaaagtgccggaatttcagtttcttatcggcgatgaggcagccacgcaccttaaacaaaccatgtctcatgacagccaggccgttgcctcatccctgcagtcttgcttcagccacttaatgaagtcagagaaaaaggtggtcgtcgaacagcttaaccttctggttaaaaggatctctcagcaagccgctgcaggcaacaatatggaagatattttcggcgagctgctgcttcaacttcatcaacaataccctggagacatcggttgttttgccatctatttcctcaacctcctcactttgaaacccggagaggccatgttcctcgaagcaaatgttcctcacgcctatcttaaaggagactgtgtggaatgcatggcctgttctgacaatactgttagggccggtttgacccctaaatttatagacgtccccacactctgtgagatgttgtcttacactccaagcagctcgaaggatcgcttgtttctcccaacaaggtctcaggaagatccgtatctgtcgatttacgacccacctgtgcccgattttaccattatgaagacagaggtcccaggttctgtcaccgagtataaggttctggccctcgatagcgcgagcatcttgctcatggttcaggggacagtgatcgcctctacccccacaacgcagaccccaattccattgcagcggggtggtgttctgttcatcggggctaatgagtccgtgagcctcaaactgaccgagcccaaggatctcttaatcttcagggcatgttgtctgctatag

SEQ ID NO: 107915 - DNA, 1122 bp, Artificial Sequence
  derived and/or modified sequence
atgggcacccaccccagaggcgacgccaagatcctggacaacagaatcagccagaagaccctgagccagtggatcgccgagaaccaggacagcctgggcagcaaggtgaaggacaccttcaacggcaacctgcccttcctgttcaaggtgctgagcgtggagacccccctgagcatccaggcccaccccaacaaggagctggccgagaagctgcacctgcaggccccccagcactaccccgacgccaaccacaagcccgagatggccatcgccctgacccccttccagggcctgtgcggcttcagacccgtggaggagatcgtgaccttcctgaagaaggtgcccgagttccagttcctgatcggcgacgaggccgccacccacctgaagcagaccatgagccacgacagccaggccgtggccagcagcctgcagagctgcttcagccacctgatgaagagcgagaagaaggtggtggtggagcagctgaacctgctggtgaagagaatcagccagcaggccgccgccggcaacaacatggaggacatcttcggcgagctgctgctgcagctgcaccagcagtaccccggcgacatcggctgcttcgccatctacttcctgaacctgctgaccctgaagcccggcgaggccatgttcctggaggccaacgtgccccacgcctacctgaagggcgactgcgtggagtgcatggcctgcagcgacaacaccgtgagagccggcctgacccccaagttcatcgacgtgcccaccctgtgcgagatgctgagctacacccccagcagcagcaaggacagactgttcctgcccaccagaagccaggaggacccctacctgagcatctacgacccccccgtgcccgacttcaccatcatgaagaccgaggtgcccggcagcgtgaccgagtacaaggtgctggccctggacagcgccagcatcctgctgatggtgcagggcaccgtgatcgccagcacccccaccacccagacccccatccccctgcagagaggcggcgtgctgttcatcggcgccaacgagagcgtgagcctgaagctgaccgagcccaaggacctgctgatcttcagagcctgctgcctgctgtag

SEQ ID NO: 107916 - protein, 362 aa, Artificial Sequence
  derived and/or modified sequence
MAAPRVFPLSCAVQQYAWGKMGSNSEVARLLASSDPLAQIAEDKPYAELWMGTHPRGDAKILDNRISQKTLSQWIAENQDSLGSKVKDTFNGNLPFLFKVLSVETPLSIQAHPNKELAEKLHLQAPQHYPDANHKPEMAIALTPFQGLCGFRPVEEIVTFLKTAAGNNMEDIFGELLLQLHQQYPGDIGCFAIYFLNLLTLKPGEAMFLEANVPHAYLKGDCVECMACSDNTVRAGLTPKFIDVPTLCEMLSYTPSSSKDRLFLPTRSQEDPYLSIYDPPVPDFTIMKTEVPGSVTEYKVLALDSASILLMVQGTVIASTPTTQTPIPLQRGGVLFIGANESVSLKLTEPKDLLIFRACCLL

SEQ ID NO: 107917 - DNA, 1089 bp, Artificial Sequence
  derived and/or modified sequence
atggccgcccccagagtctttcctctcagttgtgccgtgcagcagtatgcatggggaaagatggggtctaatagcgaagttgcaagactcttagcttcctcagatccgcttgcgcaaatcgctgaggacaaaccttatgcagagctttggatgggcacccatcccagaggagacgcaaagatcctagacaacagaatttcgcagaagactctatcacaatggattgccgagaatcaggattctctcggctccaaagtaaaagacactttcaatggaaacctgccttttctgtttaaggtattaagcgtcgagacccccttgtccatccaagcccaccctaacaaggagttggcagagaagttgcaccttcaggctccacagcactacccagatgctaatcataagcctgagatggctatcgctctaaccccattccagggactttgcgggtttcgtcctgtcgaggaaatcgtgaccttccttaaaactgccgctggtaacaacatggaagatatttttggagaattgctgctccagctgcatcagcagtacccgggggatattggatgctttgccatttacttcctcaacctcctgacgctgaagccaggtgaagcaatgttcctagaagctaacgtgccgcatgcctatctgaagggcgattgcgtcgagtgtatggcttgctctgacaacactgtccgagcaggtctcactccaaagttcatagacgtgccaaccctgtgtgaaatgctctcttacacgccgagctcgtccaaggatcgcctttttttgcccacccgcagtcaggaagatccatacctgagcatctacgatcccccggttccagacttcacaattatgaagacagaagttccagggagcgtgaccgaatacaaggtgctcgctttagactcggcttcaatcttgctcatggtgcaggggaccgtgatcgcatctacacctactacacagacacctattcctttgcaaaggggaggcgtgttgtttatcggagcaaatgaatcagtatcattgaaattaactgagcccaaagatctcctaatatttcgcgcttgctgcctgctgtag

SEQ ID NO: 107918 - DNA, 1089 bp, Artificial Sequence
  derived and/or modified sequence
atggccgcccccagggtcttccccctgagctgtgctgtgcagcagtatgcctggggcaagatgggcagcaacagcgaggtggcccggctgctggccagcagtgaccccctggcccagattgctgaggacaagccctatgcagagctgtggatgggcacccaccccagaggagatgccaagatcctggacaaccgcatcagccagaagaccctgagccagtggattgctgagaaccaggacagcctgggcagcaaggtgaaggacaccttcaatggaaacctgcccttcctgttcaaggtgctgtctgtggagacccccctgagcatccaggcccaccccaacaaggagctggccgagaagctgcacctgcaggccccccagcactacccagatgccaaccacaagccagagatggccatcgccctgacccccttccagggcctgtgtggcttccggcctgtggaggagatcgtgaccttcctgaagacagctgctggcaacaacatggaggacatctttggagagctgctgctgcagctgcaccagcagtacccaggggacatcggctgctttgccatctacttcctgaacctgctgaccctgaagccaggagaggccatgttcctggaggccaacgtgccccacgcctacctgaagggggactgtgtggagtgcatggcctgcagcgacaacacagtgcgggccggcctgacccccaagttcattgatgtgcccaccctgtgtgagatgctgagctacacccccagcagcagcaaggacaggctcttcctgcccaccaggagccaggaggacccctacctgagcatctatgacccccctgtgcctgacttcaccatcatgaagacagaggtgcccggctctgtgacagagtacaaggtgctggccctggacagcgccagcatcctgctgatggtgcagggcaccgtgattgccagcacccccaccacccagacccccatccccctgcagagaggaggagtgctcttcatcggggccaatgaatctgtgtccctgaagctgacagagcccaaggacctgctgatcttccgggcctgctgcctgctgtag

SEQ ID NO: 107919 - DNA, 1605 bp, Artificial Sequence
  derived and/or modified sequence
ctggtgcagggggcgagcatggccgctccgcgagtattcccactttcctgtgcggtgcagcagtatgcctgggggaagatgggttccaacagcgaagtggcgcggctgttggccagcagtgatccactggcccagatcgcagaggacaagccttatgcagagttgtggatggggactcacccccgaggggatgccaagatccttgacaaccgcatctcacagaagaccctaagccagtggattgctgagaaccaggacagcttgggctcaaaggtcaaggacacctttaatggcaacctgcccttcctcttcaaagtgctctcagttgaaacacccctgtccatccaggcacaccctaacaaggagctggcagagaagctgcacctccaggctccgcagcactaccccgatgccaaccacaagccagagatggccattgccctcacccccttccagggcttgtgtggcttccggccagttgaggagattgtaacctttctaaagacggctgccggaaacaacatggaggacatctttggggagcttttgctacagctgcaccagcagtacccaggtgatatcggctgctttgccatctacttcctgaacctgcttaccctgaagcctggggaggccatgtttctggaggccaacgtaccccatgcctacctgaaaggagactgcgtggagtgcatggcgtgttcagacaacacagttcgtgctggcctgacacccaagttcattgatgtgccaaccctgtgtgaaatgctcagctatacccctagctccagcaaggacaggctctttctcccaacacggagtcaggaagacccctacctctcaatctatgacccccctgtaccagacttcaccattatgaagacggaggtccctggctctgtcactgaatacaaggtcttggcactggactctgccagcatcctcctgatggtacaggggacagtaatagccagcacacccacaacccagacaccaatccctctgcaacgtggtggcgtgctcttcattggggccaatgagagtgtctcactgaagcttactgagccgaaggacctgctgatattccgtgcctgctgtctgctgtaaaggctgcagcctccccagctctcctctgccagccaccctaaattccagccaacctcacctcctcgggcccagctcaagcccccttccttgctctggaccccttaggtataccctggaagagctggggtgggggaggagggagcgtgaaggtagtgactcctgaacacacccaggtggaaccatctttggggaggagaggcccgtgtgaggggtctgatactccctttgtcttccctctctactcctcgctacacctgagccaggctcttgccaactctgttccagcctatggctttaggctagctgttaaatatgtgacccagcattagctcagcatctgtcagagcaagagaccaggtaatttctaagaacagggttctagcgatgggactgcccatttcctcagctgcagaggaggaaagggaaagggtaggcctgtagactaacgctgtttacacccttgttctgtcaaagcaattaaagatcacttgtgttgag

SEQ ID NO: 107920 - DNA, 1089 bp, Artificial Sequence
  derived and/or modified sequence
atggccgccccccgggtgttccccctgagctgcgccgtgcagcagtacgcctgggggaagatgggatccaacagtgaagtggcccgacttcttgcgagctctgatccgttagctcaaatcgccgaagataaaccatacgcagagctctggatgggtactcatccacggggtgacgcaaagattctagacaaccggatcagtcagaagaccctctcccagtggatcgccgagaatcaggactcactcgggagtaaggtgaaggacacctttaatgggaacctgccctttttgttcaaagtgctgtccgttgagacgcctctgtcgattcaggcacaccccaataaggaattagctgaaaagctgcacctgcaggctccccagcactacccagatgctaatcacaaaccagagatggccatagccctgaccccttttcagggattatgtgggtttcgacccgttgaggaaatcgtcaccttcctgaaaactgctgctggcaataatatggaggatatcttcggggaacttttactccagctgcatcagcaatacccaggggatatcgggtgctttgccatctatttcctgaatctcttgacactcaagcccggcgaggccatgttcctagaagccaacgtaccgcatgcttatctaaagggagactgtgttgagtgcatggcctgctcggacaatactgtccgtgctggtcttacacccaagttcatagatgtgccaaccctatgcgaaatgttatcctatacaccaagctcctctaaagacagattgtttctccctacacggtctcaggaggacccgtatttaagcatatacgatcctccagtgccggacttcacaattatgaagactgaagttccaggatccgttactgaatataaagtcctggctctggactctgcgtccattctccttatggtacagggtaccgtcatcgctagcacccccactacacagacaccgattcctcttcaaagaggcggagtacttttcatcggagctaatgagagtgtctcactgaaactgacagaacccaaggatttactgatcttccgtgcatgctgtctcctgtag

SEQ ID NO: 107921 - DNA, 1089 bp, Artificial Sequence
  derived and/or modified sequence
atggccgcaccaagggtgtttcccctgtcatgcgctgttcaacaatatgcctggggaaagatgggtagcaacagtgaggtggctcgtcttttagccagctccgatccactcgcccaaatcgccgaggataagccttatgctgagttgtggatggggacccacccacgcggagatgcgaagatcctggacaacaggattagtcaaaagactctgtcacaatggatcgcggaaaaccaagactcgctgggctctaaagtaaaggacacctttaacgggaacttgccgtttctctttaaagtacttagcgtggagacaccgttaagcattcaggcacacccaaataaagagctagctgaaaagctccatctacaagcccctcagcactacccggatgctaaccacaagcctgagatggcaattgccctgaccccctttcaaggactatgcggcttccggccagttgaggagatcgtaacttttttgaaaactgccgcaggcaacaacatggaggacatatttggggagctcttgctgcagttacatcagcagtaccctggtgacattggctgcttcgctatctatttcttgaacctcctaacactgaagcccggagaggccatgttcctggaggccaatgtgcctcatgcttatctgaaaggagactgcgtcgagtgcatggcatgcagcgacaacacagtgcgagccggattaaccccaaagttcatcgatgtgccgactttgtgtgaaatgctcagctacactccgagcagcagtaaggaccgtctctttctgcctactcgttcccaagaagacccatacctctctatttacgaccccccagtcccagacttcaccataatgaaaactgaggtgccagggtctgtgactgagtataaggtgttagccctcgactctgcctcaattctgctgatggtacaggggactgtcatagcatccaccccaacgactcaaactcccattcccctgcagcggggtggggttttgtttatcggagctaatgagtccgtgagtctgaaactgactgagcctaaggatctattaatcttccgggcatgttgcctgctgtag

SEQ ID NO: 107922 - DNA, 1089 bp, Artificial Sequence
  derived and/or modified sequence
atggccgcccccagagtgttccccctgagctgcgccgtgcagcagtacgcctggggcaagatgggcagcaacagcgaggtggccagactgctggccagcagcgaccccctggcccagatcgccgaggacaagccctacgccgagctgtggatgggcacccaccccagaggcgacgccaagatcctggacaacagaatcagccagaagaccctgagccagtggatcgccgagaaccaggacagcctgggcagcaaggtgaaggacaccttcaacggcaacctgcccttcctgttcaaggtgctgagcgtggagacccccctgagcatccaggcccaccccaacaaggagctggccgagaagctgcacctgcaggccccccagcactaccccgacgccaaccacaagcccgagatggccatcgccctgacccccttccagggcctgtgcggcttcagacccgtggaggagatcgtgaccttcctgaagaccgccgccggcaacaacatggaggacatcttcggcgagctgctgctgcagctgcaccagcagtaccccggcgacatcggctgcttcgccatctacttcctgaacctgctgaccctgaagcccggcgaggccatgttcctggaggccaacgtgccccacgcctacctgaagggcgactgcgtggagtgcatggcctgcagcgacaacaccgtgagagccggcctgacccccaagttcatcgacgtgcccaccctgtgcgagatgctgagctacacccccagcagcagcaaggacagactgttcctgcccaccagaagccaggaggacccctacctgagcatctacgacccccccgtgcccgacttcaccatcatgaagaccgaggtgcccggcagcgtgaccgagtacaaggtgctggccctggacagcgccagcatcctgctgatggtgcagggcaccgtgatcgccagcacccccaccacccagacccccatccccctgcagagaggcggcgtgctgttcatcggcgccaacgagagcgtgagcctgaagctgaccgagcccaaggacctgctgatcttcagagcctgctgcctgctgtag

SEQ ID NO: 107923 - protein, 276 aa, Artificial Sequence
  derived and/or modified sequence
FPFAPPGAAAEPHSLRYNLTVLSWDGSVQSGFLAEVHLDGQPFLRYDRQKCRAKPQGQWAEDVLGNKTWDRETRDLTGNGKDLRMTLAHIKDQKEVPPMVNVTRSEASEGNITVTCRASSFYPRNITLTWRQDGVSLSHDTQQWGDVLPDGNGTYQTWVATRICQGEEQRFTCYMEHSGNHSTHPVPSGKVLVLQSHWQTFHVSAVAAAAAAIFVIIIFYVRCCKKKTSAAEGPELVSLQVLDQHPVGTSDHRDATQLGFQPLMSALGSTGSTEGA

SEQ ID NO: 107924 - protein, 223 aa, Artificial Sequence
  derived and/or modified sequence
FPFAPPGAAAEPHSLRYNLTVLSWDGSVQSGFLAEVHLDGQPFLRYDRQKCRAKPQGQWAEDVLGNKTWDRETRDLTGNGKDLRMTLAHIKDQKEVPPMVNVTRSEASEGNITVTCRASSFYPRNIILTWRQDGVSLSHDTQQWGDVLPDGNGTYQTWVATRICRGEEQRFTCYMEHSGNHSTHPVPSGKVLVLQSHWQTFHVSAVAAGCCYFCYYYFLCPLL

SEQ ID NO: 107925 - protein, 274 aa, Artificial Sequence
  derived and/or modified sequence
FPFAPPGAAAEPHSLRYNLTVLSWDGSVQSGFLTEVHLDGQPFLRCDRQKCRAKPQGQWAEDVLGNKTWDRETRDLTGNGKDLRMTLAHIKDQKEVPPMVNVTRSEASEGNITVTCRASGFYPWNITLSWRQDGVSLSHDTQQWGDVLPDGNGTYQTWVATRICQGEEQRFTCYMEHSGNHSTHPVPSGKVLVLQSHWQTFHVSAVAAAAIFVIIIFYVRCCKKKTSAAEGPELVSLQVLDQHPVGTSDHRDATQLGFQPLMSDLGSTGSTEGA

SEQ ID NO: 107926 - protein, 340 aa, Artificial Sequence
  derived and/or modified sequence
MGLGRVLLFLAVAFPFAPPAAAAEPHSLRYNLMVLSQDGSVQSGFLAEGHLDGQPFLRYDRQKRRAKPQGQWAENVLGAKTWDTETEDLTENGQDLRRTLTHIKDQKGVPQSSRAQTLAMNVTNFWKEDAMKTKTHYRAMQADCLQKLQRYLKSGVAIRRTVPPMVNVTCSEVSEGNITVTCRASSFYPRNITLTWRQDGVSLSHNTQQWGDVLPDGNGTYQTWVATRIRQGEEQRFTCYMEHSGNHGTHPVPSGKALVLQSQRTDFPYVSAAMPCFVIIIILCVPCCKKKTSAAEGPELVSLQVLDQHPVGTGDHRDAAQLGFQPLMSATGSTGSTEGT

SEQ ID NO: 107927 - protein, 340 aa, Artificial Sequence
  derived and/or modified sequence
MGLGRVLLFLAVAFPFAPPAAAAEPHSLRYNLMVLSQDGSVQSGFLAEGHLDGQPFLRYDRQKRRAKPQGQWAEDVLGAKTWDTETEDLTENGQDLRRTLTHIKDQKGVPQSSRAQTLAMNVTNFWKEDAMKTKTHYRAMQADCLQKLQRYLKSGVAIRRTVPPMVNVTCSEVSEGNITVTCRASSFYPRNITLTWRQDGVSLSHNTQQWGDVLPDGNGTYQTWVATRIRQGEEQRFTCYMEHSGNHGTHPVPSGKALVLQSQRTDFPYVSAAMPCFVIIIILCVPCCKKKTSAAEGPELVSLQVLDQHPVGTGDHRDAAQLGFQPLMSATGSTGSTEGA

SEQ ID NO: 107928 - protein, 340 aa, Artificial Sequence
  derived and/or modified sequence
MGLGRVLLFLAVAFPFAPPAAAAEPHSLRYNLMVLSQDGSVQSGFLAEGHLDGQPFLRYDRQKRRAKPQGQWAEDVLGAETWDTETEDLTENGQDLRRTLTHIKDQKGVPQSSRAQTLAMNVTNFWKEDAMKTKTHYRAMQADCLQKLQRYLKSGVAIRRTVPPMVNVTCSEVSEGNITVTCRASSFYPRNITLTWRQDGVSLSHNTQQWGDVLPDGNGTYQTWVATRIRQGEEQRFTCYMEHSGNHGTHPVPSGKALVLQSQRTDFPYVSAAMPCFVIIIILCVPCCKKKTSAAEGPELVSLQVLDQHPVGTGDHRDAAQLGFQPLMSATGSTGSTEGA

SEQ ID NO: 107929 - protein, 340 aa, Artificial Sequence
  derived and/or modified sequence
MGLGRVLLFLAVAFPFAPPAAAAEPHSLRYNLMVLSQDGSVQSGFLAEGHLDGQPFLRYDRQKRRAKPQGQWAEDVLGAKTWDTETEDLTENGQDLRRTLTHIKDQKGVPQSSRAQTLAMNVTNFWKEDAMKTKTHYRAMQADCLQKLQRYLKSGVAIRRTVPPMVNVICSEVSEGNITVTCRASSFYPRNITLTWRQDGVSLSHNTQQWGDVLPDGNGTYQTWVATRIRQGEEQRFTCYMEHSGNHGTHPVPSGKALVLQSQRTDFPYVSAAMPCFVIIIILCVPCCKKKTSAAEGPELVSLQVLDQHPVGTGDHRDAAQLGFQPLMSATGSTGSTEGT

SEQ ID NO: 107930 - protein, 317 aa, Artificial Sequence
  derived and/or modified sequence
  misc_feature (1)..(1): Xaa can be any naturally occurring amino acid
XPHSLRYNLMVLSQDGSVQSGFLAEGHLDGQPFLRYDRQKRRAKPQGQWAEDVLGAKTWDTETEDLTENGQDLRRTLTHIKDQKGVPQSSRAQTLAMNVTNFWKEDAMKTKTHYRAMQADCLQKLQRYLKSGVAIRRTVPPMVNVTCSEVSEGNITVTCRASSFYPRNITLTWRQDGVSLSHNTQQWGDVLPDGNGTYQTWVATRIRQGEEQRFTCYMEHSGNHGTHPVPSGKALVLQSQRTDFPYVSAAMPCFVIIIILCVPCCKKKTSAAEGPELVSLQVLDQHPVGTGDHRDAAQLGFQPLMSATGSTGSTEGA

SEQ ID NO: 107931 - DNA, 831 bp, Artificial Sequence
  derived and/or modified sequence
ttcccttttgctccacccggagccgctgcggagccccactccctgaggtataatctgaccgtcctgagttgggacggctctgtccagtcagggtttcttgcagaggtccacttggacggtcaaccgtttttgagatatgacaggcagaaatgtagagctaaaccccaagggcagtgggccgaggatgtgctcggcaacaaaacatgggatcgcgaaacacgcgatctaaccggaaatgggaaggatctccgaatgaccctcgctcatatcaaggatcaaaaggaagtacctcctatggttaacgtgactcggtctgaggcctccgagggcaacatcacggtcacatgcagggctagtagcttctacccacgcaacattactttgacatggcgacaggatggggtgagtcttagccacgacacacaacagtggggagatgtccttcccgatggtaacggcacatatcagacatgggtagccacacgcatctgtcagggagaggaacagcggttcacctgctacatggagcactctgggaaccatagcactcaccctgtgccgtcgggcaaggttctggtgttgcaatctcactggcagacttttcacgtgtcagcagtggccgccgccgctgccgcaatcttcgtcattattattttctacgtgaggtgttgtaagaaaaagacctctgcagccgaaggacccgagttggtttctttacaggtgcttgatcagcaccccgttggcacttctgatcacagagacgcaacccagttgggattccagccactgatgtctgcactaggatcaacgggcagtaccgagggtgcatag

SEQ ID NO: 107932 - DNA, 672 bp, Artificial Sequence
  derived and/or modified sequence
ttccctttcgccccgccaggggcagccgcagaaccccactccctccgctacaacctaacagtcctgtcctgggatggctccgtgcaatctggctttttagccgaagtccacctagatggacagccttttctgcgctacgataggcagaaatgtcgagctaagccacaaggccagtgggccgaggacgtactaggaaacaagacatgggatagggaaacacgtgatctgaccggaaacggaaaggatctcaggatgactctagctcacatcaaggaccagaaggaagtgccgcccatggttaacgtcacccggtctgaggcgtccgagggtaatatcactgtgacctgccgcgcgagctccttttatccccggaacatcatcctgacctggcgccaggacggtgtgagcttgtctcatgatacacaacagtggggagacgtgctacccgatggtaatggcacataccagacatgggtggctacacgcatttgcaggggagaagagcagaggtttacttgttacatggaacactccggcaaccactccactcaccccgtgccatcggggaaggtgcttgtacttcagtcacattggcagactttccacgtctccgcggttgcagctgggtgctgctatttctgttactattacttcctttgcccccttctgtag

SEQ ID NO: 107933 - DNA, 672 bp, Artificial Sequence
  derived and/or modified sequence
ttcccatttgctccacccggtgccgctgcagaaccccattccttacgatacaacttgaccgtcctgtcatgggacggatcagtgcaatccggctttctcgcagaggtgcacctagacgggcaaccattcctgcgctatgaccgtcagaagtgcagagctaagccacaggggcaatgggcagaagatgtactcgggaacaagacatgggaccgagaaactcgggacctgacagggaacggcaaagacttgaggatgacgctcgctcatattaaagatcaaaaggaggtccctcccatggttaacgtgacacggtctgaagcttccgagggaaacatcaccgtcacttgtagggcgtccagcttttatccccgcaatattattttgacctggagacaagatggtgtgtccctttcacatgacacacagcagtggggggatgttcttccagacggcaacggaacatatcaaacgtgggtagctacccggatatgccgaggcgaggagcagcggtttacatgctatatggaacatagcggaaatcacagcactcatcccgtgccaagcggcaaagtgttagtgctccaaagccattggcagacctttcatgtatcagccgtggccgctggatgctgttacttctgctactactactttctttgcccccttctgtag

SEQ ID NO: 107934 - DNA, 672 bp, Artificial Sequence
  derived and/or modified sequence
tttccattcgcacctcctggcgctgccgccgaaccccattccttgcgatacaatctcacggtgctctcctgggacgggagcgtgcagagcggttttttagccgaagtccacttggatggtcaaccctttcttagatacgatcgccagaagtgtcgcgctaaacctcaaggccaatgggctgaagatgtactcggcaacaaaacttgggacagggagactcgggacctaacgggaaacgggaaggacctacggatgaccctcgcccatatcaaggaccaaaaagaggttcctcctatggtgaatgttacccggtccgaggcatccgaaggcaatatcacagttacatgtagggcctcatcattctacccacgcaatatcattctgacctggcggcaggacggagtgtccctatcacacgacacacagcagtggggagacgtgctcccagacgggaatgggacctaccagacatgggtggctacccgcatctgcaggggggaggagcaacggttcacctgttatatggaacacagtggaaatcattctactcatcccgtgcctagcggaaaggtcctggttcttcagagtcactggcagacgtttcacgttagcgctgtcgcagctggttgttgctatttctgttattattatttcctctgtccactgctctag

SEQ ID NO: 107935 - DNA, 825 bp, Artificial Sequence
  derived and/or modified sequence
ttcccttttgccccgcctggggccgcggccgagccacatagccttagatacaacctcactgtactgagttgggatggcagcgttcagtctggatttttaactgaggtacatttggacgggcagccgttcttgaggtgcgatcggcaaaagtgcagggcgaagcctcagggccaatgggccgaagacgttctcggcaacaagacttgggaccgggaaactagagatctcactggcaatgggaaggacctgaggatgacgttggctcatattaaagatcagaaggaagtccctcctatggtcaacgtaactcggtctgaggcctctgagggaaacattacagttacatgcagggcatctggcttttacccgtggaatatcaccttgagctggaggcaggacggcgtttccctgagccacgatacacagcaatggggggacgtccttcccgacgggaacggcacctaccagacttgggtggcaactagaatttgccaaggggaagaacagcgattcacgtgttatatggagcatagtgggaaccactctacacatcccgttccctctggcaaagtgctggtcttgcagagtcactggcagacttttcacgtatcagccgtggccgccgcggccatcttcgtgattatcattttttacgtcaggtgttgcaaaaagaagacatctgcggccgaggggcccgagctagtcagcctgcaagtgctggaccagcatccggtcggaacaagcgaccatcgggacgcaacacagctgggcttccagcccctgatgagcgacctggggagcaccggctctaccgaaggagcatag

SEQ ID NO: 107936 - DNA, 1023 bp, Artificial Sequence
  derived and/or modified sequence
atgggtctcggaagagtgctcttattccttgctgttgctttccctttcgctcccccggcagcggctgccgagcctcatagtctgcgttacaatttaatggtgctctctcaggacggttctgtccagagtggctttctcgccgagggccatctagatggccagccgtttctgcgttatgatcggcagaagaggagggccaagccgcagggacagtgggccgagaacgtgctgggtgccaagacttgggacaccgaaaccgaggacctcacagagaacggccaggatctccgccggaccttgacacacatcaaggatcagaaaggagttcctcagtctagtcgggctcagaccctagcaatgaatgtgacaaacttctggaaggaagacgccatgaagacaaagactcattaccgggccatgcaggcggattgcttgcagaagctgcaacggtacttaaaatccggtgtagccatccgccggactgtgcctcccatggtgaatgtaacctgctccgaggtgtcagagggaaatatcacagtgacttgtagggcatcaagcttctaccccagaaacatcacactgacctggaggcaggacggagtcagtctttcacacaacactcagcaatggggggatgtcctcccagatggtaacggtacttaccagacatgggtggcaacaagaattagacaaggggaagaacagcggttcacctgctacatggaacacagtggcaaccacggaacgcaccccgtgccctctgggaaagcattggtgttacagagccagagaacagactttccatacgtatcagctgcgatgccgtgtttcgttattatcatcatcttatgtgtcccatgttgtaagaagaaaactagcgcagccgaaggtccagaactcgttagcctccaagtcctcgaccagcacccagtgggcaccggagatcacagggatgctgcacagctgggatttcagcctctgatgtcagccactggatccacggggtccacggaagggacctag

SEQ ID NO: 107937 - DNA, 1023 bp, Artificial Sequence
  derived and/or modified sequence
atgggactgggccgggttctgctcttcctagccgtcgccttcccgtttgcacctccagctgctgccgcagagcctcactctctcagatacaatctgatggttctgtcccaggatgggtcagtccagtctggattcctggcggaggggcacctggatggtcagccttttctgagatacgacaggcagaagcgaagggccaagccccagggccagtgggctgaggatgttctcggagctaagacttgggatacagagacagaggatttgactgaaaacggtcaagacctgagacgtacgctgacccacattaaagaccagaagggagtccctcagtcgtctagagctcagaccctcgcaatgaacgtaacaaatttctggaaagaggatgcaatgaaaacaaagactcactaccgggccatgcaggccgactgtctgcagaaactccagcgatacttgaagagcggagtcgcaattcgccgtactgtaccccctatggtgaatgtaacctgttccgaagtctcggaagggaatattaccgtgacatgccgggcttcttctttttaccctcgaaacattacattaacatggcgccaggatggggtgagtctgtcgcataatacccagcagtggggggacgtcctgcctgacggcaacggaacctaccagacctgggtagcaactaggatcagacagggggaggagcagcgcttcacctgttacatggaacactccggaaaccatggtacacaccctgtgccttctggcaaagcacttgtcttgcaaagtcaaaggaccgattttccctacgtttcagctgctatgccatgtttcgtgatcattatcatcctgtgtgtgccctgttgtaagaagaagaccagcgccgccgagggtcctgagctggtgagcctacaggtcctggatcagcatcccgttgggaccggagatcatagggacgcagcacagctgggttttcagcctcttatgtcagctaccggttctaccgggtccacagagggtgcctag

SEQ ID NO: 107938 - DNA, 1023 bp, Artificial Sequence
  derived and/or modified sequence
atggggcttgggagggtgcttctctttcttgctgtcgctttcccctttgctccgccggccgcagcggcagaaccacactctctgcgctacaatctgatggtgctctcacaagacggttccgtacagtcagggttcctggctgaaggacacctggacggtcaaccttttcttcggtatgatagacagaaacggcgcgctaagccacagggccagtgggctgaggatgtgttgggcgcagagacctgggatactgagacagaggacttaacagagaacggtcaggatctgcgaaggactttgactcacatcaaggaccaaaaaggcgtaccacagtccagccgtgctcagacattagctatgaacgtaacgaacttttggaaagaagacgcaatgaagactaagacccactaccgagcaatgcaggctgattgcctccagaaacttcagcgctacttgaaaagtggagtggcaatcagacgcacagtgcccccaatggtcaatgtgacatgctcagaggtgagcgagggaaacattaccgtgacttgcagagcgagttcgttctacccaagaaacataactctcacctggaggcaggatggggtatctctctcacacaacacccagcagtggggcgacgtcctccccgacggcaacggaacctaccaaacatgggttgctacccggataaggcagggcgaggagcagagattcacatgctacatggaacacagcgggaatcacggtacacatcctgtaccctctggcaaagctctcgtgctgcagagccagaggaccgattttccgtatgtttcggccgcgatgccttgttttgtcataatcataatcctgtgcgtcccctgttgcaaaaagaaaacctcggcggccgagggacctgagttggtgtcactccaggtgctcgaccagcacccagtcggaacaggggatcacagggatgccgcccagctaggctttcagccgctgatgagtgcaacaggcagtaccggtagcaccgaaggcgcttag

SEQ ID NO: 107939 - DNA, 1023 bp, Artificial Sequence
  derived and/or modified sequence
atgggactgggtagagtgctgctattcctggctgtcgcctttcccttcgcccctcctgcggccgccgcagaacctcattcactaagatacaatttaatggttctctcacaggacggtagcgtgcagagcggatttctagccgaaggccacctagatggtcagccttttctcagatacgataggcaaaaacgccgtgctaaaccccagggccaatgggctgaggatgttttaggagcaaaaacctgggacacagagacagaagatttgacagagaacggacaggatctaagaaggactctgacacacattaaagaccagaaaggcgtgccccagtctagtagagctcagaccctcgcgatgaacgtgaccaatttctggaaggaagacgctatgaaaaccaagacacactatcgggctatgcaggccgactgcctgcagaagctacaacgatacctgaaatctggtgttgcaattaggagaacagtaccacctatggtgaatgtcatctgctccgaggtgagcgagggaaatattactgtcacctgccgcgcctcttccttttacccgcgcaacatcacactaacgtggaggcaagacggggtgtcactttcacacaacacccagcagtggggtgatgtactcccagacgggaacggcacataccagacatgggtggctacacgtattcggcagggggaggagcagaggtttacatgctatatggagcactctggcaaccacggtacccaccctgtaccctctggtaaagctttggtgctccaatcgcagcgcacagatttcccttacgtctcagctgccatgccttgtttcgtgattataatcatcttatgtgtcccctgttgcaagaagaagacttctgcggctgaggggcccgagctggtgtccctgcaggtcctagatcagcaccccgtgggaacaggtgaccaccgggatgccgcacagttgggattccaacccctcatgagtgctaccggcagcacgggcagtaccgagggcacatag

SEQ ID NO: 107940 - DNA, 1023 bp, Artificial Sequence
  derived and/or modified sequence
atgggtctgggccgcgtgctcctttttctggcggtggcctttcccttcgcacccccggctgccgccgccgagccacactccttacgatataacctcatggtgctgtcgcaagacgggagcgtgcagagcgggtttctggctgaggggcacctggacggccagccatttctgcgttacgatcgacagaagcggagggccaagccccagggccaatgggccgaagatgtgctgggcgccgaaacgtgggataccgagactgaagacctaaccgaaaacggccaggatctcagacgcactctcacccacattaaagaccagaaaggcgtgcctcagtcaagtagggcccagacattagccatgaatgttactaacttttggaaagaggatgcaatgaaaacgaagacccattatagagctatgcaggccgattgtttgcagaaactgcaaaggtacctgaaatctggagtggccatacgtcgcaccgtgccacccatggtaaatgtcacctgttcagaggtctccgaaggcaatatcaccgtgacctgtcgcgctagtagcttctatccgcgaaatattaccctcacttggagacaggatggagtgtctttgtcccacaatacgcaacagtggggtgatgttttaccggatggaaacggcacataccagacctgggtggcaacgcggatccgacagggtgaggaacaaagatttacctgctatatggagcactctgggaaccacggcacccaccctgtccccagtggtaaggccctggttctgcagtcccagcgcaccgatttcccctacgtgagtgcagccatgccctgtttcgtcataatcataattttgtgtgtgccttgttgcaagaagaaaactagcgccgccgagggaccggagctggtgagtctgcaggtgcttgatcaacacccagttggcacgggcgaccaccgcgacgcagcccaacttgggttccagcctctgatgagtgcaaccggcagcactggcagcacagagggcgcctag

SEQ ID NO: 107941 - DNA, 1023 bp, Artificial Sequence
  derived and/or modified sequence
atggggctcggccgtgtcctactttttctggccgtggcattccctttcgcccccccggccgctgccgccgaaccacactcactccgctacaatttaatggtgttgagccaggatggctctgttcagagcggttttttagccgaaggacacctcgatgggcagcccttcctgcgttacgaccgacagaaacgccgcgcgaagccccagggtcagtgggccgaaaacgtcttgggtgccaagacttgggacacagagactgaagacctgactgagaatggccaggacttgcggcggaccctgacacatattaaagatcagaaaggcgtccctcaatctagtagagctcaaaccttggccatgaacgtcaccaacttttggaaagaggatgcaatgaagactaagactcactatagagcgatgcaggccgattgtctgcagaaactccagagataccttaagtccggcgttgctatccggcggacggtgcccccaatggttaatgttacctgtagcgaggtctccgaaggaaacatcacagtgacgtgccgtgcctccagtttctacccaagaaatataactctgacatggcgccaagatggtgtaagcttgagtcataacactcaacaatggggcgacgtccttcctgatggtaatggaacctatcagacatgggtagccacccggatccggcagggcgaagagcagaggtttacatgctacatggaacatagtggtaaccacggtacacatcctgtgccaagcggtaaagcactcgttttgcagagccagcggactgattttccttacgtgagcgcagccatgccttgttttgtcatcattatcattctctgcgttccttgctgcaaaaaaaagacatcagcggccgaaggtcccgaattggttagcttgcaggtgctggaccagcatcctgttggaaccggagaccaccgcgatgccgcccagctcggctttcagccactgatgtcagcgacagggagtaccggaagcaccgaaggaacgtag

SEQ ID NO: 107942 - DNA, 1023 bp, Artificial Sequence
  derived and/or modified sequence
atgggcctggggcgagtgctcctctttcttgctgtcgcatttcctttcgctcctccggctgcagctgcggaaccacatagcctgcggtataatctaatggtgttatcccaagatggctcagtgcagtctggatttttggcagagggccatctggacggccaaccatttctgaggtacgacaggcagaaacgaagggctaagccccagggccaatgggctgaggacgtcctgggtgcgaaaacatgggataccgaaactgaggatctgacagaaaacggacaagacctacgacgcactcttacgcatatcaaagaccagaaaggggttccccaaagtagtagggcacagacgctggccatgaatgtcaccaatttctggaaggaggatgctatgaagacaaaaacccattaccgagctatgcaagcggactgcctacagaaactccagcgttatctgaagagtggcgtggcgatccggcgcactgttccccccatggtgaacgtcacgtgttcggaggtctcggaggggaatatcacagttacttgccgtgccagcagtttctatcctaggaatatcaccctaacttggagacaggatggagtgtctttatctcacaatacacagcagtggggagatgtattacccgatggtaatggtacctaccagacctgggtggctacccggatccgccagggcgaagagcaacgtttcacctgttatatggagcatagtggcaatcacggtactcatcctgtgccttctggaaaggctctggttctccaatctcaacgcaccgattttccctacgtttctgctgccatgccctgctttgtcataattatcattctctgcgtgccatgttgcaagaagaagacgtccgccgctgagggccctgagctggtgagtctccaggtgcttgatcaacacccggtaggtaccggggatcaccgggacgcagctcagctaggctttcagcccctgatgagtgcaacaggttcaactggatctactgaaggggcatag

SEQ ID NO: 107943 - DNA, 954 bp, Artificial Sequence
  derived and/or modified sequence
taaccacactcacttcggtacaacctcatggtgctgtcgcaggacgggtccgtgcagagcgggtttctcgccgaaggacacctggatgggcagccctttctgcggtacgatcgacaaaagagacgggccaaaccccaaggacagtgggcagaggacgtcctgggagctaagacttgggacaccgaaacggaagaccttacagagaatgggcaggacctcaggagaacgctaacccacataaaagaccaaaaaggggtgccacagtccagcagggcacagacgctcgccatgaacgtcacgaatttttggaaagaggacgcgatgaaaacgaaaacacattaccgagcaatgcaggctgactgcctgcaaaagttgcagcggtacctcaagtctggcgttgcaatcagacgtacggttcctcccatggtaaacgtgacctgttctgaagtctccgagggtaatatcacagtcacttgcagggccagctcattttatccgaggaatataaccttgacctggcgtcaagacggagtgtccctgtctcataacacacagcagtggggggacgtgctgccggacggcaatggaacatatcagacttgggtagctacaagaattagacaaggggaggaacagagatttacctgttatatggagcactctggtaatcatggaactcacccagtcccatcaggcaaggccctagttctgcagtcgcaaagaaccgatttcccttatgtgtctgcagccatgccctgtttcgtgatcattattattctgtgcgttccttgctgcaaaaagaaaacatccgccgctgaaggccctgaactggtctcgctccaggtcctggatcagcaccccgtgggaacaggagatcatcgagatgcagcgcagctggggttccagccactgatgtcagcaacagggtctaccgggagcaccgagggagcttag

SEQ ID NO: 107944 - DNA, 831 bp, Artificial Sequence
  derived and/or modified sequence
ttcccctttgcccctcctggagctgctgctgagccccacagcctgcgctacaacctgactgtgctgtcctgggatggctctgtgcagagcggcttcctggccgaggtgcacctggatggccagcccttcctgcgctatgaccggcagaagtgccgggccaagccccagggccagtgggccgaggatgtgctgggcaacaagacctgggaccgggagacccgggacctgactggaaatggcaaggacctgaggatgaccctggcccacatcaaggaccagaaggaggtgccccccatggtgaatgtgaccaggtctgaggccagcgagggcaacatcaccgtgacctgccgggccagcagcttctaccccaggaacatcaccctgacctggaggcaggatggagtgtccctgagccatgacacccagcagtggggagatgtgctgcctgatggaaatggcacctaccagacctgggtggccacccgcatctgccagggcgaggagcagcgcttcacctgctacatggagcacagcggcaaccacagcacccaccctgtgcccagcggcaaggtgctggtgctgcagagccactggcagaccttccacgtgtctgctgtggccgctgctgctgctgccatcttcgtcatcatcatcttctacgtgcgctgctgcaagaagaagaccagcgctgctgagggccctgagctggtgtccctgcaggtgctggaccagcaccctgtgggcaccagtgaccacagagatgccacccagctgggcttccagcccctgatgtctgccctgggcagcacaggcagcacagaaggagcctag

SEQ ID NO: 107945 - DNA, 672 bp, Artificial Sequence
  derived and/or modified sequence
ttcccctttgcccctcctggagctgctgctgagccccacagcctgcgctacaacctgactgtgctgtcctgggatggctctgtgcagagcggcttcctggccgaggtgcacctggatggccagcccttcctgcgctatgaccggcagaagtgccgggccaagccccagggccagtgggccgaggatgtgctgggcaacaagacctgggaccgggagacccgggacctgactggaaatggcaaggacctgaggatgaccctggcccacatcaaggaccagaaggaggtgccccccatggtgaatgtgaccaggtctgaggccagcgagggcaacatcaccgtgacctgccgggccagcagcttctaccccaggaacatcatcctgacctggaggcaggatggagtgtccctgagccatgacacccagcagtggggagatgtgctgcctgatggaaatggcacctaccagacctgggtggccacccgcatctgccgcggggaggagcagcgcttcacctgctacatggagcacagcggcaaccacagcacccaccctgtgcccagcggcaaggtgctggtgctgcagagccactggcagaccttccacgtgtctgctgtggccgccggctgctgctacttctgctactactacttcctgtgccccctgctgtag

SEQ ID NO: 107946 - DNA, 825 bp, Artificial Sequence
  derived and/or modified sequence
ttcccctttgcccctcctggagctgctgctgagccccacagcctgcgctacaacctgactgtgctgtcctgggatggctctgtgcagagcggcttcctgacagaggtgcacctggatggccagcccttcctgcgctgtgaccggcagaagtgccgggccaagccccagggccagtgggccgaggatgtgctgggcaacaagacctgggaccgggagacccgggacctgactggaaatggcaaggacctgaggatgaccctggcccacatcaaggaccagaaggaggtgccccccatggtgaatgtgaccaggtctgaggccagcgagggcaacatcaccgtgacctgccgggccagcggcttctacccctggaacatcaccctgtcctggaggcaggatggagtgtccctgagccatgacacccagcagtggggagatgtgctgcctgatggaaatggcacctaccagacctgggtggccacccgcatctgccagggcgaggagcagcgcttcacctgctacatggagcacagcggcaaccacagcacccaccctgtgcccagcggcaaggtgctggtgctgcagagccactggcagaccttccacgtgtctgctgtggccgctgctgccatcttcgtcatcatcatcttctacgtgcgctgctgcaagaagaagaccagcgctgctgagggccctgagctggtgtccctgcaggtgctggaccagcaccctgtgggcaccagtgaccacagagatgccacccagctgggcttccagcccctgatgtctgacctgggcagcacaggcagcacagaaggagcctag

SEQ ID NO: 107947 - DNA, 1023 bp, Artificial Sequence
  derived and/or modified sequence
atgggcctgggccgggtgctgctcttcctggccgtggccttcccctttgcccccccagctgctgctgctgagccccacagcctgcgctacaacctgatggtgctgagccaggacggctctgtgcagagcggcttcctggccgagggccacctggatggccagcccttcctgcgctatgaccggcagaagaggcgggccaagccccagggccagtgggccgagaatgtgctgggcgccaagacctgggacacagaaacagaggacctgacagaaaatggccaggacctgcggaggaccctgacccacatcaaggaccagaagggcgtgccccagagcagccgggcccagaccctggccatgaatgtgaccaacttctggaaggaggatgccatgaagaccaagacccactaccgggccatgcaggccgactgcctgcagaagctgcagcgctacctgaagagcggcgtggccatcagaagaacagtgccccccatggtgaatgtgacctgcagcgaggtgtctgagggcaacatcaccgtgacctgccgggccagcagcttctaccccaggaacatcaccctgacctggaggcaggatggagtgtccctgagccacaacacccagcagtggggagatgtgctgcctgatggaaatggcacctaccagacctgggtggccacccgcatccggcagggcgaggagcagcgcttcacctgctacatggagcacagcggcaaccacggcacccaccctgtgcccagcggcaaggccctggtgctgcagagccagaggacagacttcccctacgtgtctgctgccatgccctgctttgtgatcatcatcatcctgtgtgtgccctgctgcaagaagaagaccagcgctgctgagggccctgagctggtgtccctgcaggtgctggaccagcaccctgtgggcactggagaccacagagatgctgcccagctgggcttccagcccctgatgtctgccaccggcagcacaggcagcacagagggcacctag

SEQ ID NO: 107948 - DNA, 1023 bp, Artificial Sequence
  derived and/or modified sequence
atgggcctgggccgggtgctgctcttcctggccgtggccttcccctttgcccccccagctgctgctgctgagccccacagcctgcgctacaacctgatggtgctgagccaggacggctctgtgcagagcggcttcctggccgagggccacctggatggccagcccttcctgcgctatgaccggcagaagaggcgggccaagccccagggccagtgggccgaggatgtgctgggcgccaagacctgggacacagaaacagaggacctgacagaaaatggccaggacctgcggaggaccctgacccacatcaaggaccagaagggcgtgccccagagcagccgggcccagaccctggccatgaatgtgaccaacttctggaaggaggatgccatgaagaccaagacccactaccgggccatgcaggccgactgcctgcagaagctgcagcgctacctgaagagcggcgtggccatcagaagaacagtgccccccatggtgaatgtgacctgcagcgaggtgtctgagggcaacatcaccgtgacctgccgggccagcagcttctaccccaggaacatcaccctgacctggaggcaggatggagtgtccctgagccacaacacccagcagtggggagatgtgctgcctgatggaaatggcacctaccagacctgggtggccacccgcatccggcagggcgaggagcagcgcttcacctgctacatggagcacagcggcaaccacggcacccaccctgtgcccagcggcaaggccctggtgctgcagagccagaggacagacttcccctacgtgtctgctgccatgccctgctttgtgatcatcatcatcctgtgtgtgccctgctgcaagaagaagaccagcgctgctgagggccctgagctggtgtccctgcaggtgctggaccagcaccctgtgggcactggagaccacagagatgctgcccagctgggcttccagcccctgatgtctgccaccggcagcacaggcagcacagaaggagcctag

SEQ ID NO: 107949 - DNA, 1023 bp, Artificial Sequence
  derived and/or modified sequence
atgggcctgggccgggtgctgctcttcctggccgtggccttcccctttgcccccccagctgctgctgctgagccccacagcctgcgctacaacctgatggtgctgagccaggacggctctgtgcagagcggcttcctggccgagggccacctggatggccagcccttcctgcgctatgaccggcagaagaggcgggccaagccccagggccagtgggccgaggatgtgctgggcgctgagacctgggacacagaaacagaggacctgacagaaaatggccaggacctgcggaggaccctgacccacatcaaggaccagaagggcgtgccccagagcagccgggcccagaccctggccatgaatgtgaccaacttctggaaggaggatgccatgaagaccaagacccactaccgggccatgcaggccgactgcctgcagaagctgcagcgctacctgaagagcggcgtggccatcagaagaacagtgccccccatggtgaatgtgacctgcagcgaggtgtctgagggcaacatcaccgtgacctgccgggccagcagcttctaccccaggaacatcaccctgacctggaggcaggatggagtgtccctgagccacaacacccagcagtggggagatgtgctgcctgatggaaatggcacctaccagacctgggtggccacccgcatccggcagggcgaggagcagcgcttcacctgctacatggagcacagcggcaaccacggcacccaccctgtgcccagcggcaaggccctggtgctgcagagccagaggacagacttcccctacgtgtctgctgccatgccctgctttgtgatcatcatcatcctgtgtgtgccctgctgcaagaagaagaccagcgctgctgagggccctgagctggtgtccctgcaggtgctggaccagcaccctgtgggcactggagaccacagagatgctgcccagctgggcttccagcccctgatgtctgccaccggcagcacaggcagcacagaaggagcctag

SEQ ID NO: 107950 - DNA, 1023 bp, Artificial Sequence
  derived and/or modified sequence
atgggcctgggccgggtgctgctcttcctggccgtggccttcccctttgcccccccagctgctgctgctgagccccacagcctgcgctacaacctgatggtgctgagccaggacggctctgtgcagagcggcttcctggccgagggccacctggatggccagcccttcctgcgctatgaccggcagaagaggcgggccaagccccagggccagtgggccgaggatgtgctgggcgccaagacctgggacacagaaacagaggacctgacagaaaatggccaggacctgcggaggaccctgacccacatcaaggaccagaagggcgtgccccagagcagccgggcccagaccctggccatgaatgtgaccaacttctggaaggaggatgccatgaagaccaagacccactaccgggccatgcaggccgactgcctgcagaagctgcagcgctacctgaagagcggcgtggccatcagaagaacagtgccccccatggtgaatgtcatctgcagcgaggtgtctgagggcaacatcaccgtgacctgccgggccagcagcttctaccccaggaacatcaccctgacctggaggcaggatggagtgtccctgagccacaacacccagcagtggggagatgtgctgcctgatggaaatggcacctaccagacctgggtggccacccgcatccggcagggcgaggagcagcgcttcacctgctacatggagcacagcggcaaccacggcacccaccctgtgcccagcggcaaggccctggtgctgcagagccagaggacagacttcccctacgtgtctgctgccatgccctgctttgtgatcatcatcatcctgtgtgtgccctgctgcaagaagaagaccagcgctgctgagggccctgagctggtgtccctgcaggtgctggaccagcaccctgtgggcactggagaccacagagatgctgcccagctgggcttccagcccctgatgtctgccaccggcagcacaggcagcacagagggcacctag

SEQ ID NO: 107951 - DNA, 954 bp, Artificial Sequence
  derived and/or modified sequence
tgaccccacagcctgcgctacaacctgatggtgctgagccaggacggctctgtgcagagcggcttcctggccgagggccacctggatggccagcccttcctgcgctatgaccggcagaagagaagagccaagccccagggccagtgggccgaggatgtgctgggcgccaagacctgggacacagaaacagaggacctgacagaaaatggccaggacctgcggaggaccctgacccacatcaaggaccagaagggcgtgccccagagcagccgggcccagaccctggccatgaatgtgaccaacttctggaaggaggatgccatgaagaccaagacccactaccgggccatgcaggccgactgcctgcagaagctgcagcgctacctgaagtctggagtggccatccggaggacagtgccccccatggtgaatgtgacctgcagcgaggtgtctgagggcaacatcaccgtgacctgccgggccagcagcttctaccccaggaacatcaccctgacctggaggcaggatggagtgtccctgagccacaacacccagcagtggggagatgtgctgcctgatggaaatggcacctaccagacctgggtggccacccgcatccggcagggcgaggagcagcgcttcacctgctacatggagcacagcggcaaccacggcacccaccctgtgcccagcggcaaggccctggtgctgcagagccagaggacagacttcccctacgtgtctgctgccatgccctgcttcgtcatcatcatcatcctgtgtgtgccctgctgcaagaagaagaccagcgctgctgagggccctgagctggtgtccctgcaggtgctggaccagcaccctgtgggcaccggggaccacagagatgctgcccagctgggcttccagcccctgatgtctgccaccggcagcacaggcagcacagagggcgcctag

SEQ ID NO: 107952 - DNA, 1007 bp, Artificial Sequence
  derived and/or modified sequence
ttcccttttgcacctccgggagctgctgctgagccccacagtcttcgttataacctcacggtgctgtcctgggatggatctgtgcagtcagggtttcttgctgaggtacatctggatggtcagcccttcctgcgctatgacaggcagaaatgcagggcaaagccccagggacagtgggcagaagatgtcctgggaaataagacatgggacagagagaccagggacttgacagggaacggaaaggacctcaggatgaccctggctcatatcaaggaccagaaagaagtgccccccatggtgaatgtcacccgcagcgaggcctcagagggcaacatcaccgtgacatgcagggcttccagcttctatccccggaatatcacactgacctggcgtcaggatggggtatctttgagccacgacacccagcagtggggggatgtcctgcctgatgggaatggaacctaccagacctgggtggccaccaggatttgccaaggagaggagcagaggttcacctgctacatggaacacagcgggaatcacagcactcaccctgtgccctctgggaaagtgctggtgcttcagagtcattggcagacattccatgtttctgctgttgctgctgctgctgctgctatttttgttattattattttctatgtccgttgttgtaagaagaaaacatcagctgcagagggtccagagctcgtgagcctgcaggtcctggatcaacacccagttgggacgagtgaccacagggatgccacacagctcggatttcagcctctgatgtcagctcttgggtccactggctccactgagggcgcctagactctacagccaggcggctggaattgaattccctgcctggatctcacaagcactttccctcttggtgcctcagtttcctgacctatgaaacagagaaaataaaagcacttatttattgttgttggaggctgcaaaatgttagtagatatgaggcatttgcagctgtgccatattaa

SEQ ID NO: 107953 - DNA, 1005 bp, Artificial Sequence
  derived and/or modified sequence
ttcccttttgcacctccgggagctgctgctgagccccacagtcttcgttataacctcacggtgctgtcctgggatggatctgtgcagtcagggtttcttgctgaggtacatctggatggtcagcccttcctgcgctatgacaggcagaaatgcagggcaaagccccagggacagtgggcagaagatgtcctgggaaataagacatgggacagagagaccagggacttgacagggaacggaaaggacctcaggatgaccctggctcatatcaaggaccagaaagaagtgccccccatggtgaatgtcacccgcagcgaggcctcagagggcaacatcaccgtgacatgcagggcttccagcttctatccccggaatatcatactgacctggcgtcaggatggggtatctttgagccacgacacccagcagtggggggatgtcctgcctgatgggaatggaacctaccagacctgggtggccaccaggatttgccgaggagaggagcagaggttcacctgctacatggaacacagcgggaatcacagcactcaccctgtgccctctgggaaagtgctggtgcttcagagtcattggcagacattccatgtttctgctgttgctgctggctgctgctatttttgttattattattttctatgtccgttgttgtaagaagaaaacatcagctgcagagggtccagagctcgtgagcctgcaggtcctggatcaacacccagttgggacgagtgaccacagggatgccacacagctcggatttcagcctctgatgtcagctcttgggtccactggctccactgagggcacctagactctacagccaggcggctggaattgaattccctgcctggatctcacaagcactttccctcttggtgcctcagtttcctgacctatgaaacagagaaaataaaagcacttatttattgttgttggaggctgcaaaatgttagtagatatgaggcatttgcagctgtgccatattaa

SEQ ID NO: 107954 - DNA, 1001 bp, Artificial Sequence
  derived and/or modified sequence
ttcccttttgcacctccgggagctgctgctgagccccacagtcttcgttataacctcacggtgctgtcctgggatggatctgtgcagtcagggtttctcactgaggtacatctggatggtcagcccttcctgcgctgtgacaggcagaaatgcagggcaaagccccagggacagtgggcagaagatgtcctgggaaataagacatgggacagagagaccagagacttgacagggaacggaaaggacctcaggatgaccctggctcatatcaaggaccagaaagaagtgccccccatggtgaatgtcacccgcagcgaggcctcagagggcaacattaccgtgacatgcagggcttctggcttctatccctggaatatcacactgagctggcgtcaggatggggtatctttgagccacgacacccagcagtggggggatgtcctgcctgatgggaatggaacctaccagacctgggtggccaccaggatttgccaaggagaggagcagaggttcacctgctacatggaacacagcgggaatcacagcactcaccctgtgccctctgggaaagtgctggtgcttcagagtcattggcagacattccatgtttctgctgttgctgctgctgctatttttgttattattattttctatgtccgttgttgtaagaagaaaacatcagctgcagagggtccagagctcgtgagcctgcaggtcctggatcaacacccagttgggacgagtgaccacagggatgccacacagctcggatttcagcctctgatgtcagatcttgggtccactggctccactgagggcgcctagactctacagccaggcagctgggattcaattccctgcctggatctcacgagcactttccctcttggtgcctcagtttcctgacctatgaaacagagaaaataaaagcacttatttattgttgttggaggctgcaaaatgttagtagatatgaggcgtttgcagctgtaccatattaa

SEQ ID NO: 107955 - DNA, 2346 bp, Artificial Sequence
  derived and/or modified sequence
agcggtcgctgagcggggcgcaggtgactaaatttcgacggggtcttctcacgggtttcattcagttggccactgctgagcagctgagaaggtggcgacgtaggggccatggggctgggccgggtcctgctgtttctggccgtcgccttcccttttgcacccccggcagccgccgctgagccccacagtcttcgttacaacctcatggtgctgtcccaggatggatctgtgcagtcagggtttctcgctgagggacatctggatggtcagcccttcctgcgctatgacaggcagaaacgcagggcaaagccccagggacagtgggcagaaaatgtcctgggagctaagacctgggacacagagaccgaggacttgacagagaatgggcaagacctcaggaggaccctgactcatatcaaggaccagaaaggagtgccccagtcctccagagctcagaccttggctatgaacgtcacaaatttctggaaggaagatgccatgaagaccaagacacactatcgcgctatgcaggcagactgcctgcagaaactacagcgatatctgaaatccggggtggccatcaggagaacagtgccccccatggtgaatgtcacctgcagcgaggtctcagagggcaacatcaccgtgacatgcagggcttccagcttctatccccggaatatcacactgacctggcgtcaggatggggtatctttgagccacaacacccagcagtggggggatgtcctgcctgatgggaatggaacctaccagacctgggtggccaccaggattcgccaaggagaggagcagaggttcacctgctacatggaacacagcgggaatcacggcactcaccctgtgccctctgggaaggcgctggtgcttcagagtcaacggacagactttccatatgtttctgctgctatgccatgttttgttattattattattctctgtgtcccttgttgcaagaagaaaacatcagcggcagagggtccagagcttgtgagcctgcaggtcctggatcaacacccagttgggacaggagaccacagggatgcagcacagctgggatttcagcctctgatgtcagctactgggtccactggttccactgagggcacctagactctacagccaggcggccaggattcaactccctgcctggatctcaccagcactttccctctgtttcctgacctatgaaacagagaaaataacatcacttatttattgttgttggatgctgcaaagtgttagtaggtatgaggtgtttgctgctctgccacgtagagagccagcaaagggatcatgaccaactcaacattccattggaggctatatgatcaaacagcaaattgtttatcatgaatgcaggatgtgggcaaactcacgactgctcctgccaacagaaggtttgctgagggcattcactccatggtgctcattggagttatctactgggtcatctagagcctattgtttgaggaatgcagtcttacaagcctactctggacccagcagctgactccttcttccacccctcttcttgctatctcctataccaataaatacgaagggctgtggaagatcagagcccttgttcacgagaagcaagaagccccctgaccccttgttccaaatatactcttttgtctttctctttattcccacgttcgccctttgttcagtccaatacagggttgtggggcccttaacagtgccatattaattggtatcattatttctgttgtttttgtttttgtttttgtttttgtttttgagacagagtctcactctgtcacccaggctgcagttcactggtgtgatctcagctcactgcaacctctgcctcccaggttcaagcacttctcgtacctcagactcccgaatagctgggattacagacaggcaccaccacacccagctaatttttgtattttttgtagagacggggtttcgccaagttgaccagcccagtttcaaactcctgacctcaggtgatctgcctgccttggcatcccaaagtgctgggattacaagaatgagccaccgtgcctggcctattttattatattgtaatatattttattatattagccaccatgcctgtcctattttcttatgttttaatatattttaatatattacatgtgcagtaattagattatcatgggtgaactttatgagtgagtatcttggtgatgactcctcctgaccagcccaggaccagctttcttgtcaccttgaggtcccctcgccccgtcacaccgttatgcattactctgtgtctactattatgtgtgcataatttataccgtaaatgtttactctttaaataga

SEQ ID NO: 107956 - DNA, 2338 bp, Artificial Sequence
  derived and/or modified sequence
agcggtcgctgagcggggcgcaggtgactaaatttcgacggggtcttctcaccggtttcattcagttggccactgctgagcagctgagaaggtggcgacgtaggggccatggggctgggccgggtcctgctgtttctggccgtcgccttcccttttgcacccccggcagccgccgctgagccccacagtcttcgttacaacctcatggtgctgtcccaggatggatctgtgcagtcagggtttctcgctgagggacatctggatggtcagcccttcctgcgctatgacaggcagaaacgcagggcaaagccccagggacagtgggcagaagatgtcctgggagctaagacctgggacacagagaccgaggacttgacagagaatgggcaagacctcaggaggaccctgactcatatcaaggaccagaaaggagtgccccagtcctccagagctcagaccttggctatgaacgtcacaaatttctggaaggaagatgccatgaagaccaagacacactatcgcgctatgcaggcagactgcctgcagaaactacagcgatatctgaaatccggggtggccatcaggagaacagtgccccccatggtgaatgtcacctgcagcgaggtctcagagggcaacatcaccgtgacatgcagggcttccagcttctatccccggaatatcacactgacctggcgtcaggatggggtatctttgagccacaacacccagcagtggggggatgtcctgcctgatgggaatggaacctaccagacctgggtggccaccaggattcgccaaggagaggagcagaggttcacctgctacatggaacacagcgggaatcacggcactcaccctgtgccctctgggaaggcgctggtgcttcagagtcaacggacagactttccatatgtttctgctgctatgccatgttttgttattattattattctctgtgtcccttgttgcaagaagaaaacatcagcggcagagggtccagagcttgtgagcctgcaggtcctggatcaacacccagttgggacaggagaccacagggatgcagcacagctgggatttcagcctctgatgtcagctactgggtccactggttccactgagggcgcctagactctacagccaggcggccaggattcaactccctgcctggatctcaccagcactttccctctgtttcctgacctatgaaacagaaaataacatcacttatttattgttgttggatgctgcaaagtgttagtaggtatgaggtgtttgctgctctgccacgtagagagccagcaaagggatcatgaccaactcaacattccattggaggctatatgatcaaacagcaaattgtttatcatgaatgcaggatgtgggcaaactcacgactgctcctgccaacagaaggtttgctgagggcattcactccatggtgctcattggagttatctactgggtcatctagagcctattgtttgaggaatgcagtcttacaagcctactctggacccagcagctgactccttcttccacccctcttcttgctatctcctataccaataaatacgaagggctgtggaagatcagagcccttgttcacgagaagcaagaagccccctgaccccttgttccaaatatactcttttgtctttctctttattcccacgttcgccctttgttcagtccaatacagggttgtggggcccttaacagtgccatattaattggtatcattatttctgttgtttttgtttttgtttttgtttttgagacagagtctcactctgtcacccaggctgcagttcactggtgtgatctcagctcactgcaacctctgcctcccaggttcaagcacttctcgtacctcagactcccgaatagctgggattacagacaggcaccaccacacccagctaatttttgtattttttgtagagacgggatttcgccaagttgaccagcccagtttcaaactcctgacctcaggtgatctgcctgccttggcatcccaaagtgctgggattacaagaatgagccaccgtgcctggcctattttattatattgtaatatattttattatattagccaccatgcctgtcctattttcttatgttttaatatattttaatatattacatgtgcagtaattagattatcatgggtgaactttatgagtgagtatcttggtgatgactcctcctgaccagcccaggaccagctttcttgtcaccttgaggtcccctcgccccgtcacaccgttatgcattactctgtgtctactattatgtgtgcataatttataccgtaaatgtttactctttaaataga

SEQ ID NO: 107957 - DNA, 2344 bp, Artificial Sequence
  derived and/or modified sequence
agcggtcgctgagcggggcgcaggtgactaaatttcgacggggtcttctcaccggtttcattcagttggccactgctgagcagctgagaaggtggcgacgtaggggccatggggctgggccgggtcctgctgtttctggccgtcgccttcccttttgcacccccggcagccgccgctgagccccacagtcttcgttacaacctcatggtgctgtcccaggatggatctgtgcagtcagggtttctcgctgagggacatctggatggtcagcccttcctgcgctatgacaggcagaaacgcagggcaaagccccagggacagtgggcagaagatgtcctgggagctgagacctgggacacagagaccgaggacttgacagagaatgggcaagacctcaggaggaccctgactcatatcaaggaccagaaaggagtgccccagtcctccagagctcagaccttggctatgaacgtcacaaatttctggaaggaagatgccatgaagaccaagacacactatcgcgctatgcaggcagactgcctgcagaaactacagcgatatctgaaatccggggtggccatcaggagaacagtgccccccatggtgaatgtcacctgcagcgaggtctcagagggcaacatcaccgtgacatgcagggcttccagcttctatccccggaatatcacactgacctggcgtcaggatggggtatctttgagccacaacacccagcagtggggggatgtcctgcctgatgggaatggaacctaccagacctgggtggccaccaggattcgccaaggagaggagcagaggttcacctgctacatggaacacagcgggaatcacggcactcaccctgtgccctctgggaaggcgctggtgcttcagagtcaacggacagactttccatatgtttctgctgctatgccatgttttgttattattattattctctgtgtcccttgttgcaagaagaaaacatcagcggcagagggtccagagcttgtgagcctgcaggtcctggatcaacacccagttgggacaggagaccacagggatgcagcacagctgggatttcagcctctgatgtcagctactgggtccactggttccactgagggcgcctagactctacagccaggcggccaggattcaactccctgcctggatctcaccagcactttccctctgtttcctgacctatgaaacagaaaataacatcacttatttattgttgttggatgctgcaaagtgttagtaggtatgaggtgtttgctgctctgccacgtagagagccagcaaagggatcatgaccaactcaacattccattggaggctatatgatcaaacagcaaattgtttatcatgaatgcaggatgtgggcaaactcacgactgctcctgccaacagaaggtttgctgagggcattcactccatggtgctcattggagttatctactgggtcatctagagcctattgtttgaggaatgcagtcttacaagcctactctggacccagcagctgactccttcttccacccctcttcttgctatctcctataccaataaatacgaagggctgtggaagatcagagcccttgttcacgagaagcaagaagccccctgaccccttgttccaaatatactcttttgtctttctctttattcccacgttcgccctttgttcagtccaatacagggttgtggggcccttaacagtgccatattaattggtatcattatttctgttgtttttgtttttgtttttgtttttgtttttgagacagagtctcactctgtcacccaggctgcagttcactggtgtgatctcagctcactgcaacctctgcctcccaggttcaagcacttctcgtacctcagactcccgaatagctgggattacagacaggcaccaccacacccagctaatttttgtattttttgtagagacggggtttcgccaagttgaccagcccagtttcaaactcctgacctcaggtgatctgcctgccttggcatcccaaagtgctgggattacaagaatgagccaccgtgcctggcctattttattatattgtaatatattttattatattagccaccatgcctgtcctattttcttatgttttaatatattttaatatattacatgtgcagtaattagattatcatgggtgaactttatgagtgagtatcttggtgatgactcctcctgaccagcccaggaccagctttcttgtcaccttgaggtcccctcgccccgtcacaccgttatgcattactctgtgtctactattatgtgtgcataatttataccgtaaatgtttactctttaaataga

SEQ ID NO: 107958 - DNA, 2346 bp, Artificial Sequence
  derived and/or modified sequence
agcggtcgctgagcggggcgcaggtgactaaatttccacggggtcttctcaccgttttcattcagttggccactgctgagcagctgagaaggtggcgacgtaggggccatggggctgggccgggtcctgctgtttctggccgtcgccttcccttttgcacccccggcagccgccgctgagccccacagtcttcgttacaacctcatggtgctgtcccaggatggatctgtgcagtcagggtttctcgctgagggacatctggatggtcagcccttcctgcgctatgacaggcagaaacgcagggcaaagccccagggacagtgggcagaagatgtcctgggagctaagacctgggacacagagaccgaggacttgacagagaatgggcaagacctcaggaggaccctgactcatatcaaggaccagaaaggagtgccccagtcctccagagctcagaccttggctatgaacgtcacaaatttctggaaggaagatgccatgaagaccaagacacactatcgcgctatgcaggcagactgcctgcagaaactacagcgatatctgaaatccggggtggccatcaggagaacagtgccccccatggtgaatgtcatctgcagcgaggtctcagagggcaacatcaccgtgacatgcagggcttccagcttctatccccggaatatcacactgacctggcgtcaggatggggtatctttgagccacaacacccagcagtggggggatgtcctgcctgatgggaatggaacctaccagacctgggtggccaccaggattcgccaaggagaggagcagaggttcacctgctacatggaacacagcgggaatcacggcactcaccctgtgccctctgggaaggcgctggtgcttcagagtcaacggacagactttccatatgtttctgctgctatgccatgttttgttattattattattctctgtgtcccttgttgcaagaagaaaacatcagcggcagagggtccagagcttgtgagcctgcaggtcctggatcaacacccagttgggacaggagaccacagggatgcagcacagctgggatttcagcctctgatgtcagctactgggtccactggttccactgagggcacctagactctacagccaggcggccaggattcaactccctgcctggatctcaccagcactttccctctgtttcctgacctatgaaacagagaaaataacatcacttatttattgttgttggatgctgcaaagtgttagtaggtatgaggtgtttgctgctctgccacgtagagagccagcaaagggatcatgaccaactcaacattccattggaggctatatgatcaaacagcaaattgtttatcatgaatgcaggatgtgggcaaactcacgactgctcctgccaacagaaggtttgctgagggcattcactccatggtgctcattggagttatctactgggtcatctagagcctattgtttgaggaatgcagtcttacaagcctactctggacccagcagctgactccttcttccacccctcttcttgctatctcctataccaataaatacgaagggctgtggaagatcagagcccttgttcacgagaagcaagaagccccctgaccccttgttccaaatatactcttttgtctttctctttattcccacgttcgccctttgttcagtccaatacagggttgtggggcccttaacagtgccatattaattggtatcattatttctgttgtttttgtttttgtttttgtttttgtttttgagacagagtctcactctgtcacccaggctgcagttcactggtgtgatctcagctcactgcaacctctgcctcccaggttcaagcacttctcgtacctcagactcccgaatagctgggattacagacaggcaccaccacacccagctaatttttgtattttttgtagagacggggtttcgccaagttgaccagcccagtttcaaactcctgacctcaggtgatctgcctgccttggcatcccaaagtgctgggattacaagaatgagccaccgtgcctggcctattttattatattgtaatatattttattatattagccaccatgcctgtcctattttcttatgttttaatatattttaatatattacatgtgcagtaattagattatcatgggtgaactttatgagtgagtatcttggtgatgactcctcctgaccagcccaggaccagctttcttgtcaccttgaggtcccctcgccccgtcacaccgttatgcattactctgtgtctactattatgtgtgcataatttataccgtaaatgtttactctttaaataga

SEQ ID NO: 107959 - DNA, 2350 bp, Artificial Sequence
  derived and/or modified sequence
agcggtcgctgagcggggcgcaggtgactaaatttcgacggggtcttctcaccggtttcattcagttggccactgctgagcagctgagaaggtggcgacgtaggggccatggggctgggccgggtcctgctgtttctggccgtcgccttcccttttgcacccccggcagccgccgctgagccccacagtcttcgttacaacctcatggtgctgtcccaggatggatctgtgcagtcagggtttctcgctgagggacatctggatggtcagcccttcctgcgctatgacaggcagaaacgcagggcaaagccccagggacagtgggcagaagatgtcctgggagctaagacctgggacacagagaccgaggacttgacagagaatgggcaagacctcaggaggaccctgactcatatcaaggaccagaaaggagtgccccagtcctccagagctcagaccttggctatgaacgtcacaaatttctggaaggaagatgccatgaagaccaagacacactatcgcgctatgcaggcagactgcctgcagaaactacagcgatatctgaaatccggggtggccatcaggagaacagtgccccccatggtgaatgtcacctgcagcgaggtctcagagggcaacatcaccgtgacatgcagggcttccagcttctatccccggaatatcacactgacctggcgtcaggatggggtatctttgagccacaacacccagcagtggggggatgtcctgcctgatgggaatggaacctaccagacctgggtggccaccaggattcgccaaggagaggagcagaggttcacctgctacatggaacacagcgggaatcacggcactcaccctgtgccctctgggaaggcgctggtgcttcagagtcaacggacagactttccatatgtttctgctgctatgccatgttttgttattattattattctctgtgtcccttgttgcaagaagaaaacatcagcggcagagggtccagagcttgtgagcctgcaggtcctggatcaacacccagttgggacaggagaccacagggatgcagcacagctgggatttcagcctctgatgtcagctactgggtccactggttccactgagggcgcctagactctacagccaggcggccaggattcaactccctgcctggatctcaccagcactttccctctgtttcctgacctatgaaacagaaaataacatcacttatttattgttgttggatgctgcaaagtgttagtaggtatgaggtgtttgctgctctgccacgtagagagccagcaaagggatcatgaccaactcaacattccattggaggctatatgatcaaacagcaaattgtttatcatgaatgcaggatgtgggcaaactcacgactgctcctgccaacagaaggtttgctgagggcattcactccatggtgctcattggagttatctactgggtcatctagagcctattgtttgaggaatgcagtcttacaagcctactctggacccagcagctgactccttcttccacccctcttcttgctatctcctataccaataaatacgaagggctgtggaagatcagagcccttgttcacgagaagcaagaagccccctgaccccttgttccaaatatactcttttgtctttctctttattcccacgttcgccctttgttcagtccaatacagggttgtggggcccttaacagtgccatattaattggtatcattatttctgttgtttttgtttttgtttttgtttttgtttttgtttttgagacagagtctcactctgtcacccaggctgcagttcactggtgtgatctcagctcactgcaacctctgcctcccaggttcaagcacttctcgtacctcagactcccgaatagctgggattacagacaggcaccaccacacccagctaatttttgtattttttgtagagacggggtttcgccaagttgaccagcccagtttcaaactcctgacctcaggtgatctgcctgccttggcatcccaaagtgctgggattacaagaatgagccaccgtgcctggcctattttattatattgtaatatattttattatattagccaccatgcctgtcctattttcttatgttttaatatattttaatatattacatgtgcagtaattagattatcatgggtgaactttatgagtgagtatcttggtgatgactcctcctgaccagcccaggaccagctttcttgtcaccttgaggtcccctcgccccgtcacaccgttatgcattactctgtgtctactattatgtgtgcataatttataccgtaaatgtttactctttaaataga

SEQ ID NO: 107960 - DNA, 2166 bp, Artificial Sequence
  derived and/or modified sequence
agccccacagtcttcgttacaacctcatggtgctgtcccaggatggatctgtgcagtcagggtttctcgctgagggacatctggatggtcagcccttcctgcgctatgacaggcagaaacgcagggcaaagccccagggacagtgggcagaagatgtcctgggagctaagacctgggacacagagaccgaggacttgacagagaatgggcaagacctcaggaggaccctgactcatatcaaggaccagaaaggagtgccccagtcctccagagctcagaccttggctatgaacgtcacaaatttctggaaggaagatgccatgaagaccaagacacactatcgcgctatgcaggcagactgcctgcagaaactacagcgatatctgaaatccggggtggccatcaggagaacagtgccccccatggtgaatgtcacctgcagcgaggtctcagagggcaacatcaccgtgacatgcagggcttccagcttctatccccggaatatcacactgacctggcgtcaggatggggtatctttgagccacaacacccagcagtggggggatgtcctgcctgatgggaatggaacctaccagacctgggtggccaccaggattcgccaaggagaggagcagaggttcacctgctacatggaacacagcgggaatcacggcactcaccctgtgccctctgggaaggcgctggtgcttcagagtcaacggacagactttccatatgtttctgctgctatgccatgttttgttattattattattctctgtgtcccttgttgcaagaagaaaacatcagcggcagagggtccagagcttgtgagcctgcaggtcctggatcaacacccagttgggacaggagaccacagggatgcagcacagctgggatttcagcctctgatgtcagctactgggtccactggttccactgagggcgcctagactctacagccaggcggccaggattcaactccctgcctggatctcaccagcactttccctctgtttcctgacctatgaaacagaaaataacatcacttatttattgttgttggatgctgcaaagtgttagtaggtatgaggtgtttgctgctctgccacgtagagagccagcaaagggatcatgaccaactcaacattccattggaggctatatgatcaaacagcaaattgtttatcatgaatgcaggatgtgggcaaactcacgactgctcctgccaacagaaggtttgctgagggcattcactccatggtgctcattggagttatctactgggtcatctagagcctattgtttgaggaatgcagtcttacaagcctactctggacccagcagctgactccttcttccacccctcttcttgctatctcctataccaataaatacgaagggctgtggaagatcagagcccttgttcacgagaagcaagaagccccctgaccccttgttccaaatatactcttttgtctttctctttattcccacgttcgccctttgttcagtccaatacagggttgtggggcccttaacagtgccatattaattggtatcattatttctgttgtttttgtttttgtttttgtttttgtttttgagacagagtctcactctgtcacccaggctgcagttcactggtgtgatctcagctcactgcaacctctgcctcccaggttcaagcacttctcgtacctcagactcccgaatagctgggattacagacaggcaccaccacacccagctaatttttgtattttttgtagagacggggtttcgccaagttgaccagcccagtttcaaactcctgacctcaggtgatctgcctgccttggcatcccaaagtgctgggattacaagaatgagccaccgtgcctggcctattttattatattgtaatatattttattatattagccaccatgcctgtcctattttcttatgttttaatatattttaatatattacatgtgcagtaattagattatcatgggtgaactttatgagtgagtatcttggtgatgactcctcctgaccagcccaggaccagctttcttgtcaccttgaggtcccctcgccccgtcacaccgttatgcattactctgtgtctactattatgtgtgcataatttataccgtaaatgtttactctttaaataga

SEQ ID NO: 107961 - DNA, 831 bp, Artificial Sequence
  derived and/or modified sequence
ttccccttcgccccccccggcgccgccgccgagccccacagcctgaggtacaacttgacagtgttatcatgggacggcagcgtgcagagcggcttcctagccgaggtgcacttggacggtcagccattcctccgatacgaccgccagaaatgccgggcgaagccacaggggcagtgggctgaagacgtcctgggtaacaagacttgggaccgggagacaagggacctaactggtaacgggaaggaccttcgcatgacactggcacacatcaaagatcagaaagaggtaccccctatggtgaacgtgaccagatccgaagcctccgaaggaaacatcacagtaacttgccgcgcgtcctccttctaccctcgtaacatcactttaacttggagacaagatggggtttcactcagtcacgatacccagcagtggggggacgtgttgccagacggtaatggtacataccagacatgggtagctaccaggatctgccagggagaggagcaaagatttacctgttacatggagcactcgggcaatcacagtactcacccggttccatcaggaaaggttctggtccttcagtctcattggcagacctttcacgtgtccgccgttgcggccgcagcagctgccatctttgtgattatcatattctatgtgagatgctgcaaaaagaagacaagtgccgctgaaggccccgaattagtcagtcttcaagtcctcgatcagcatcccgtcggcacctccgaccaccgggacgccacccaactaggatttcagcccctcatgagtgccctgggaagtaccggttcaactgaaggtgcttag

SEQ ID NO: 107962 - DNA, 672 bp, Artificial Sequence
  derived and/or modified sequence
ttccccttcgccccccccggcgccgccgccgagccccacagcctgcggtataacttaacagtcctgagctgggatgggtctgtccagtccggcttcttagccgaagtgcatctggacgggcagccattcctccgttacgatcgccagaagtgccgggcaaaaccccagggtcagtgggccgaggatgtcctgggaaacaaaacctgggaccgagaaactagggacctgactggcaatggtaaagacctgaggatgactcttgcgcacatcaaggatcaaaaggaagtcccgcccatggtaaacgtcactagaagcgaggcaagtgaaggaaacatcacagtgacatgtagagcaagttcattttacccacgcaacatcatcctgacctggcgacaggacggtgtgtcactatctcacgatacccagcagtggggggacgtcttgcctgatggcaatggcacttatcagacttgggttgcaacccgaatttgcagaggcgaggagcaacgtttcacttgctacatggagcattcgggcaatcacagtacgcacccagtccctagcggcaaagtgttggtgctccagagccattggcagacattccacgttagtgccgttgccgccggatgttgttacttctgttactactactttctgtgccccttgctgtag

SEQ ID NO: 107963 - DNA, 672 bp, Artificial Sequence
  derived and/or modified sequence
ttccccttcgccccccccggcgccgccgccgagccccacagcctgcgttacaatctgaccgttttaagttgggatggatcagtgcaatcaggtttccttgccgaggtgcacttggatggacagccgtttttacgatacgatagacagaagtgtcgcgctaaaccccaggggcagtgggcggaggacgtgttgggtaataaaacctgggatcgcgagacgagggatttaacgggcaatggtaaagatctgaggatgacattggcgcacattaaagatcagaaggaggtgccaccaatggtgaacgttactcgcagtgaggcctccgagggcaatattactgtgacatgtcgcgcgagtagcttttaccctcgaaatatcatcctgacctggagacaggatggcgtgtctctatcccacgatactcagcagtggggggatgtcctccctgatgggaacggcacatatcagacttgggtagctacaaggatttgtcgaggagaggaacaacgcttcacttgctatatggaacacagtggtaaccactccacccatccagtaccctcaggtaaagtgctggtgttacaatctcactggcagaccttccatgtcagtgccgtcgccgcaggttgctgctacttctgctattactactttttatgccccctgctttag

SEQ ID NO: 107964 - DNA, 672 bp, Artificial Sequence
  derived and/or modified sequence
ttccccttcgccccccccggcgccgccgccgagccccacagcctgaggtacaatctgaccgttctatcttgggacggctccgtacagtctggcttcctcgcagaagtccacctggacgggcagcccttcctgagatacgacaggcaaaaatgccgcgccaagcctcagggccagtgggctgaggacgtgcttggtaacaagacatgggacagagagactagagatcttactggcaatggtaaagatctgcggatgacactggcacatattaaggaccagaaagaggtcccccccatggtaaacgtcacaagatccgaggctagtgagggaaacattacagtgacctgccgagcctcttcattctacccaagaaacatcattttaacatggcggcaagacggggtgagcctgtcgcatgatacgcaacaatggggggatgtgctcccagatggaaacggcacttaccaaacttgggtggctacgagaatttgtcgtggagaggaacagcgttttacttgttacatggaacacagcgggaaccactccacacatcctgtcccctcaggcaaggtactcgtgctgcagagtcattggcagactttccacgtcagcgccgtggccgcaggatgctgttatttttgctattattatttcttgtgccccctcttatag

SEQ ID NO: 107965 - DNA, 825 bp, Artificial Sequence
  derived and/or modified sequence
ttccccttcgccccccccggcgccgccgccgagccccacagcctgcgttataatttaaccgttctttcttgggatggctccgtgcagtcgggcttcctgacagaggtgcacttagatggtcagcccttcttgcggtgtgacaggcagaaatgcagggccaagccacagggacagtgggcagaggacgtgctaggaaacaagacttgggatcgggagacgcgggacctaaccggcaatggtaaggacctgcgaatgaccttagcccatattaaggatcagaaagaagtgccccccatggttaatgtcacaaggtccgaagcctctgaagggaacattacagtaacatgtcgtgcctcaggattctacccttggaacattactttaagctggagacaagacggagtgagtctgagtcacgatactcagcagtggggcgacgttttgccggatggcaatggaacctatcagacatgggtagctacccgaatttgtcagggagaggagcagcgcttcacatgctatatggaacactccggaaaccatagcactcatccagttccgagcggcaaggtgttagtactccagtctcattggcaaaccttccatgtttccgcggtggcggccgcagctatctttgtgatcattattttctatgtacgctgttgcaagaagaagacttctgcagcagagggacccgagctagtctccttacaggttctagaccagcaccctgtaggcaccagcgaccatcgggatgcaacccagcttggtttccagccgcttatgtctgatttaggatctacaggttccacggaaggggcctag

SEQ ID NO: 107966 - DNA, 1023 bp, Artificial Sequence
  derived and/or modified sequence
atgggcctgggccgggtgctgctgttcctggccgtggccttcccctttgcccctccagccgcggcagccgaacctcattcgttaagatataatttaatggtgctgtcgcaggatggcagtgtgcagtccggctttctagcggaaggccacctggacgggcagccatttttgcggtatgaccggcagaaacgacgcgccaagccacagggacaatgggctgagaatgtgctcggcgctaagacttgggacaccgagaccgaggatttgacagaaaacggtcaagacctccggcgaactctcacacacatcaaagaccagaagggagtccctcaatcttccagagcccagacactggctatgaacgtgacaaacttctggaaggaggatgcgatgaagactaaaactcactatagagctatgcaggccgactgtctgcagaaattgcagcggtacctgaaaagtggggtcgctattagacgcaccgttcctcctatggtgaacgtcacctgctccgaggtgtccgagggaaacataaccgttacgtgccgcgcctcctctttttacccgaggaacattacgctgacgtggcgccaggatggggtgtcacttagccataacacccagcagtggggagatgttctgccggatgggaacggaacgtaccaaacctgggtcgccaccaggatccggcaaggggaggaacagaggttcacttgctacatggaacactctggtaaccacggtacccacccagtgccaagtggtaaagcactcgttctacaatcacagcgcacggacttcccttatgtgtccgctgcaatgccctgtttcgtgataatcattatcctctgtgtgccctgctgcaaaaagaaaactagtgccgctgaggggcccgagttggttagcttacaggtgctggatcaacaccccgtcgggacaggggaccatcgggacgcagctcagctcggctttcagcctttgatgagtgctaccgggtcaacaggttctacagaaggcacctag

SEQ ID NO: 107967 - DNA, 1023 bp, Artificial Sequence
  derived and/or modified sequence
atgggcctgggccgggtgctgctgttcctggccgtggccttcccctttgcgcccccagcagctgccgccgaaccccacagcctgcggtacaaccttatggtcctgagtcaggacggatccgtgcagagtggatttttagcagaggggcatctggatggacagccgttcctgcgctacgatcgccagaaaagacgagctaagccacaggggcaatgggcggaggatgtgttgggggctaagacttgggacaccgagacagaggacctgacagagaacggccaggacctgagaagaaccctaactcacattaaggaccagaaaggggtccctcagtcatcgcgggcccagactctggcaatgaatgtgactaacttttggaaagaagatgctatgaagactaagacccattacagagcgatgcaagccgactgcctgcagaaacttcagcgctatctgaagagcggggtggccatccgccgtaccgtgcctcccatggttaacgttacctgtagcgaggtatccgagggcaatatcacagtgacctgccgcgcgtcaagcttctacccgagaaatatcaccctgacatggcgacaggacggagtttctctgagtcacaacactcagcagtggggcgacgtcctgcctgacggcaatggaacctaccagacttgggttgctacacgaattcgtcagggcgaagaacagcgcttcacttgctacatggagcacagtggaaatcacggaacacaccccgttccctcaggcaaagctctggtgctccagagtcagcgaactgatttcccatacgtttcagctgcgatgccctgttttgtgatcattatcattctgtgcgtaccctgctgtaaaaagaagaccagtgcagctgaggggcctgaacttgtctcgctgcaggtgttggaccagcacccagtgggcacaggcgatcatcgcgacgccgctcagctcggatttcagcccctgatgtcagccacgggctctactggaagcacagagggggcttag

SEQ ID NO: 107968 - DNA, 1023 bp, Artificial Sequence
  derived and/or modified sequence
atgggcctgggccgggtgctgctgttcctggccgtggccttcccctttgctcctccagctgctgccgcagagccgcatagcctgcggtacaacctcatggtgctgagccaggacggctccgtgcagagcggcttcctggctgagggccacctggacggtcaaccctttttgagatatgaccgccagaaacggcgagctaagccgcagggccagtgggccgaggacgtcctgggcgcagaaacctgggatactgaaactgaggatctgacggagaatgggcaggacctgaggaggacacttacccacatcaaggaccaaaagggagtgccgcaatcttcccgtgcacagacgctggcaatgaacgtcacaaatttttggaaagaggatgcaatgaagaccaagacacattaccgcgcaatgcaagccgactgtctgcagaaactccaacgatacctcaaatcaggagtggctatacgacgtacggtgccacccatggtcaacgtgacttgctctgaggtgtcggagggaaatatcaccgtgacttgtagagcttcctccttttatccgcggaacatcacattgacttggagacaggacggcgtctccctgtctcacaacactcaacagtggggcgatgtgcttcccgacggcaacggaacgtatcaaacttgggttgccactcgcatcaggcagggtgaggaacagcggtttacgtgttacatggaacactccggaaaccatgggacccaccctgtgccatctggaaaggccctggtgctccagtctcagcgcacagatttcccttatgtctctgctgccatgccatgctttgtcattatcataatcctttgtgtaccgtgttgtaagaagaaaactagcgctgctgagggccctgagctggtgtcattacaggtgctggatcagcacccagtgggtactggcgaccatagagatgctgcgcagctcggctttcaaccactcatgtcagcgaccggaagcaccgggagtacggaaggtgcatag

SEQ ID NO: 107969 - DNA, 1023 bp, Artificial Sequence
  derived and/or modified sequence
atgggcctgggccgggtgctgctgttcctggccgtggccttcccctttgcaccccccgcagctgccgccgaaccacatagtttaaggtacaatctcatggttctgagccaggacggcagtgtgcagagcggctttctggcggagggccatttggatgggcaaccatttttgagatacgatcggcaaaaacgaagggcaaaaccccagggccagtgggcagaggacgtacttggagcgaagacgtgggacacagaaactgaagacctaaccgaaaatggtcaggacttgcgacgaacccttacgcatataaaagatcaaaaaggcgtgccccagagcagcagagctcaaaccctcgccatgaatgttaccaatttttggaaggaggacgccatgaaaaccaaaacacactacagagctatgcaggccgactgccttcaaaagctccagaggtacctcaaaagtggtgttgcgatccgccgcacggtaccgccaatggttaacgtaatttgcagcgaggtgtcagagggaaatattacggtcacatgccgcgcctcaagcttttacccgagaaatatcactttgacctggagacaagacggggtctccctgtcacataatacccagcagtggggcgacgttctccctgatgggaacggcacctaccagacttgggtggcaacaaggatacgtcagggcgaagagcagcgtttcacctgttatatggaacacagtggcaatcacggcacgcatccagttccttccggcaaagccttggtgttacaatcacagcgcacagactttccgtatgtgagcgctgcaatgccctgtttcgttattatcatcatcctctgcgttccctgttgcaagaagaaaacttcagccgccgagggtccagaacttgtgtctcttcaagtcctcgatcagcaccccgtggggacaggcgatcatcgagacgccgcgcagctggggtttcagccacttatgtctgctactggctcaactggaagcactgaggggacctag

SEQ ID NO: 107970 - DNA, 1023 bp, Artificial Sequence
  derived and/or modified sequence
atgggcctgggccgggtgctgctgttcctggccgtggccttcccctttgccccaccggcagccgcagctgagccgcacagcctgcgttacaatctgatggtgctaagtcaggacggttcggtgcagagcggattcttggcagaaggtcatctcgacggccagccattcctcaggtacgacaggcagaagaggcgggccaagccccaaggccagtgggctgaggatgtcttaggcgccgagacatgggataccgagacggaagacctcaccgaaaacgggcaggaccttaggcggacactgacgcatatcaaggaccagaaaggcgtaccccagtcctcgcgagcccagaccctggcgatgaacgtgacaaacttttggaaggaggacgcaatgaagacaaaaacacactacagggcaatgcaggctgactgtcttcagaaactgcagcgttatctgaagagtggcgttgcaattcgtcgcaccgtacctcccatggtgaacgtaacatgcagcgaagtgagcgaggggaacattactgtcacatgcagagctagcagcttttacccaagaaacatcacccttacctggagacaggacggagtttccctaagccacaatacacaacagtggggggatgtgcttcccgatggcaatggtacttaccagacttgggtggccactcgaatccggcagggtgaagaacagaggtttacctgctacatggagcatagcggaaaccatgggacgcacccagttccatccggcaaggctttagtcctccaaagtcagaggaccgactttccatacgttagtgccgcaatgccctgttttgttatcatcatcatactgtgtgtcccgtgctgcaagaaaaaaacttctgccgcagagggtcctgagctcgtaagcctgcaagtgttagatcagcaccccgtggggactggtgatcatcgtgacgctgcacagcttgggttccagcccctgatgtccgctacaggttcaacagggagtacagaaggtgcctag

SEQ ID NO: 107971 - DNA, 1023 bp, Artificial Sequence
  derived and/or modified sequence
atgggcctgggccgggtgctgctgttcctggccgtggccttccccttcgccccccccgcagcagccgcagaaccccactctctccgttacaatttaatggtcctgtcccaggatgggtctgttcagagcgggtttcttgcagaaggacatctggacggacaaccatttcttagatacgaccgacaaaagagaagagccaaaccacagggacagtgggcagagaatgtcctcggcgccaagacatgggatactgagacagaggacttgaccgagaacggacaagatctgcgtaggactttgacgcacattaaggatcagaaaggggtcccccagagttcaagggcccagacgctagccatgaatgtcacgaatttctggaaagaggatgcaatgaagaccaagacccattatcgcgcaatgcaggccgactgcctgcagaagttacagcggtatctcaagtctggcgtcgccataagacgcaccgtgccccccatggtgaacgtaacctgctcagaggtgtcggagggaaatataacggtgacctgcagggcctcgtctttttatcctagaaacataactctcacatggcgtcaggatggcgtaagcctgtcacacaatacacaacagtggggcgatgtactgcctgatggcaatgggacatatcaaacctgggtggcaacaagaatcagacaaggtgaggagcaacggttcacttgctacatggagcattctggaaatcacgggacgcacccggtcccctccgggaaggctctcgttttgcagtcccagagaacggacttcccgtacgtcagcgctgccatgccttgttttgtgataatcataatcctgtgcgtgccatgttgcaaaaagaaaacctccgcagcagaaggcccagagctggtgtcactccaagtcctagaccagcatcccgttggcaccggtgatcacagagatgccgcccagcttggttttcaaccacttatgtctgcaaccggatccactggtagtaccgaaggtacttag

SEQ ID NO: 107972 - DNA, 1023 bp, Artificial Sequence
  derived and/or modified sequence
atgggcctgggccgggtgctgctgttcctggccgtggccttcccctttgcgccacccgctgccgccgctgaacctcattctctgcgctacaacctgatggtgctgtctcaagatggttcagtacagagcggtttcctcgctgaaggccatctggacggacaacccttcctcagatatgatcgccagaagcgaagagccaagccgcagggtcagtgggctgaggacgtgctcggagccaaaacctgggatactgaaacggaagatctaacagaaaatgggcaagatctgcggaggaccttgacgcatatcaaggatcagaagggggtgccgcagtcctcccgggcccaaacgctggccatgaatgtcaccaacttttggaaggaagacgctatgaagactaaaacccactacagggcaatgcaagcagattgcctccagaaactgcagcgatatctcaagtctggagtggcaataaggagaaccgtgccacccatggtaaacgtcacctgttctgaagtgagcgaggggaacatcaccgttacttgccgagcctcttcattctatccccgaaacattacactgacgtggcggcaggatggggttagcctgtcgcacaatactcaacagtggggagacgtcttgccagatgggaatggcacttatcagacctgggtcgctacaaggatcagacaaggcgaggaacagcgctttacatgctacatggaacacagcgggaatcacgggacacatccagtgccctccggtaaagcactggtgctccagagccagaggaccgacttcccatacgtgtcagcagccatgccttgctttgtgattatcatcatcctctgcgtgccatgctgcaaaaaaaagacttccgcagcagaaggtcccgaactcgtatctctgcaggtgctcgaccaacaccccgtgggaacaggggaccaccgtgatgccgcacagttaggttttcagccactgatgtccgctaccggtagcaccggatcgacggagggcgcgtag

SEQ ID NO: 107973 - DNA, 954 bp, Artificial Sequence
  derived and/or modified sequence
tgaccccacagcctgcggtacaacctgatggtgctgagccaggacgggtccgtgcagagcgggttcctcgctgaagggcacctagacggccagccgttcttgcggtacgatagacaaaaaagacgagcaaagccacagggccagtgggcggaagatgttctgggcgctaagacttgggacaccgagacggaagacctgactgaaaatggacaagatctgagacggactttgacccacattaaggaccaaaagggagtgccccagagtagcagagcacaaaccctagccatgaacgttacaaatttctggaaggaggatgcgatgaagacgaagacccactatagggccatgcaggcagattgtttgcaaaagcttcagagatacctgaaaagtggggtggcgatccgccggaccgtcccaccaatggtcaacgtgacttgttctgaggtgtcagagggaaatatcacggtgacttgtcgggcaagctccttctatcctcggaatataacactgacatggcggcaggacggagtgtccttatcccataatacacagcagtggggagacgttttgcccgatggcaacggcacgtaccagacatgggtcgcgacacgtatacgccagggcgaagagcaacgcttcacttgctacatggagcattccgggaatcacggaactcatcccgtgccatccggtaaagctttagtgttgcagtctcagcggacagattttccctatgtctctgccgcaatgccatgcttcgtgataattatcatcctctgcgtgccttgctgcaaaaaaaagacctctgctgcggagggccccgagctggtctctttacaagttctagaccaacatcctgtgggaactggggaccacagggatgctgctcagttaggctttcagccactgatgagtgccaccggttcgacaggatccactgagggcgcctag

SEQ ID NO: 107974 - DNA, 831 bp, Artificial Sequence
  derived and/or modified sequence
ttcccatttgcccctcctggcgctgcagccgagccacattcgctaagatacaatcttaccgtcctttcttgggatgggtcagttcagagcggcttcctcgcagaagtccatctggacggccagccttttctgcgatacgatcgtcagaaatgccgggcaaaaccccagggacaatgggccgaggatgttctcggaaacaaaacctgggatcgtgagactagggacctcacaggtaacggcaaggacctgagaatgaccttagcccacatcaaagaccaaaaggaagttccgccaatggtcaacgtcacacggagcgaggcctcagaaggtaacataacggtaacttgtcgtgcctcctctttttacccgcgaaacattactctaacctggagacaggacggcgttagcctgagtcacgatactcaacagtggggtgacgtgttaccagacggaaacggcacataccagacctgggtagctacaaggatttgccagggcgaagaacagagattcacttgctatatggaacactcgggaaaccactccactcatccagtcccatctgggaaggtcctggtcctgcagtcacattggcaaacctttcatgtcagcgccgttgccgcagccgctgccgcaatcttcgtgattattatcttctacgtacgctgttgcaaaaaaaagaccagtgctgctgaggggccagagctggtctcactgcaggtgttagatcaacaccccgtgggtacaagtgaccatagagatgcaacacagctgggttttcagcctctgatgagcgccctaggatcaaccggatcaaccgagggggcttag

SEQ ID NO: 107975 - DNA, 672 bp, Artificial Sequence
  derived and/or modified sequence
ttcccttttgcccctccaggagccgcagctgaaccccactctctcaggtacaatctgacagtcctctcttgggatgggtcagtacagagcggctttttagcagaggttcacctggacggtcagcccttcctccgatacgatagacaaaagtgtagggccaagccccagggtcagtgggcggaggatgttctagggaacaaaacatgggaccgggagaccagagatctcaccggcaacgggaaagatttgagaatgacactcgctcacatcaaagaccagaaagaagtgccccctatggtgaatgtgacccggtctgaagcctctgagggcaatatcactgttacctgccgcgcttcttcattttatccaagaaacatcatcctgacttggcgccaggacggtgtttctctcagccacgacacacagcagtggggtgatgtcctgcccgatggcaatggcacctaccaaacatgggtggccacacgtatctgtagaggagaagagcaaagatttacatgttacatggagcactctggtaaccacagtacccaccctgtgccatcaggtaaagtcctagtgttacagtcacactggcagactttccatgtttccgccgtcgctgcaggctgctgctacttctgttactactattttttgtgccccctgctgtag

SEQ ID NO: 107976 - DNA, 672 bp, Artificial Sequence
  derived and/or modified sequence
tttccctttgcgccacctggagctgcagcggaaccccactcgcttcgctataacctgactgtgctttcgtgggatggatcggtccagagtgggtttctcgctgaggtccacttggacggccaaccattccttcgatacgatagacagaagtgtagggccaagcctcaaggccagtgggctgaggacgtactgggtaataaaacatgggaccgcgaaacacgcgacttaaccggaaatggcaaagacctgaggatgaccctggcgcatattaaggaccagaaggaggtcccgcctatggtgaacgttacccgcagtgaagcttcggaaggcaatattacagtcacatgcagagcatcctcattctaccctcgcaacataatcctcacctggcgccaggatggcgtgagcctgtcccatgatacccagcagtggggagatgtcctgccggatggcaacgggacgtatcagacatgggtggcaacgcggatttgccgcggtgaagagcagcgcttcacgtgctatatggagcactcagggaaccacagcacccacccagtgccctccggtaaagtgctggtcctacagtcccattggcagacattccatgtatcagccgtggcagcagggtgttgttacttctgttattattatttcctttgcccgctcctgtag

SEQ ID NO: 107977 - DNA, 672 bp, Artificial Sequence
  derived and/or modified sequence
ttcccctttgcccctcccggagcggcagcagaacctcatagtctgagatataatctgacggtgcttagctgggacggcagcgtacagagcggcttccttgctgaagttcaccttgatggacagccatttctgcgttacgataggcagaagtgcagagccaaaccgcaaggccagtgggcagaggatgtcttaggcaacaagacctgggaccgagaaacccgggacctcacaggcaacgggaaagatttacggatgactctcgcacatataaaggaccagaaagaagtcccacccatggttaatgttacgcggagtgaggctagcgaagggaacatcacagtgacctgtcgggcttccagtttctatccgagaaacatcattttaacttggaggcaggatggggtgtcgctgagccatgatactcagcagtggggcgacgtcctgccagacggtaacgggacataccagacttgggttgcgacgcgcatctgccggggagaagaacagcggttcacgtgttacatggagcactcaggaaaccacagcactcatcctgtgccttctggcaaggtgttggtgttacagtctcattggcaaacattccacgtgagcgccgtggccgctgggtgctgttacttctgctattactacttcctgtgtcctctcctgtag

SEQ ID NO: 107978 - DNA, 825 bp, Artificial Sequence
  derived and/or modified sequence
tttcctttcgcgcctccaggggctgccgctgaaccccacagtctgcgctataatttaacagtgctgtcttgggacggaagtgtacaatctggattcctaacagaggtgcacttggatggccaaccattcctgaggtgtgatagacagaagtgtagagcgaagcctcagggccagtgggccgaggacgtgcttgggaacaaaacttgggaccgggagacccgggatcttacaggcaatggaaaggacctccgcatgacactcgcccacattaaagaccagaaggaggtgccgcctatggtgaacgtcacccgcagtgaggcctcagaaggcaacataaccgttacttgtagagccagtgggttttatccctggaatattaccctatcgtggcgacaggacggagtgtctttgtcacatgacacgcagcagtggggagacgtcctacctgacggaaacgggacataccagacttgggtggccactcggatctgccaaggcgaggagcaaagattcacctgctacatggaacatagcggaaaccattccacacacccagtgccatccggaaaagtactggtcctccagtcacattggcagacctttcacgtgagcgccgttgcggcagcggctatctttgtaatcattatcttctacgtgcgctgttgtaaaaagaaaactagcgcagccgagggcccagagctagtgagtctccaggttttggaccagcatcccgtgggcaccagcgatcaccgcgacgccacccaactgggctttcagccactcatgagtgacctgggctccaccggctcgacggagggagcatag

SEQ ID NO: 107979 - DNA, 1023 bp, Artificial Sequence
  derived and/or modified sequence
atgggcctggggagggtgttgcttttcctagccgtcgcgttcccctttgcccctcccgctgctgctgcagagcctcactcactccgctacaacctcatggtactgtctcaggacggtagtgtgcaatccggcttcctggccgaggggcatttagacggccagcctttcctgcgatacgacaggcagaaacgaagagcgaaacctcagggccagtgggctgagaatgtgttaggcgctaagacatgggatactgaaacagaggacctcaccgagaacggccaggatcttcgcaggactctgactcacattaaagaccagaagggggtgccacagtcgtctagggctcagacgttagctatgaacgtgactaatttctggaaggaggacgcaatgaaaaccaaaactcactatagagccatgcaggccgactgcctccagaagctacagagatatctaaagtctggagtggccataagaagaacagtgccaccaatggtgaacgtcacatgctccgaggtatcggagggaaacatcacagtgacctgtagggcatcttccttctaccccagaaatatcactctgacatggaggcaagatggagtatctctgagtcacaacacacagcaatggggggatgttttaccagacggcaatgggacctaccagacctgggtggcaacccggattcggcaaggggaggagcagcgctttacttgttacatggaacacagcggcaatcacgggacccatccagtgccatctggcaaggccctagtactccaatctcagcgcacagatttcccgtacgtctccgcggctatgccatgcttcgtgatcattatcatcctgtgtgtgccttgttgcaagaagaagacatccgctgccgagggtccagagctggtctccttgcaagtcctagaccagcacccagtggggacaggtgaccatagagatgccgcacagctgggattccagccactgatgtcggcaaccggaagtacaggtagcacagaggggacttag

SEQ ID NO: 107980 - DNA, 1023 bp, Artificial Sequence
  derived and/or modified sequence
atgggtctcggaagagtcttgctttttttggcagtcgccttccccttcgctcctcccgctgccgctgccgaacctcattccctgaggtacaacctcatggtgcttagccaggatgggagtgtgcagtcggggtttcttgccgagggtcatctggatgggcagccttttttgaggtatgaccggcaaaagcggagggccaaaccgcagggccagtgggctgaagacgtcttgggggcaaaaacatgggataccgaaacagaggacctgacggagaacggacaggacttacgccgtactttaacgcacattaaggaccagaaaggagtgcctcagagctctcgagcacagacgctagcaatgaacgtcacaaacttctggaaagaagatgcaatgaagacaaagacgcattacagggcaatgcaggccgattgtctccagaagctgcagcgctacctgaaatcaggtgttgccattaggaggaccgtgccacctatggtgaacgtcacttgctcagaggtctccgagggtaatattactgtgacctgtcgagcaagcagcttctatccgaggaatattacccttacctggaggcaggacggggtgagcttgtcccataacacccagcagtggggtgacgtattaccagacggaaatgggacataccagacatgggtcgccacaagaatccgccagggggaagaacagagattcacatgctacatggaacatagcggaaaccacggcactcatccggtgccatctggaaaggcactcgtacttcagtcccagcgcactgactttccctacgtatcagctgcaatgccttgctttgtgatcattatcatcttgtgcgtcccttgctgcaaaaaaaaaacctcagcagccgaagggccagaattggtgtccctccaagttctggaccagcacccagtggggacaggcgaccaccgagacgctgcccaactgggtttccagccgttgatgtcagccacgggctctacggggagtactgagggagcctag

SEQ ID NO: 107981 - DNA, 1023 bp, Artificial Sequence
  derived and/or modified sequence
atgggtctcgggagggtgctgcttttcctggccgtcgcattccccttcgcaccgcctgccgctgcagccgaaccacacagtttgcgctataatcttatggtcctttcccaggacgggtccgtccagtctggattcctagctgaaggacacctggacggacagcccttcctgcgctatgacaggcaaaaacggagagcgaaaccacaagggcagtgggcagaagacgttcttggcgcagagacgtgggacacagagactgaagacttaactgagaatggtcaggatttgcggcgtaccctcacacacatcaaagaccagaaaggagtgccacagagcagcagagctcaaacactcgccatgaacgtgaccaacttctggaaggaggatgctatgaagactaaaactcactatagggccatgcaggccgattgtcttcagaagcttcagcgctaccttaaaagcggggtggccatccggaggactgtaccgcctatggtcaatgtcacttgcagcgaagtcagcgagggaaatatcacagtcacctgccgtgcatcttcattttaccctcggaatatcactttaacttggaggcaggatggggtttcccttagccacaacacacagcagtggggtgacgttttacccgatgggaacggcacgtaccagacgtgggtggctacaaggataagacagggtgaggagcagcgattcacctgctatatggaacactcgggaaatcatggaacccatccagtaccaagtggtaaggccctggttcttcaaagccagagaacagattttccctacgttagtgctgctatgccctgttttgtgattataatcatcctttgcgtcccatgttgtaagaaaaaaacaagtgccgcagaagggccagagcttgtgtccctgcaagtgttggatcagcaccccgtgggcacaggggaccaccgcgatgcagcccaactgggctttcagccactaatgtctgccacaggcagcactggctccacagagggagcctag

SEQ ID NO: 107982 - DNA, 1023 bp, Artificial Sequence
  derived and/or modified sequence
atgggcctgggaagagtgcttctgtttctggccgtggccttcccgtttgctcctcccgcagccgcagctgaacctcactcccttagatacaatctaatggtgctaagtcaagatgggagtgtccagagtggcttcctcgcagaaggccacctcgatggtcagccctttctgaggtacgatcgccagaaacgtagggctaagccacagggacagtgggccgaggatgtgttgggggcaaagacttgggataccgagactgaggacctgaccgagaacggtcaggacctcaggcgcactctgacacacataaaggatcagaaaggcgtgccccagtcctccagggcccagaccttggcgatgaatgtaactaatttctggaaagaggatgctatgaagacgaaaacacactacagggcaatgcaggctgattgcctgcagaaactgcagcggtatctgaagtctggcgtggccattaggcgaacggtgccgccaatggtgaacgtaatttgctctgaggtgtcagaaggaaacatcacagtgacatgccgggctagcagtttctatccaagaaacattaccttaacctggaggcaggacggcgtgagcctgagccataacacccagcagtggggggacgtcctgcctgatgggaacgggacgtatcaaacttgggtggctacccgaatcaggcaaggggaggagcaaaggttcacatgttacatggagcattctggcaatcacggtacacaccccgtgccaagtggtaaggccttagtactgcagtctcaaagaaccgacttcccttatgtgtccgccgcaatgccgtgcttcgtgatcattatcatcttgtgtgtcccctgttgcaagaagaagactagcgcagctgaaggcccagagttggtatctttgcaggtgctggaccaacaccccgtgggcaccggagaccacagagacgctgctcagctaggttttcagccgctgatgtctgcaaccgggagcacaggctctacagaaggaacatag

SEQ ID NO: 107983 - DNA, 1023 bp, Artificial Sequence
  derived and/or modified sequence
atgggcctcggtcgagtgcttctcttcctggccgttgctttcccgttcgctccgcctgcagctgctgcggagccccactccctcaggtataatctgatggtcctgtcccaggacgggtctgttcagtccgggtttctcgcagagggacatctggatgggcaaccctttctcaggtatgaccgccagaagcgtcgagcaaaacctcaggggcagtgggcagaagacgtgctgggtgccgagacttgggataccgaaaccgaggacctcacggaaaatggtcaggacctacgcaggactctgacccatattaaagatcagaaaggtgttcctcagtcatcccgggcacaaacactggccatgaatgtgacaaatttctggaaagaagatgcaatgaagactaaaacccattatagagcaatgcaggcagactgtctgcaaaagctgcagcggtacctgaaatcaggtgtggccatccgacgaacagtcccccctatggtaaacgtgacatgttctgaagtcagtgaaggcaatatcaccgtcacttgccgtgcctcatctttctacccacggaatataactctgacttggagacaggatggcgtgtcactgtcccataacacacagcaatggggagacgttttaccggatggcaatgggacataccagacttgggttgccacccgcatcagacaaggtgaagaacagaggttcacttgctacatggagcactccgggaaccatggaacacatccggtgccaagtggaaaagcgctggtgctgcagagccagcggaccgatttcccttacgtatctgccgcaatgccttgctttgttataatcataatcctttgcgtgccctgctgtaaaaagaagacatctgccgctgagggacccgagctggtgagcctccaagtgttggatcaacacccggtcggcacaggcgaccaccgagatgcagcgcagctgggatttcagcccctaatgtcagccaccggctcaacaggctcgactgaaggcgcatag

SEQ ID NO: 107984 - DNA, 1023 bp, Artificial Sequence
  derived and/or modified sequence
atggggctagggcgtgtgttgctgtttcttgctgtggcatttccttttgccccaccagcggcagcagcagaaccccactctctgcggtataatctcatggtgctgagccaggacggatcagtccagagcggattccttgccgaaggacatcttgatggtcagcccttcctgcgatacgaccgacagaagcgccgtgcaaaaccccaaggtcagtgggccgaaaatgtcctgggcgcaaaaacctgggacaccgagactgaggatctgacagagaacggccaagacctgaggagaaccctgactcacattaaagatcagaaaggagtgccgcagtcgtcgcgggcacagactcttgcaatgaatgtgaccaatttctggaaggaagatgctatgaagacgaaaacccactaccgggctatgcaggcagattgtctgcagaaactgcagcggtacttgaaatccggggtggctatcagacgaaccgtccctcctatggttaacgtaacttgtagtgaagtgtctgagggcaacatcactgtgacttgccgggcaagcagcttctaccctagaaatatcaccctgacttggagacaggacggcgtttcactcagtcataatacgcagcaatggggtgacgtgctgccagacggaaacggtacctaccagacctgggttgcgaccagaatccgccaaggcgaagagcagagatttacttgttacatggaacactcagggaaccacggcacgcacccagtgccatccggaaaggccctggtcctgcaatcccagcgcaccgactttccttatgtgagcgcagccatgccatgctttgtgattatcatcatactgtgcgtaccatgttgcaagaagaagacaagcgccgctgagggcccagaactggttagcctccaggttctcgatcagcacccggtaggtacgggtgaccacagagacgcagctcagctgggtttccaaccactgatgtcagccactggatctactggatcaacagaggggacttag

SEQ ID NO: 107985 - DNA, 1023 bp, Artificial Sequence
  derived and/or modified sequence
atgggtctcggaagggtgttgctgttcctagcagttgctttcccattcgcaccgcctgccgctgctgcagagccgcactccttgcgctacaatctcatggttttgagtcaggacgggagcgtgcagtcggggttcctcgcggaaggccatttagacggccagcccttcctgcggtatgaccggcagaaacgcagggccaaaccacagggtcaatgggctgaagacgtcttgggagcgaaaacctgggacaccgaaacagaagacctgactgagaatggccaagatctgcggagaacactcacccatattaaggaccagaaaggagtgccacagtcttcacgggcacagacactggccatgaacgtgaccaatttctggaaagaggatgcgatgaaaactaagactcactaccgggcaatgcaagcagactgcctgcagaagctgcagcggtacttgaagtccggggtggctattaggcgaaccgtgccacccatggtaaatgtaacttgtagcgaagtgtccgaaggcaacattacagtgacatgccgggcatcaagcttttatcctcggaacatcacactaacatggcggcaggatggcgtgtcgctctctcataatacacagcaatggggggatgtgctcccagacggcaacggaacataccagacgtgggtggccacaaggattcggcagggtgaggagcagcgctttacgtgctacatggaacattctgggaatcacggtacacacccagtgccctcaggtaaggccctggtcctgcaaagccaaagaacagacttcccatacgtgtccgcagccatgccctgttttgtgattatcatcattctgtgtgttccgtgctgtaagaagaaaaccagcgcagccgaggggccagaactcgtgtctctccaggttctcgatcagcatccggtcggaaccggtgatcacagagatgccgcacagctcgggtttcagcctctcatgagtgccacaggtagcactggatccaccgagggcgcatag

SEQ ID NO: 107986 - DNA, 954 bp, Artificial Sequence
  derived and/or modified sequence
tgaccacactcactacgctacaatctcatggtcctctctcaagatggctccgtgcagtcagggttcctggcagagggtcatttggatggccagccgttcctgaggtacgaccgccaaaagcgtcgggctaagccccaaggacaatgggcagaggacgtgctaggagccaaaacatgggacaccgaaaccgaagatcttactgaaaacggtcaggatctgaggaggactttgacacacatcaaggatcagaagggtgtgcctcagagttccagagcccaaacactggcaatgaatgtgacgaacttctggaaggaagatgcaatgaagaccaagacccattacagagcgatgcaggctgactgtctccaaaaactgcagagatacctgaagtccggggtggctatcaggcgtacagttccccctatggtaaacgtcacatgttcagaggtgagcgaaggaaacatcactgtcacgtgtcgtgcctcgagcttctacccccgtaatatcacactgacgtggcgccaggatggagtcagtctgagccataatacccagcaatggggcgatgtcctcccggacggcaacgggacctatcaaacctgggtggccacgcgtatccgccagggcgaggaacagcggttcacatgttatatggagcattcgggaaatcacggcactcatcccgttccgtctgggaaagcccttgtgctgcaatcccagcggacagactttccgtacgtcagtgccgcaatgccttgctttgtgatcataataattctgtgtgttccatgctgcaagaaaaagactagtgctgcagagggaccggagcttgtgagcctgcaggtcctggatcaacatccagtgggcaccggcgatcaccgcgacgctgctcaactgggatttcagccactcatgagcgccacgggcagtacgggatcaacggagggcgcttag

SEQ ID NO: 107987 - DNA, 831 bp, Artificial Sequence
  derived and/or modified sequence
ttccccttcgccccccccggcgccgccgccgagccccacagcctgagatacaacctgaccgtgctgagctgggacggcagcgtgcagagcggcttcctggccgaggtgcacctggacggccagcccttcctgagatacgacagacagaagtgcagagccaagccccagggccagtgggccgaggacgtgctgggcaacaagacctgggacagagagaccagagacctgaccggcaacggcaaggacctgagaatgaccctggcccacatcaaggaccagaaggaggtgccccccatggtgaacgtgaccagaagcgaggccagcgagggcaacatcaccgtgacctgcagagccagcagcttctaccccagaaacatcaccctgacctggagacaggacggcgtgagcctgagccacgacacccagcagtggggcgacgtgctgcccgacggcaacggcacctaccagacctgggtggccaccagaatctgccagggcgaggagcagagattcacctgctacatggagcacagcggcaaccacagcacccaccccgtgcccagcggcaaggtgctggtgctgcagagccactggcagaccttccacgtgagcgccgtggccgccgccgccgccgccatcttcgtgatcatcatcttctacgtgagatgctgcaagaagaagaccagcgccgccgagggccccgagctggtgagcctgcaggtgctggaccagcaccccgtgggcaccagcgaccacagagacgccacccagctgggcttccagcccctgatgagcgccctgggcagcaccggcagcaccgagggcgcctag

SEQ ID NO: 107988 - DNA, 672 bp, Artificial Sequence
  derived and/or modified sequence
ttccccttcgccccccccggcgccgccgccgagccccacagcctgagatacaacctgaccgtgctgagctgggacggcagcgtgcagagcggcttcctggccgaggtgcacctggacggccagcccttcctgagatacgacagacagaagtgcagagccaagccccagggccagtgggccgaggacgtgctgggcaacaagacctgggacagagagaccagagacctgaccggcaacggcaaggacctgagaatgaccctggcccacatcaaggaccagaaggaggtgccccccatggtgaacgtgaccagaagcgaggccagcgagggcaacatcaccgtgacctgcagagccagcagcttctaccccagaaacatcatcctgacctggagacaggacggcgtgagcctgagccacgacacccagcagtggggcgacgtgctgcccgacggcaacggcacctaccagacctgggtggccaccagaatctgcagaggcgaggagcagagattcacctgctacatggagcacagcggcaaccacagcacccaccccgtgcccagcggcaaggtgctggtgctgcagagccactggcagaccttccacgtgagcgccgtggccgccggctgctgctacttctgctactactacttcctgtgccccctgctgtag

SEQ ID NO: 107989 - DNA, 825 bp, Artificial Sequence
  derived and/or modified sequence
ttccccttcgccccccccggcgccgccgccgagccccacagcctgagatacaacctgaccgtgctgagctgggacggcagcgtgcagagcggcttcctgaccgaggtgcacctggacggccagcccttcctgagatgcgacagacagaagtgcagagccaagccccagggccagtgggccgaggacgtgctgggcaacaagacctgggacagagagaccagagacctgaccggcaacggcaaggacctgagaatgaccctggcccacatcaaggaccagaaggaggtgccccccatggtgaacgtgaccagaagcgaggccagcgagggcaacatcaccgtgacctgcagagccagcggcttctacccctggaacatcaccctgagctggagacaggacggcgtgagcctgagccacgacacccagcagtggggcgacgtgctgcccgacggcaacggcacctaccagacctgggtggccaccagaatctgccagggcgaggagcagagattcacctgctacatggagcacagcggcaaccacagcacccaccccgtgcccagcggcaaggtgctggtgctgcagagccactggcagaccttccacgtgagcgccgtggccgccgccgccatcttcgtgatcatcatcttctacgtgagatgctgcaagaagaagaccagcgccgccgagggccccgagctggtgagcctgcaggtgctggaccagcaccccgtgggcaccagcgaccacagagacgccacccagctgggcttccagcccctgatgagcgacctgggcagcaccggcagcaccgagggcgcctag

SEQ ID NO: 107990 - DNA, 1023 bp, Artificial Sequence
  derived and/or modified sequence
atgggcctgggcagagtgctgctgttcctggccgtggccttccccttcgccccccccgccgccgccgccgagccccacagcctgagatacaacctgatggtgctgagccaggacggcagcgtgcagagcggcttcctggccgagggccacctggacggccagcccttcctgagatacgacagacagaagagaagagccaagccccagggccagtgggccgagaacgtgctgggcgccaagacctgggacaccgagaccgaggacctgaccgagaacggccaggacctgagaagaaccctgacccacatcaaggaccagaagggcgtgccccagagcagcagagcccagaccctggccatgaacgtgaccaacttctggaaggaggacgccatgaagaccaagacccactacagagccatgcaggccgactgcctgcagaagctgcagagatacctgaagagcggcgtggccatcagaagaaccgtgccccccatggtgaacgtgacctgcagcgaggtgagcgagggcaacatcaccgtgacctgcagagccagcagcttctaccccagaaacatcaccctgacctggagacaggacggcgtgagcctgagccacaacacccagcagtggggcgacgtgctgcccgacggcaacggcacctaccagacctgggtggccaccagaatcagacagggcgaggagcagagattcacctgctacatggagcacagcggcaaccacggcacccaccccgtgcccagcggcaaggccctggtgctgcagagccagagaaccgacttcccctacgtgagcgccgccatgccctgcttcgtgatcatcatcatcctgtgcgtgccctgctgcaagaagaagaccagcgccgccgagggccccgagctggtgagcctgcaggtgctggaccagcaccccgtgggcaccggcgaccacagagacgccgcccagctgggcttccagcccctgatgagcgccaccggcagcaccggcagcaccgagggcacctag

SEQ ID NO: 107991 - DNA, 1023 bp, Artificial Sequence
  derived and/or modified sequence
atgggcctgggcagagtgctgctgttcctggccgtggccttccccttcgccccccccgccgccgccgccgagccccacagcctgagatacaacctgatggtgctgagccaggacggcagcgtgcagagcggcttcctggccgagggccacctggacggccagcccttcctgagatacgacagacagaagagaagagccaagccccagggccagtgggccgaggacgtgctgggcgccaagacctgggacaccgagaccgaggacctgaccgagaacggccaggacctgagaagaaccctgacccacatcaaggaccagaagggcgtgccccagagcagcagagcccagaccctggccatgaacgtgaccaacttctggaaggaggacgccatgaagaccaagacccactacagagccatgcaggccgactgcctgcagaagctgcagagatacctgaagagcggcgtggccatcagaagaaccgtgccccccatggtgaacgtgacctgcagcgaggtgagcgagggcaacatcaccgtgacctgcagagccagcagcttctaccccagaaacatcaccctgacctggagacaggacggcgtgagcctgagccacaacacccagcagtggggcgacgtgctgcccgacggcaacggcacctaccagacctgggtggccaccagaatcagacagggcgaggagcagagattcacctgctacatggagcacagcggcaaccacggcacccaccccgtgcccagcggcaaggccctggtgctgcagagccagagaaccgacttcccctacgtgagcgccgccatgccctgcttcgtgatcatcatcatcctgtgcgtgccctgctgcaagaagaagaccagcgccgccgagggccccgagctggtgagcctgcaggtgctggaccagcaccccgtgggcaccggcgaccacagagacgccgcccagctgggcttccagcccctgatgagcgccaccggcagcaccggcagcaccgagggcgcctag

SEQ ID NO: 107992 - DNA, 1023 bp, Artificial Sequence
  derived and/or modified sequence
atgggcctgggcagagtgctgctgttcctggccgtggccttccccttcgccccccccgccgccgccgccgagccccacagcctgagatacaacctgatggtgctgagccaggacggcagcgtgcagagcggcttcctggccgagggccacctggacggccagcccttcctgagatacgacagacagaagagaagagccaagccccagggccagtgggccgaggacgtgctgggcgccgagacctgggacaccgagaccgaggacctgaccgagaacggccaggacctgagaagaaccctgacccacatcaaggaccagaagggcgtgccccagagcagcagagcccagaccctggccatgaacgtgaccaacttctggaaggaggacgccatgaagaccaagacccactacagagccatgcaggccgactgcctgcagaagctgcagagatacctgaagagcggcgtggccatcagaagaaccgtgccccccatggtgaacgtgacctgcagcgaggtgagcgagggcaacatcaccgtgacctgcagagccagcagcttctaccccagaaacatcaccctgacctggagacaggacggcgtgagcctgagccacaacacccagcagtggggcgacgtgctgcccgacggcaacggcacctaccagacctgggtggccaccagaatcagacagggcgaggagcagagattcacctgctacatggagcacagcggcaaccacggcacccaccccgtgcccagcggcaaggccctggtgctgcagagccagagaaccgacttcccctacgtgagcgccgccatgccctgcttcgtgatcatcatcatcctgtgcgtgccctgctgcaagaagaagaccagcgccgccgagggccccgagctggtgagcctgcaggtgctggaccagcaccccgtgggcaccggcgaccacagagacgccgcccagctgggcttccagcccctgatgagcgccaccggcagcaccggcagcaccgagggcgcctag

SEQ ID NO: 107993 - DNA, 1023 bp, Artificial Sequence
  derived and/or modified sequence
atgggcctgggcagagtgctgctgttcctggccgtggccttccccttcgccccccccgccgccgccgccgagccccacagcctgagatacaacctgatggtgctgagccaggacggcagcgtgcagagcggcttcctggccgagggccacctggacggccagcccttcctgagatacgacagacagaagagaagagccaagccccagggccagtgggccgaggacgtgctgggcgccaagacctgggacaccgagaccgaggacctgaccgagaacggccaggacctgagaagaaccctgacccacatcaaggaccagaagggcgtgccccagagcagcagagcccagaccctggccatgaacgtgaccaacttctggaaggaggacgccatgaagaccaagacccactacagagccatgcaggccgactgcctgcagaagctgcagagatacctgaagagcggcgtggccatcagaagaaccgtgccccccatggtgaacgtgatctgcagcgaggtgagcgagggcaacatcaccgtgacctgcagagccagcagcttctaccccagaaacatcaccctgacctggagacaggacggcgtgagcctgagccacaacacccagcagtggggcgacgtgctgcccgacggcaacggcacctaccagacctgggtggccaccagaatcagacagggcgaggagcagagattcacctgctacatggagcacagcggcaaccacggcacccaccccgtgcccagcggcaaggccctggtgctgcagagccagagaaccgacttcccctacgtgagcgccgccatgccctgcttcgtgatcatcatcatcctgtgcgtgccctgctgcaagaagaagaccagcgccgccgagggccccgagctggtgagcctgcaggtgctggaccagcaccccgtgggcaccggcgaccacagagacgccgcccagctgggcttccagcccctgatgagcgccaccggcagcaccggcagcaccgagggcacctag

SEQ ID NO: 107994 - DNA, 954 bp, Artificial Sequence
  derived and/or modified sequence
tgaccccacagcctgagatacaacctgatggtgctgagccaggacggcagcgtgcagagcggcttcctggccgagggccacctggacggccagcccttcctgagatacgacagacagaagagaagagccaagccccagggccagtgggccgaggacgtgctgggcgccaagacctgggacaccgagaccgaggacctgaccgagaacggccaggacctgagaagaaccctgacccacatcaaggaccagaagggcgtgccccagagcagcagagcccagaccctggccatgaacgtgaccaacttctggaaggaggacgccatgaagaccaagacccactacagagccatgcaggccgactgcctgcagaagctgcagagatacctgaagagcggcgtggccatcagaagaaccgtgccccccatggtgaacgtgacctgcagcgaggtgagcgagggcaacatcaccgtgacctgcagagccagcagcttctaccccagaaacatcaccctgacctggagacaggacggcgtgagcctgagccacaacacccagcagtggggcgacgtgctgcccgacggcaacggcacctaccagacctgggtggccaccagaatcagacagggcgaggagcagagattcacctgctacatggagcacagcggcaaccacggcacccaccccgtgcccagcggcaaggccctggtgctgcagagccagagaaccgacttcccctacgtgagcgccgccatgccctgcttcgtgatcatcatcatcctgtgcgtgccctgctgcaagaagaagaccagcgccgccgagggccccgagctggtgagcctgcaggtgctggaccagcaccccgtgggcaccggcgaccacagagacgccgcccagctgggcttccagcccctgatgagcgccaccggcagcaccggcagcaccgagggcgcctag

SEQ ID NO: 107995 - protein, 608 aa, Artificial Sequence
  derived and/or modified sequence
MRPVSVWQWSPWGLLLCLLCSSCLGSPSPSTGPEKKAGSQGLRFRLAGFPRKPYEGRVEIQRAGEWGTICDDDFTLQAAHILCRELGFTEATGWTHSAKYGPGTGRIWLDNLSCSGTEQSVTECASRGWGNSDCTHDEDAGVICKDQRLPGFSDSNVIEARVRLKGGAHPGEGRVEVLKASTWGTVCDRKWDLHAASVVCRELGFGSAREALSGARMGQGMGAIHLSEVRCSGQELSLWKCPHKNITAEDCSHSQDAGVRCNLPYTGAETRIRLSGGRSQHEGRVEVQIGGPGPLRWGLICGDDWGTLEAMVACRQLGLGYANHGLQETWYWDSGNITEVVMSGVRCTGTELSLDQCAHHGTHITCKRTGTRFTAGVICSETASDLLLHSALVQETAYIEDRPLHMLYCAAEENCLASSARSANWPYGHRRLLRFSSQIHNLGRADFRPKAGRHSWVWHECHGHYHSMDIFTHYDILTPNGTKVAEGHKASFCLEDTECQEDVSKRYECANFGEQGITVGCWDLYRHDIDCQWIDITDVKPGNYILQVVINPNFEVAESDFTNNAMKCNCKYDGHRIWVHNCHIGDAFSEEANRRFERYPGQTSNQII

SEQ ID NO: 107996 - DNA, 1827 bp, Artificial Sequence
  derived and/or modified sequence
atgaggcccgtgtccgtctggcagtggagtccctgggggctgttactatgtctactttgcagttcctgtctgggatcccccagcccaagtacaggaccggagaaaaaggccggcagtcagggactgaggtttaggttggccggctttccacgaaaaccctacgagggtcgggttgaaatccagagagcgggcgaatggggtaccatctgcgatgatgatttcacactgcaggcggcacatatcctgtgtagagaactagggttcacagaagccacagggtggactcattctgctaagtatggacctggaaccggtcgcatatggttggacaacctgtcatgttctggcacagaacagtctgtgacagaatgtgcatcacgaggctggggaaattccgattgcacccacgacgaagacgccggcgtaatttgtaaggatcagagactcccaggtttttccgactctaacgtgattgaagctcgcgtcaggctgaagggaggggcgcacccaggggagggaagagtagaagttcttaaagcgagcacatggggcactgtatgcgaccggaaatgggacctccacgccgcctctgtcgtgtgccgcgagctgggctttggctcagcacgcgaggctctctcaggggcaaggatgggccagggaatgggtgccattcacctaagcgaggtgaggtgttctggccaggaactgtcactgtggaagtgtcctcacaagaacattaccgctgaggattgtagccactcgcaggatgccggagtgcggtgtaatttaccatataccggagccgaaactcgaatacgcttaagtggcggacgctcccagcacgaaggccgtgtggaggtccagatcggggggccggggcctttgcgatggggccttatatgtggggatgattggggaacattagaggcaatggtggcgtgccgccagctgggcctcggatatgctaatcacggcctacaggaaacgtggtattgggactctggcaacattacagaagtggttatgtctggcgtcagatgcaccgggaccgaactcagcctggaccaatgtgctcaccacggtacccatataacctgtaagagaaccggtaccaggtttaccgcaggcgttatttgctcggaaactgcctccgatctgcttcttcactctgcactggtccaggagacagcctatatcgaagacaggcccctgcacatgctctactgcgcggctgaagagaattgcctggctagcagcgccaggtccgccaattggccctacggccatagacgtctcttgagattttcaagtcagattcataacctggggagagctgattttcgcccaaaggcgggaagacactcctgggtttggcatgagtgccacggccattaccacagcatggatattttcactcactatgatatcctgacccctaacggcaccaaggtggctgagggccataaagcctccttctgcctggaagatacagagtgccaggaggacgtgagtaaacgctacgagtgcgcgaatttcggggagcagggaatcactgtggggtgttgggatctgtacagacacgatattgattgtcagtggatagatattaccgatgtgaaaccgggcaactacatcctgcaggtggtgattaaccctaactttgaagtggctgaaagcgattttacaaataatgcgatgaagtgtaattgtaagtatgatgggcaccgcatatgggttcataactgccatataggagacgcattttccgaagaagcaaacaggcgatttgagagatacccgggccagactagtaatcaaatcatctag

SEQ ID NO: 107997 - DNA, 1827 bp, Artificial Sequence
  derived and/or modified sequence
atgaggcctgtgtctgtgtggcagtggagcccctggggcctgctgctgtgcctgctgtgcagcagctgcctgggcagccccagccccagcactggacctgagaagaaggccggcagccagggcctgcgcttccggctggccggcttccccaggaagccctatgagggccgggtggagatccagagagctggggagtggggcaccatctgtgatgatgacttcaccctgcaggccgcccacatcctgtgccgggagctgggcttcacagaggccaccggctggacccacagcgccaagtatggccctggcaccggccgcatctggctggacaacctgagctgcagcggcacagagcagagcgtgacagaatgtgccagccggggctggggcaacagcgactgcacccatgatgaagatgctggggtcatctgcaaggaccagaggctgcccggcttcagtgacagcaatgtcatcgaggcccgggtgcggctgaagggcggggcccaccctggagagggccgggtggaggtgctgaaggccagcacctggggcaccgtgtgtgacaggaagtgggacctgcatgctgcctctgtggtgtgccgggagctgggctttggaagtgcccgggaggccctgagcggggccaggatgggccagggcatgggcgccatccacctgtctgaggtgcgctgcagcggccaggagctgagcctgtggaagtgcccccacaagaacatcacagctgaggactgcagccacagccaggatgctggggtgcgctgcaacctgccctacaccggggctgagacccgcatccggctgagcggcggccgcagccagcacgagggccgggtggaggtgcagattggaggccctggccccctgcgctggggcctcatctgtggagatgactggggcaccctggaggccatggtggcctgccggcagctgggcctgggctacgccaaccacggcctgcaggagacctggtactgggacagcggcaacatcacagaggtggtgatgtctggagtgcgctgcaccggcacagagctgagcctggaccagtgtgcccaccacggcacccacatcacctgcaagaggacaggcacccgcttcaccgctggggtcatctgcagcgagacagccagtgacctgctgctgcacagcgccctggtgcaggagacagcctacatcgaggaccggcccctgcacatgctgtactgtgccgctgaggagaactgcctggccagcagcgcccggagcgccaactggccctacggccaccggcggctgctgcgcttcagcagccagatccacaacctgggccgggctgacttccggcccaaggccggccgccacagctgggtgtggcatgagtgccacggccactaccacagcatggacatcttcacccactatgacatcctgacccccaacggcaccaaggtggccgagggccacaaggccagcttctgcctggaggacacagagtgccaggaggatgtgtccaagagatatgaatgtgccaactttggagagcagggcatcaccgtgggctgctgggacctgtacagacatgacatcgactgccagtggattgacatcacagatgtgaagccaggcaactacatcctgcaggtggtgatcaaccccaactttgaggtggccgagagtgacttcaccaacaatgccatgaagtgcaactgcaagtatgatggccaccgcatctgggtgcacaactgccacatcggagatgccttcagcgaggaggccaacagaagatttgagcgctacccaggccagaccagcaaccagatcatctag

SEQ ID NO: 107998 - DNA, 2398 bp, Artificial Sequence
  derived and/or modified sequence
tttttttttttttttggaagtcctaggactgatctccaggaccagcactcttctcccagcccttagggtcctgctcggccaaggccttccctgccatgcgacctgtcagtgtctggcagtggagcccctgggggctgctgctgtgcctgctgtgcagttcgtgcttggggtctccgtccccttccacgggccctgagaagaaggccgggagccaggggcttcggttccggctggctggcttccccaggaagccctacgagggccgcgtggagatacagcgagctggtgaatggggcaccatctgcgatgatgacttcacgctgcaggctgcccacatcctctgccgggagctgggcttcacagaggccacaggctggacccacagtgccaaatatggccctggaacaggccgcatctggctggacaacttgagctgcagtgggaccgagcagagtgtgactgaatgtgcctcccggggctgggggaacagtgactgtacgcacgatgaggatgctggggtcatctgcaaagaccagcgcctccctggcttctcggactccaatgtcattgaggcccgtgtccgtctaaagggcggcgcccaccctggagagggccgggtagaagtcctgaaggccagcacatggggcacagtctgtgaccgcaagtgggacctgcatgcagccagcgtggtgtgtcgggagctgggcttcgggagtgctcgagaagctctgagtggcgctcgcatggggcagggcatgggtgctatccacctgagtgaagttcgctgctctggacaggagctctccctctggaagtgcccccacaagaacatcacagctgaggattgttcacatagccaggatgccggggtccggtgcaacctaccttacactggggcagagaccaggatccgactcagtgggggccgcagccaacatgaggggcgagtcgaggtgcaaatagggggacctgggccccttcgctggggcctcatctgtggggatgactgggggaccctggaggccatggtggcctgtaggcaactgggtctgggctacgccaaccacggcctgcaggagacctggtactgggactctgggaatataacagaggtggtgatgagtggagtgcgctgcacagggactgagctgtccctggatcagtgtgcccatcatggcacccacatcacctgcaagaggacagggacccgcttcactgctggagtcatctgttctgagactgcatcagatctgttgctgcactcagcactggtgcaggagaccgcctacatcgaagaccggcccctgcatatgttgtactgtgctgcggaagagaactgcctggccagctcagcccgctcagccaactggccctatggtcaccggcgtctgctccgattctcctcccagatccacaacctgggacgagctgacttcaggcccaaggctgggcgccactcctgggtgtggcacgagtgccatgggcattaccacagcatggacatcttcactcactatgatatcctcaccccaaatggcaccaaggtggctgagggccacaaagctagtttctgtctcgaagacactgagtgtcaggaggatgtctccaagcggtatgagtgtgccaactttggagagcaaggcatcactgtgggttgctgggatctctaccggcatgacattgactgtcagtggattgacatcacggatgtgaagccaggaaactacattctccaggttgtcatcaacccaaactttgaagtagcagagagtgactttaccaacaatgcaatgaaatgtaactgcaaatatgatggacatagaatctgggtgcacaactgccacattggtgatgccttcagtgaagaggccaacaggaggtttgaacgctaccctggccagaccagcaaccagattatctaagtgccactgccctctgcaaaccaccactggcccctaatggcaggggtctgaggctgccattacctcaggagcttaccaagaaacccatgtcagcaaccgcactcatcagaccatgcactatggatgtggaactgtcaagcagaagttttcaccctccttcagaggccagctgtcagtatctgtagccaagcatgggaatctttgctcccaggcccagcaccgagcagaacagaccagagcccaccacaccacaaagagcagcacctgactaactgcccacaaaagatggcagcagctcattttctttaataggaggtcaggatggtcagctccagtatctcccctaagtttagggggatacagctttacctctagccttttggtgggggaaaagatccagccctcccacctcattttttactataatatgttgctaggtataattttattttatataaaaagtgtttctgtgattc

SEQ ID NO: 107999 - DNA, 1827 bp, Artificial Sequence
  derived and/or modified sequence
atgcggcccgtgagcgtgtggcagtggagcccctggggcctgctgctgtgcctgctgtgcagctcctgcctgggctctccatcaccatcaacagggcccgaaaagaaggcaggatcccagggtcttaggttcagattggcgggcttcccgaggaagccttatgaaggccgggtagagatccagagggcaggtgaatggggcactatttgtgatgacgatttcacactgcaggcagcgcatattctctgcagggagctagggtttacagaggctacaggctggacacacagcgcaaaatacggacctggcaccggccgtatctggctagacaatctgagctgctctggaaccgaacaaagcgtcacagaatgcgcatccagggggtgggggaacagcgactgtacccacgatgaggatgccggtgtcatttgtaaggatcaaaggctccctggattttctgactccaacgtgattgaagctcgcgtccgcctgaaagggggagctcatccaggggaaggaagggtcgaagtgttgaaagcctccacatggggtaccgtgtgtgatcgtaagtgggatctccatgccgccagtgttgtgtgcagagagcttggcttcggaagcgcgagagaggctttgtccggcgctagaatgggtcaaggcatgggagctatccacctgagcgaggtacgctgttccggacaggaattatctctctggaaatgtcctcataagaatatcacggcagaggattgctcccactcgcaggacgccggggtccgatgcaatctgccttatacaggcgccgaaacaagaattaggttgtccgggggcagatcccagcatgagggcagggtggaggtgcagattggcgggcccgggcctctgcgctggggactgatttgtggtgatgactggggtaccctcgaagccatggtagcctgccggcaactcggattgggctacgccaatcacggacttcaggagacttggtactgggacagtggcaatattacagaggtcgttatgagcggggtaaggtgtaccggaacagagctgtccctggaccagtgcgcccaccacggcactcatattacgtgcaaaagaacaggaacccggtttacagctggagtcatttgttccgagaccgcctcagatctgctgttacatagcgccctcgtgcaagagacagcatacatagaggacagacctctgcacatgctgtactgtgccgcggaagagaattgcttggcatcctctgctcgatcagccaactggccatacggccaccgccgcctccttcgattttcctctcaaatccacaatctcgggcgggctgattttcggcccaaggcaggaagacactcatgggtgtggcacgagtgccacggtcactaccactccatggatatcttcacacactacgacatccttaccccgaatggcaccaaggttgcggaaggtcataaagcatcgttttgtctcgaagacacagagtgccaggaggacgtgagcaaaagatacgaatgtgccaactttggggagcagggcataactgtaggatgctgggatctgtataggcacgacattgactgtcagtggatcgacattacggatgtgaagccaggaaactacattttgcaggtggtgatcaacccgaattttgaagttgcagaaagcgattttaccaataacgccatgaaatgtaattgcaaatatgatgggcaccggatctgggttcacaattgccatatcggcgacgccttctccgaggaggcaaaccgccggttcgagaggtacccagggcaaacatcaaaccagattatatag

SEQ ID NO: 108000 - DNA, 1827 bp, Artificial Sequence
  derived and/or modified sequence
atgcgccctgtttcagtttggcagtggtccccttggggtctcctgctatgcctgctctgctccagctgtttggggtcccctagtccctccactgggccagaaaagaaagctggttcccagggcctacggtttcgcctcgctggattccctcgcaagccctatgagggacgggtggaaattcagcgtgcaggggagtgggggactatttgcgacgacgattttactctgcaggcagctcatattctgtgccgcgaactcgggtttactgaagctacaggttggactcactccgccaaatacggcccaggaactggccgaatctggctcgacaatttgagctgttcagggactgaacaatccgtgaccgagtgtgcttctcgtggctgggggaattccgactgcacccacgatgaggacgctggtgtcatctgtaaggaccagcggctgcctggattttcagatagcaatgttatagaagctcgcgtaaggttgaagggaggagctcatcctggggaaggtcgggtcgaagtcttaaaagcctcgacgtgggggacggtgtgcgaccggaaatgggatctacacgctgccagtgtggtttgccgggagctcggcttcggaagtgctcgtgaagctttgagcggtgctcgaatgggtcaaggaatgggcgcaatccacttatccgaagtgcgatgtagcgggcaggagctgtcgctgtggaaatgtcctcataagaacatcacagccgaagattgcagtcattcccaggatgccggtgtaagatgcaatctgccttatactggggctgaaactcgtatcagattgtccggtggcagatcccaacacgaagggagagtggaggtgcagattggcggtcctggtcctcttcggtggggtttaatttgcggggatgactggggaacgctggaagcaatggtggcgtgccggcaacttggtctaggctacgcaaatcacggattacaggagacctggtactgggactcaggaaacatcacagaggttgtaatgagtggggtccggtgcactgggacagagctcagcctggatcagtgcgcccatcatggcacccacatcacgtgcaagaggacaggcacacgctttactgcaggtgtgatatgttccgaaaccgccagtgacctgctcctccacagtgccctagtccaggagacagcctacatcgaggatcggccattacacatgctttactgcgccgcagaggagaactgtctcgcctcttcggccagaagcgcgaattggccttacggccaccggcgtttactcaggttctcctcccagatccacaatttgggcagggctgatttccggccaaaggcaggacgccattcgtgggtgtggcatgagtgtcatggccactatcactccatggacatcttcacccactacgacatcctcacccctaacggtaccaaggtggcggagggacataaggcatcattttgtctggaggatactgaatgtcaggaggatgtcagcaaacgctacgagtgtgcaaacttcggggaacagggcatcaccgttggctgctgggatctttacaggcacgacatagattgtcagtggattgacatcacagacgtgaagcccggtaactacatccttcaagtggtgatcaatcctaactttgaggtggcagagtctgatttcacaaacaatgcaatgaaatgtaattgcaagtacgatggacacagaatttgggttcataactgccacatcggggacgcctttagcgaagaagcaaatcgtcggtttgaacgttacccaggccagacatcgaatcaaatcatttag

SEQ ID NO: 108001 - DNA, 1827 bp, Artificial Sequence
  derived and/or modified sequence
atgagacccgtgagcgtgtggcagtggagcccctggggcctgctgctgtgcctgctgtgcagcagctgcctgggcagccccagccccagcaccggccccgagaagaaggccggcagccagggcctgagattcagactggccggcttccccagaaagccctacgagggcagagtggagatccagagagccggcgagtggggcaccatctgcgacgacgacttcaccctgcaggccgcccacatcctgtgcagagagctgggcttcaccgaggccaccggctggacccacagcgccaagtacggccccggcaccggcagaatctggctggacaacctgagctgcagcggcaccgagcagagcgtgaccgagtgcgccagcagaggctggggcaacagcgactgcacccacgacgaggacgccggcgtgatctgcaaggaccagagactgcccggcttcagcgacagcaacgtgatcgaggccagagtgagactgaagggcggcgcccaccccggcgagggcagagtggaggtgctgaaggccagcacctggggcaccgtgtgcgacagaaagtgggacctgcacgccgccagcgtggtgtgcagagagctgggcttcggcagcgccagagaggccctgagcggcgccagaatgggccagggcatgggcgccatccacctgagcgaggtgagatgcagcggccaggagctgagcctgtggaagtgcccccacaagaacatcaccgccgaggactgcagccacagccaggacgccggcgtgagatgcaacctgccctacaccggcgccgagaccagaatcagactgagcggcggcagaagccagcacgagggcagagtggaggtgcagatcggcggccccggccccctgagatggggcctgatctgcggcgacgactggggcaccctggaggccatggtggcctgcagacagctgggcctgggctacgccaaccacggcctgcaggagacctggtactgggacagcggcaacatcaccgaggtggtgatgagcggcgtgagatgcaccggcaccgagctgagcctggaccagtgcgcccaccacggcacccacatcacctgcaagagaaccggcaccagattcaccgccggcgtgatctgcagcgagaccgccagcgacctgctgctgcacagcgccctggtgcaggagaccgcctacatcgaggacagacccctgcacatgctgtactgcgccgccgaggagaactgcctggccagcagcgccagaagcgccaactggccctacggccacagaagactgctgagattcagcagccagatccacaacctgggcagagccgacttcagacccaaggccggcagacacagctgggtgtggcacgagtgccacggccactaccacagcatggacatcttcacccactacgacatcctgacccccaacggcaccaaggtggccgagggccacaaggccagcttctgcctggaggacaccgagtgccaggaggacgtgagcaagagatacgagtgcgccaacttcggcgagcagggcatcaccgtgggctgctgggacctgtacagacacgacatcgactgccagtggatcgacatcaccgacgtgaagcccggcaactacatcctgcaggtggtgatcaaccccaacttcgaggtggccgagagcgacttcaccaacaacgccatgaagtgcaactgcaagtacgacggccacagaatctgggtgcacaactgccacatcggcgacgccttcagcgaggaggccaacagaagattcgagagataccccggccagaccagcaaccagatcatctag

SEQ ID NO: 108002 - DNA, 378 bp, Artificial Sequence
  derived and/or modified sequence
gagttcatcgaggagctgctgagcccccccttcggcggcctggtggccttcgtgaaggaggccgaggccctgatcgagagaggccaggccgagagactgagaggcgaggaggccagagtgacccagctgatcagaggcttcggcagcagctggaagagcagcgtggagagcctgagccaggacgtgatgagaagcttcaccaacttcagaaacggcaccagcatcatccagggcgccctgacccagctgatccagctgtaccacagattccacagagtgctgagccagccccagctgagagccctgcccgccagagccgagctgatcaacatccaccacctgatggtggagctgaagaagcacaagcccaacttctag

SEQ ID NO: 108003 - DNA, 378 bp, Artificial Sequence
  derived and/or modified sequence
gagttcatcgaagagctgcttagtccaccattcggtggcctcgttgcatttgtgaaggaagcagaagcgctcattgagcggggccaggcagagagactccggggggaagaagcccgcgtgacgcaactgatccgaggttttggcagtagctggaagtctagtgtcgaatccctatcccaggacgtcatgaggtcttttaccaattttcgcaacggtacgtcaattatccaaggggctttaacacagctaatccaactatatcacaggttccatagagtcctatcccaacctcaactgcgtgctttgcccgccagggcagagctgatcaacatccatcatctgatggtagagttaaaaaagcataaacctaacttctag

SEQ ID NO: 108004 - DNA, 378 bp, Artificial Sequence
  derived and/or modified sequence
gagtttatcgaagagctgctctcacctccctttggggggttggtagctttcgtcaaggaagctgaagccctgattgagaggggacaggctgagcgtctccgcggcgaggaggcccgcgtgacccagttgatccgagggttcggcagtagttggaagtcttcagtggagtccctgtcacaggacgtcatgcggtctttcaccaactttcgcaatgggacctccatcatccaaggagcactcacccaactgatccaactgtaccacagattccacagggttttgtcccaaccgcagctgagagccctgcctgcccgagctgagttgattaatatccaccacttgatggtcgagctaaagaaacacaaacccaatttttag

SEQ ID NO: 108005 - DNA, 378 bp, Artificial Sequence
  derived and/or modified sequence
gagttcatcgaggagctgctgagccccccatttggaggcctggtggcctttgtgaaggaggccgaggccctgattgagcggggccaggccgagcggctgcggggggaggaggcccgggtgacccagctgatccggggcttcggcagctcctggaagagctctgtggagagcctgagccaggatgtgatgaggagcttcaccaacttcagaaatggcaccagcatcatccagggcgccctgacccagctgatccagctgtaccaccgcttccaccgggtgctgagccagccccagctgcgggccctgcctgcccgggcagagctgatcaacatccaccacctgatggtggagctgaagaagcacaagcccaacttctag

SEQ ID NO: 108006 - DNA, 378 bp, Artificial Sequence
  derived and/or modified sequence
gagttcatcgaggagctgctgagcccccccttcggcggcctggtggcattcgtgaaagaggccgaggcactcatcgagaggggacaggctgagcgcctcagaggagaggaagcccgtgtcacccagctgattagaggtttcgggagcagctggaaaagttctgtggagtcactgtcacaggacgtgatgcggtctttcacaaatttccggaacgggacgtcaatcatccagggcgcactcacccagctcattcagctgtatcacaggttccatagagttctgtcccagccccagctgcgcgcactcccagcaagagcagagctgattaacattcatcaccttatggtggagctaaaaaaacacaaacccaacttctag

SEQ ID NO: 108007 - DNA, 378 bp, Artificial Sequence
  derived and/or modified sequence
gagttcatcgaggagctgctgagcccccccttcggcggcctggtggccttcgtgaaggaagcggaggccctcattgaacgcggccaggccgaacgcctgcggggagaagaagctcgtgtgacccagctcatacgcgggtttggaagttcttggaagtcaagcgttgagtctttatcccaagatgtgatgcgttcctttacaaatttccgtaatggtacaagcattatccaaggtgcactcacccagcttatccagctctaccatcggtttcatcgtgtgctgtcccaaccgcagctccgagctctccccgccagggctgagttaattaatatacaccatctcatggtcgagcttaagaaacacaaacccaatttctag

SEQ ID NO: 108008 - DNA, 378 bp, Artificial Sequence
  derived and/or modified sequence
gagttcattgaagagcttttgagccctcccttcgggggattagtagccttcgtaaaagaagccgaggcgctgatcgagcgcggtcaggcagagcgcttgaggggggaggaggccagggttacccagctcattcgtggattcgggtctagttggaaatcatcggttgaatctctctcgcaggacgtcatgcgatcttttaccaacttccgcaacggcacgtctatcatccagggtgccctaacacaactgatacagttgtatcacaggtttcatcgagttctttcgcagcctcagctccgagccctgccggctcgagctgagctgataaatatccatcacctcatggtcgaactgaagaaacataaaccaaatttctag

SEQ ID NO: 108009 - DNA, 378 bp, Artificial Sequence
  derived and/or modified sequence
gaattcatcgaggagctgttatcacccccttttggcggtctagtggccttcgtcaaggaggctgaagccctgattgaacgagggcaagcggagcggttacggggtgaggaagcgcgagtaacacaactgatcagaggtttcggcagttcctggaagtcttccgtggagtctctgagccaggatgtcatgagaagctttacaaattttagaaacggcacctccatcatacaaggagcccttacacagctgatccagctgtaccataggttccaccgggtcctttcccaaccgcagctacgtgcactgccagcccgagcagagctgatcaacatccatcacctgatggtcgaacttaaaaaacacaagccaaatttctag

SEQ ID NO: 108010 - DNA, 947 bp, Artificial Sequence
  derived and/or modified sequence
gaattcattgaagagttgctgtctcccccttttgggggtttagtggcatttgtgaaggaggctgaggctttgattgagcgtggacaggctgagcgacttcgaggggaagaagcccgggtaactcagctgatccgtggctttggtagttcctggaaatcatcagtggaatctctgagtcaggatgtaatgcggagtttcaccaacttcagaaatggcaccagtatcattcagggagcgctgacccagctgatccagctctatcatcgcttccaccgggtgctgtcccagccgcagctccgagccctccctgcccgggctgagctcatcaacattcaccaccttatggtggagctcaagaagcataagcccaacttctgatgtgccagaaaccgccctgagatctgccggtcatctccatggacttctgcaccccattccatacccttcttcacctggggtaccccttccagttttccccttgcttcccaggcccttgacatggcttacctgccttcactcccagcaccttgcccaacaggataagctggatccccttggccttctgaatatcccagtgtcttcaggtttcccaagaccacttccctgtgggcttccaaaatggcctttatcatttctccagtctgtcaccctcctttcctgctcccatacacccaaggcttgtttcttcccctgtaaaaaccactgcctcaatctctggttcactcaactagtcaccatgtcctgaggcatgaagcctcctcagctcttggaattgctggcaaggggtgactgcctctgagtcattgtgtttttcaaagtgatttcttttctgtagctttttgacctaagatctcagcaatttgaacactaacctctcccctcctggctcaagaattactccgaagtcagtctgcagaaaataaatatttagtatgacatgacactta

SEQ ID NO: 108011 - protein, 666 aa, Artificial Sequence
  derived and/or modified sequence
MTGTPKTQEGAKDLEVDMNKTEVTPRLWTTCRDGEVLLRLSKHGPGHETPMTIPEFFRESVNRFGTYPALASKNGKKWEILNFNQYYEACRKAAKSLIKLGLERFHGVGILGFNSAEWFITAVGAILAGGLCVGIYATNSAEVCQYVITHAKVNILLVENDQQLQKILSIPQSSLEPLKAIIQYRLPMKKNNNLYSWDDFMELGRSIPDTQLEQVIESQKANQCAVLIYTSGTTGIPKGVMLSHDNITWIAGAVTKDFKLTDKHETVVSYLPLSHIAAQMMDIWVPIKIGALTYFAQADALKGTLVSTLKEVKPTVFIGVPQIWEKIHEMVKKNSAKSMGLKKKAFVWARNIGFKVNSKKMLGKYNTPVSYRMAKTLVFSKVKTSLGLDHCHSFISGTAPLNQETAEFFLSLDIPIGELYGLSESSGPHTISNQNNYRLLSCGKILTGCKNMLFQQNKDGIGEICLWGRHIFMGYLESETETTEAIDDEGWLHSGDLGQLDGLGFLYVTGHIKEILITAGGENVPPIPVETLVKKKIPIISNAMLVGDKLKFLSMLLTLKCEMNQMSGEPLDKLNFEAINFCRGLGSQASTVTEIVKQQDPLVYKAIQQGINAVNQEAMNNAQRIEKWVILEKDFSIYGGELGPMMKLKRHFVAQKYKKQIDHMYH

SEQ ID NO: 108012 - DNA, 2001 bp, Artificial Sequence
  derived and/or modified sequence
atgaccggcaccccgaagacgcaggaaggggccaaagatctggaggtggacatgaacaagaccgaagtaactccaagattgtggacgacctgtcgcgatggcgaagtgctcctgagactgagtaagcatggccctggccacgagactcccatgactattcctgagttttttagggagtcagtgaataggtttggcacctatcccgccctcgcgtccaagaacgggaaaaagtgggagatactgaacttcaatcaatactatgaggcatgcaggaaggccgccaaatcacttatcaaactcggactggaacgcttccacggagtcggcattctcggattcaattctgctgagtggttcatcaccgccgtgggtgcaatccttgctggagggctgtgcgtggggatctatgctacaaattcagccgaggtttgccagtatgtcatcacgcacgccaaggttaacattttgctagttgaaaacgaccagcagctgcagaaaatcttgtcaatcccacagagctctctggagcccctgaaggcaatcattcaatatcggctgcccatgaagaagaataacaatctgtatagttgggacgactttatggaactcggacggtcaatccccgatacacaattggagcaggtgatagaatcacaaaaagccaaccagtgtgccgtgctgatctatacatcgggcactacaggcatcccaaagggcgtgatgctgtctcacgacaatatcacctggattgctggtgcagtcacaaaagatttcaagttaaccgataaacatgaaactgtggtcagctatctgcctctgtcacacatagcggcacagatgatggacatatgggtgcctattaaaattggggccttgacatacttcgcccaggctgatgctttgaagggtacactcgtgagcaccttgaaggaggtcaagccaacggtcttcattggtgtgccccaaatctgggaaaaaatccacgagatggtcaagaagaatagcgcgaagagcatgggtcttaaaaaaaaggcttttgtgtgggcaagaaacattggttttaaggtaaactccaaaaaaatgctgggcaaatataacactcctgtcagctaccggatggcaaagacactggtgttttctaaggtgaagacctctttgggcctagatcattgtcatagtttcatctccgggaccgctcctctcaatcaggagactgcggagttcttcctgagtctggacataccgatcggcgagctatacggtctgtcggaatcctctggtcctcacacgatcagcaaccagaataattacaggctactcagctgcggtaagatcttaaccggctgcaagaacatgctcttccaacagaataaggatggtattggcgaaatatgtttgtggggtcgccacatttttatgggctatctggaatcggagacggaaacgactgaagctattgatgatgagggatggttgcatagtggagatttaggccagctagacgggctggggtttctgtacgttaccggacacataaaggaaattctgatcacagccggcggggaaaacgttccacccatcccagtggagaccttggtcaaaaaaaaaatccctattatcagcaacgctatgctggtgggcgataaactgaagttcctgtcaatgctgctgactctcaaatgtgaaatgaaccagatgtcgggggagccattagacaaattgaatttcgaagctataaacttctgtcgcggcctgggatcacaagcctcaaccgtgaccgagattgtcaagcaacaggatcctctggtatataaagcgattcagcagggcataaatgcagttaaccaggaggctatgaataacgcacagaggatcgaaaagtgggtgatcctcgaaaaggacttctctatttacggaggggagcttggacccatgatgaagctcaagcggcattttgtggcacagaaatataagaagcagattgaccatatgtatcactag

SEQ ID NO: 108013 - DNA, 2001 bp, Artificial Sequence
  derived and/or modified sequence
atgacaggcacccccaagacccaggagggcgccaaggacctggaggtggacatgaacaagacagaggtgaccccccggctgtggaccacctgcagagatggagaggtgctgctgcggctgagcaagcacggccctggccacgagacccccatgaccatccctgagttcttccgggagagcgtgaaccgcttcggcacctacccagccctggccagcaagaatggcaagaagtgggagatcctgaacttcaaccagtactatgaggcctgcaggaaggccgccaagagcctcatcaagctgggcctggagcgcttccacggcgtgggcatcctgggcttcaacagcgctgagtggttcatcacagctgtgggcgccatcctggccggcggcctgtgtgtgggcatctatgccaccaacagcgctgaggtgtgccagtatgtgatcacccacgccaaggtgaacatcctgctggtggagaatgaccagcagctgcagaagatcctgagcatcccccagagcagcctggagcccctgaaggccatcatccagtaccgcctgcccatgaagaagaacaacaacctgtacagctgggatgacttcatggagctgggccgcagcatcccagacacccagctggagcaggtgattgagagccagaaggccaaccagtgtgctgtgctgatctacaccagcggcaccaccggcatccccaagggcgtgatgctgagccatgacaacatcacctggattgctggagctgtgaccaaggacttcaagctgacagacaagcatgagaccgtggtgtcctacctgcccctgagccacatcgccgcccagatgatggacatctgggtgcccatcaagattggagccctgacctactttgcccaggctgatgccctgaagggcaccctggtgtccaccctgaaggaggtgaagcccaccgtcttcatcggcgtgccccagatctgggagaagatccacgagatggtgaagaagaacagcgccaagtccatgggcctgaagaagaaggcctttgtgtgggccaggaacatcggcttcaaggtgaacagcaagaagatgctgggcaagtacaacacccctgtgtcctacaggatggccaagaccctggtgttcagcaaggtgaagaccagcctgggcctggaccactgccacagcttcatcagcggcacagcccccctgaaccaggagacagctgagttcttcctgagcctggacatccccatcggggagctgtatggcctgtctgagagcagcggcccccacaccatcagcaaccagaacaactaccgcctgctgagctgtgggaagatcctgaccggctgcaagaacatgctgttccagcagaacaaggatggcattggagagatctgcctgtggggccgccacatcttcatgggctacctggagagcgagacagagaccacagaggccattgatgatgagggctggctgcacagcggggacctgggccagctggatggcctgggcttcctgtatgtgacaggccacatcaaggagatcctgatcacagctggaggagaaaatgtgccccccatccctgtggagaccctggtgaagaagaagatccccatcatcagcaatgccatgctggtgggggacaagctgaagttcctgtccatgctgctgaccctgaagtgtgagatgaaccagatgtctggagagcccctggacaagctgaactttgaggccatcaacttctgccggggcctgggcagccaggccagcacagtgacagaaattgtgaagcagcaggaccccctggtgtacaaggccatccagcagggcatcaatgctgtgaaccaggaggccatgaacaatgcccagagaattgagaagtgggtgatcctggagaaggacttcagcatctacggcggggagctgggccccatgatgaagctgaagaggcactttgtggcccagaagtacaagaagcagattgaccacatgtaccactag

SEQ ID NO: 108014 - DNA, 2001 bp, Artificial Sequence
  derived and/or modified sequence
atgaccggcacccccaagacccaggagggcgccaaggacctggaggtggacatgaataagactgaagtgacacccaggctgtggaccacctgtagggatggggaagtactgcttcgcctctccaaacacggtccgggccacgagactcctatgaccatccctgaattttttcgtgaaagcgtgaaccggtttggcacctaccccgcgctggccagtaagaatgggaagaaatgggagattctgaactttaatcagtactacgaagcatgcaggaaagccgcgaaatccctcattaaactcggactagaacggtttcacggggttggcattttgggctttaacagtgctgaatggtttatcacagctgtgggcgctatcctggctggcggcctctgcgtcggaatatatgcaactaactcagctgaggtttgtcagtatgtgattacacacgctaaagtgaatattctgttggtcgagaacgaccagcagctgcaaaagatactgtccatcccccagagtagccttgagcctctcaaggcaattatccagtatcgtctgcccatgaagaaaaataataatctctattcctgggacgacttcatggagctggggaggtctatccctgacactcagctggagcaagtcattgaaagtcaaaaggccaaccagtgcgccgtgttgatatatacatcaggtactaccgggatccccaaaggggtgatgcttagccacgataacattacttggatcgccggggccgtgaccaaggatttcaaactgactgataagcacgaaacagttgtgagctatctaccactgtcgcatatagccgcccagatgatggacatttgggtaccaataaagatcggagccctgacttactttgcccaagccgacgcgctcaagggcacactggtatcaaccttgaaggaagttaagcccaccgtgttcatcggcgtgccccaaatctgggaaaagattcacgagatggtgaagaagaatagcgcaaaatcgatggggctgaagaaaaaggctttcgtttgggctaggaatattggttttaaggttaacagcaaaaagatgctgggaaagtacaatacaccagtttcataccgaatggctaagacactggttttctcaaaggtgaagactagtctaggtctcgatcattgccactcttttatatccggaacggctccccttaaccaggaaacagcagaattcttccttagcttggatataccgattggcgagctctacggactttccgagagcagcggcccccacaccatttctaatcagaacaactatcggctcctgtcgtgtgggaagattttaactggctgcaagaatatgctcttccagcaaaataaggacggaattggcgagatatgtctgtgggggagacacattttcatggggtatctcgagtccgagactgagactacagaggccatcgacgatgaggggtggctccactcgggagatctcggccagcttgatgggttaggttttctgtacgtgaccggccatatcaaagagattctgattaccgccggcggcgagaatgtaccaccaattcccgtcgaaaccctcgtgaaaaagaaaatcccaataatcagcaatgccatgctggtcggtgataaactaaagttcttgagcatgttgctgactttaaagtgtgagatgaaccagatgtccggagagcctcttgataagctgaatttcgaggccattaacttctgtcgcggactgggtagccaagcctcgacagtcacagagatcgtgaagcagcaggatcccctcgtatacaaagctattcagcaaggcatcaacgccgttaaccaggaagcgatgaacaatgcccaacggattgagaaatgggtcatcttggagaaggatttttcaatttatggaggagagttggggcctatgatgaaattaaagcggcattttgtggcacagaagtataagaagcagatcgatcatatgtaccactag

SEQ ID NO: 108015 - DNA, 2001 bp, Artificial Sequence
  derived and/or modified sequence
atgaccgggaccccgaaaacacaagaaggcgctaaggatctggaagtcgatatgaacaaaacggaggtcacacctcgcctgtggactacctgcagggatggggaagtgcttctgcgtctatctaagcatggacctggccacgaaactcccatgacaataccggaattttttcgggagtcagtgaaccgcttcgggacttatcccgcattggcaagtaaaaacgggaagaaatgggaaatcctgaatttcaaccagtattatgaggcatgccggaaggccgcaaagtcattaatcaagctgggactggagagattccatggcgtcggcattcttgggtttaatagcgcagaatggtttatcaccgccgtaggggcaatcttggctggcggactgtgcgttgggatttacgccaccaactctgcggaggtatgtcagtacgtgatcacgcatgctaaagtgaacatcttgctcgtggaaaacgatcaacagttgcagaaaatccttagcataccccagtcttcactggaacctcttaaagctattattcagtacaggctacctatgaagaaaaacaacaacctgtatagctgggatgatttcatggagctcggacgcagcattcccgatacgcagttagagcaagtaatagaaagccagaaagctaaccagtgtgctgtcttaatttatacatcagggactaccggcattccaaaaggtgttatgctgtcgcacgataatattacatggatagcaggagcagtcacaaaagacttcaaactcacggacaagcacgaaacagttgtaagctatctgcctctttctcatatagcagcccaaatgatggacatttgggttcctatcaagattggagccctgacttactttgcccaggcagacgccctgaaaggcacgttggtgtcgaccttgaaggaggttaagccgactgtgtttatcggggtcccgcagatttgggagaagatccacgagatggtgaaaaagaatagcgccaagagcatgggactcaagaagaaggcttttgtttgggctcgcaatattggctttaaagtaaactctaagaaaatgctcgggaagtataatacccctgtgagctataggatggccaaaacactggtgttcagtaaagtgaaaacttctttgggactggaccactgtcattcctttatttccggcactgcccctcttaatcaggaaacagcggaattcttcctgtccttggatatacccattggcgagctctatggactgtccgaatccagcgggccacatacaatctccaatcagaacaactataggcttctgtcttgtgggaagatcttgaccggttgtaagaacatgttgttccagcagaataaggacggcataggcgaaatctgcctctggggcagacacatttttatgggatatttggagtccgaaacagagacgacagaggctattgacgatgagggatggctgcattccggcgacctcggccaactggacggattgggattcctgtatgtaacggggcatataaaggagattctcattacggcgggtggggaaaacgtgccccctatcccggtcgagaccttggtgaagaagaaaattccaataatctccaatgccatgctggtcggggacaagctgaagtttctgagcatgctactcacgctgaaatgcgagatgaatcagatgagcggcgagcccctggacaagcttaatttcgaagcaattaatttttgtagaggacttggatctcaggctagcacagtgaccgaaatcgttaaacagcaggatccacttgtttataaggcaatccagcaggggattaacgcagtgaaccaggaggccatgaataacgcacaaagaattgaaaagtgggtcatactggaaaaagatttttccatctacggaggcgaactcggtcctatgatgaaacttaagagacacttcgtcgcgcagaagtataagaagcaaatagaccatatgtaccattag

SEQ ID NO: 108016 - DNA, 2001 bp, Artificial Sequence
  derived and/or modified sequence
atgaccggcacccccaagacccaggagggcgccaaggacctggaggtggacatgaacaagaccgaggtgacccccagactgtggaccacctgcagagacggcgaggtgctgctgagactgagcaagcacggccccggccacgagacccccatgaccatccccgagttcttcagagagagcgtgaacagattcggcacctaccccgccctggccagcaagaacggcaagaagtgggagatcctgaacttcaaccagtactacgaggcctgcagaaaggccgccaagagcctgatcaagctgggcctggagagattccacggcgtgggcatcctgggcttcaacagcgccgagtggttcatcaccgccgtgggcgccatcctggccggcggcctgtgcgtgggcatctacgccaccaacagcgccgaggtgtgccagtacgtgatcacccacgccaaggtgaacatcctgctggtggagaacgaccagcagctgcagaagatcctgagcatcccccagagcagcctggagcccctgaaggccatcatccagtacagactgcccatgaagaagaacaacaacctgtacagctgggacgacttcatggagctgggcagaagcatccccgacacccagctggagcaggtgatcgagagccagaaggccaaccagtgcgccgtgctgatctacaccagcggcaccaccggcatccccaagggcgtgatgctgagccacgacaacatcacctggatcgccggcgccgtgaccaaggacttcaagctgaccgacaagcacgagaccgtggtgagctacctgcccctgagccacatcgccgcccagatgatggacatctgggtgcccatcaagatcggcgccctgacctacttcgcccaggccgacgccctgaagggcaccctggtgagcaccctgaaggaggtgaagcccaccgtgttcatcggcgtgccccagatctgggagaagatccacgagatggtgaagaagaacagcgccaagagcatgggcctgaagaagaaggccttcgtgtgggccagaaacatcggcttcaaggtgaacagcaagaagatgctgggcaagtacaacacccccgtgagctacagaatggccaagaccctggtgttcagcaaggtgaagaccagcctgggcctggaccactgccacagcttcatcagcggcaccgcccccctgaaccaggagaccgccgagttcttcctgagcctggacatccccatcggcgagctgtacggcctgagcgagagcagcggcccccacaccatcagcaaccagaacaactacagactgctgagctgcggcaagatcctgaccggctgcaagaacatgctgttccagcagaacaaggacggcatcggcgagatctgcctgtggggcagacacatcttcatgggctacctggagagcgagaccgagaccaccgaggccatcgacgacgagggctggctgcacagcggcgacctgggccagctggacggcctgggcttcctgtacgtgaccggccacatcaaggagatcctgatcaccgccggcggcgagaacgtgccccccatccccgtggagaccctggtgaagaagaagatccccatcatcagcaacgccatgctggtgggcgacaagctgaagttcctgagcatgctgctgaccctgaagtgcgagatgaaccagatgagcggcgagcccctggacaagctgaacttcgaggccatcaacttctgcagaggcctgggcagccaggccagcaccgtgaccgagatcgtgaagcagcaggaccccctggtgtacaaggccatccagcagggcatcaacgccgtgaaccaggaggccatgaacaacgcccagagaatcgagaagtgggtgatcctggagaaggacttcagcatctacggcggcgagctgggccccatgatgaagctgaagagacacttcgtggcccagaagtacaagaagcagatcgaccacatgtaccactag

SEQ ID NO: 108017 - DNA, 2712 bp, Artificial Sequence
  derived and/or modified sequence
ccacccatcctcctgcctcccaccaccaccatcatcctggctggacggagagggtgacgggggctgggaaggggcagctcatgttcaggtttccaggaggggctacctgttgactgtctttgcaggaagaagaaaacacctgagtgaccagatgtcccagctccaggtgccttgccagatggccagaaccacacctcttgaagagtgacagtgctgtggagcatggtttctgcacacctggaatgactggaaccccaaagactcaagaaggagctaaagatcttgaagtagacatgaataaaacagaagttactcccaggctgtggaccacctgtcgagatggagaagtccttctgaggctatccaaacacggaccaggccatgagaccccgatgaccatccctgaattttttcgagagtcagtcaaccgatttggaacttatccagccctcgcatccaagaatggcaaaaagtgggaaattctgaatttcaaccagtactatgaggcttgtcggaaggctgcaaaatccttgatcaagctgggtttggagcgtttccacggagttggtatcctggggtttaactctgcagagtggtttatcactgctgttggtgccatcctagccgggggtctttgtgttggtatttatgccaccaactctgccgaggtttgtcaatatgtcatcactcatgccaaagtgaacatcttgctggttgagaatgatcaacagttacagaaaatcctttcgattccacagagcagcctagagcccctaaaagcgatcatccagtacagactgccaatgaagaagaacaacaacttgtactcttgggatgatttcatggaacttggcagaagtatccctgacacccaactggagcaggtcatcgagagccagaaggcgaatcaatgcgcagtgctcatctacacttcagggaccacaggcatacccaagggagtgatgctcagtcatgacaacatcacgtggattgcaggagcagtgacaaaggactttaaactgacagacaagcatgagacggtggttagctacctcccactcagccatattgcagcacagatgatggacatctgggtacccataaagattggggcgctcacatactttgctcaagcagatgctctcaagggcaccttggtaagtactctaaaggaggtaaaacctactgtcttcattggagtgcctcaaatttgggagaagatacatgagatggtgaagaaaaatagtgccaagtccatgggcttgaagaagaaggcattcgtgtgggcaagaaacattggcttcaaggtcaactcaaaaaagatgttggggaaatataatactcccgtgagctaccgcatggctaagactctcgtgttcagcaaagtcaagacatcccttggcttggatcactgtcactcttttatcagtgggactgcgcccctcaaccaagagactgccgagttctttctaagcttggacatacctataggcgagttgtatgggttgagtgagagctcgggaccccacacgatatccaaccagaataactacaggcttctaagctgtggcaagatcttgactgggtgtaagaatatgctgttccagcagaacaaggatggcattggggagatctgcctctggggtaggcacatcttcatgggctatctggaaagtgagactgaaactacagaggccatcgatgatgaaggctggctacactctggggatctgggccagctggacggtctgggtttcctctatgtcaccggccacatcaaagaaatccttatcactgctggtggtgaaaatgtgccccccattcctgttgagaccttggttaagaagaagatccccatcatcagtaacgccatgttagtaggagataaactgaagtttctgagcatgttgctgacgctgaagtgtgagatgaatcagatgagcggagaacctctggacaagctgaacttcgaggccatcaacttctgtcggggtctgggcagccaggcatccaccgtgactgagattgtgaagcagcaagaccccctggtctacaaggccatccagcaaggcatcaatgctgtgaaccaggaagccatgaacaatgcacagaggattgaaaagtgggtcatcttggagaaggacttttccatctatggtggagagctaggtccaatgatgaaacttaagagacattttgtagcccagaaatacaaaaaacaaattgatcacatgtaccactgactgctttgatggagctgctctcagctgttctgatgccttcagcaggaagacctcattgcaataagtgaaatgctgctctaggtagaagctctccctgctgtttttaagaagccacattcctcattggtcagtttcttgattgttcgtctgttggagaggtgctccctagaagaacctgccatacgtttcaaagcaataaaatcactgtatatctttctaaggaccttcaagtcatgactccagggaagcctattgggaagtctactaaaaactgcctgatttacaagaaagacctgaacttgtgggctcccatttgatttttttctcctcaggggactcagacattagaaagaaaaagcctcacagatttgaagaactggacccccaaatcaactcacctgcctggaagcaactgggaaacccttccaataagtcctgataataaagcacttcagggtcccatgtcttg

SEQ ID NO: 108018 - protein, 489 aa, Artificial Sequence
  derived and/or modified sequence
MPLRDETLREVWASDSGHEEESLSPEAPRRPKQRPAPAQRLRKKRTEAPESPCPTGSKPRKPGEEEEEEEDEEDEEEEAEEKKEKILLPPKKPLREKSSADLKERRAKAQGPRGDLGSPDPPPKPLRVRNKEAPAGEGTKMRKTKKKGSGEADKDPSGSPASARKSPAAMFLVGEGSPDKKALKKKGTPKGARKEEEEEEEAATVIKKSNQKGKAKGKGKKKAKEERAPSPPVEVDEPREFVLRPAPQGRTVRCRLTRDKKGMDRGMYPSYFLHLDTEKKVFLLAGRKRKRSKTANYLISIDPTNLSRGGENFIGKLRSNLLGNRFTVFDNGQNPQRGYSTNVASLRQELAAVIYETNVLGFRGPRRMTVIIPGMSAENERVPIRPRNASDGLLVRWQNKTLESLIELHNKPPVWNDDSGSYTLNFQGRVTQASVKNFQIVHADDPDYIVLQFGRVAEDAFTLDYRYPLCALQAFAIALSSFDGKLACE

SEQ ID NO: 108019 - protein, 186 aa, Artificial Sequence
  derived and/or modified sequence
MPLRDETLREVWASDSGHEEESLSPEAPRRPKQRPAPAQRLRKKRTEAPESPCPTGSKPRKPGEEEEEEEDEEDEEEEAEEKKEKILLPPKKPLREKSSADLKERRAKAQGPRGDLGSPDPPPKPLRVRNKEAPAGEGTKMRKTKKKGSGEADKDPSGSPASARKSPAAMFLVGEGSPDKKALKKK

SEQ ID NO: 108020 - DNA, 1470 bp, Artificial Sequence
  derived and/or modified sequence
atgcccctgagagacgagaccctgagagaggtgtgggccagcgacagcggccacgaggaggagagcctgagccccgaggcccccagaagacccaagcagagacccgcccccgcccagagactgagaaagaagagaaccgaggcccccgagagcccctgccccaccggcagcaagcccagaaagcccggcgaggaggaggaggaggaggaggacgaggaggacgaggaggaggaggccgaggagaagaaggagaagatcctgctgccccccaagaagcccctgagagagaagagcagcgccgacctgaaggagagaagagccaaggcccagggccccagaggcgacctgggcagccccgaccccccccccaagcccctgagagtgagaaacaaggaggcccccgccggcgagggcaccaagatgagaaagaccaagaagaagggcagcggcgaggccgacaaggaccccagcggcagccccgccagcgccagaaagagccccgccgccatgttcctggtgggcgagggcagccccgacaagaaggccctgaagaagaagggcacccccaagggcgccagaaaggaggaggaggaggaggaggaggccgccaccgtgatcaagaagagcaaccagaagggcaaggccaagggcaagggcaagaagaaggccaaggaggagagagcccccagcccccccgtggaggtggacgagcccagagagttcgtgctgagacccgccccccagggcagaaccgtgagatgcagactgaccagagacaagaagggcatggacagaggcatgtaccccagctacttcctgcacctggacaccgagaagaaggtgttcctgctggccggcagaaagagaaagagaagcaagaccgccaactacctgatcagcatcgaccccaccaacctgagcagaggcggcgagaacttcatcggcaagctgagaagcaacctgctgggcaacagattcaccgtgttcgacaacggccagaacccccagagaggctacagcaccaacgtggccagcctgagacaggagctggccgccgtgatctacgagaccaacgtgctgggcttcagaggccccagaagaatgaccgtgatcatccccggcatgagcgccgagaacgagagagtgcccatcagacccagaaacgccagcgacggcctgctggtgagatggcagaacaagaccctggagagcctgatcgagctgcacaacaagccccccgtgtggaacgacgacagcggcagctacaccctgaacttccagggcagagtgacccaggccagcgtgaagaacttccagatcgtgcacgccgacgaccccgactacatcgtgctgcagttcggcagagtggccgaggacgccttcaccctggactacagataccccctgtgcgccctgcaggccttcgccatcgccctgagcagcttcgacggcaagctggcctgcgagtag

SEQ ID NO: 108021 - DNA, 561 bp, Artificial Sequence
  derived and/or modified sequence
atgcccctgagagacgagaccctgagagaggtgtgggccagcgacagcggccacgaggaggagagcctgagccccgaggcccccagaagacccaagcagagacccgcccccgcccagagactgagaaagaagagaaccgaggcccccgagagcccctgccccaccggcagcaagcccagaaagcccggcgaggaggaggaggaggaggaggacgaggaggacgaggaggaggaggccgaggagaagaaggagaagatcctgctgccccccaagaagcccctgagagagaagagcagcgccgacctgaaggagagaagagccaaggcccagggccccagaggcgacctgggcagccccgaccccccccccaagcccctgagagtgagaaacaaggaggcccccgccggcgagggcaccaagatgagaaagaccaagaagaagggcagcggcgaggccgacaaggaccccagcggcagccccgccagcgccagaaagagccccgccgccatgttcctggtgggcgagggcagccccgacaagaaggccctgaagaagaagtag

SEQ ID NO: 108022 - DNA, 1470 bp, Artificial Sequence
  derived and/or modified sequence
atgcctcttagggacgagaccctgcgagaagtgtgggcgtcggacagcggccacgaggaagagtcactcagccctgaagcaccacgcagaccaaagcaacgacccgcccccgcgcagcggctccgcaagaagagaacagaggctcctgaatcgccctgcccgacaggctcgaagcctcgaaaaccgggggaggaggaggaggaagaggaggacgaggaagatgaagaggaagaggccgaggaaaagaaagagaagatccttctgccccctaagaaacctcttcgtgagaagtcttccgccgacctcaaagagagacgcgctaaagcccagggcccgagaggggatttgggtagcccggatccgcctcctaagccgcttcgcgtccgtaataaagaagcacctgcaggggagggcacaaaaatgcggaagactaaaaaaaagggctcaggcgaagctgataaggacccttcaggctcccctgccagcgccaggaaaagtcccgcagcgatgtttctcgttggcgagggtagccccgataagaaagccctgaaaaaaaaaggtaccccgaaaggggctcgaaaggaagaggaggaggaggaggaggccgcaaccgttataaagaaaagcaaccaaaaaggtaaagccaagggaaaggggaaaaaaaaggcaaaagaggagcgggccccaagccctcctgtcgaagttgatgaaccaagggaatttgttctcagaccagctccccaaggtcggacggtgaggtgccgattgacccgggataaaaagggtatggacagggggatgtacccgtcttattttcttcacctcgataccgagaagaaggtgtttctgctggcagggcgcaaacgaaaacggagtaaaacagcaaactacctcatttcaattgatcctactaaccttagcagaggtggtgagaactttatcggcaagctgcgctcaaacctgctgggcaatcgttttaccgtgtttgacaatgggcaaaacccgcagaggggatacagcacaaacgtggccagtttgagacaagaacttgctgcagtcatctatgagactaacgtgttggggtttcgcggaccacggcgcatgacagtcattattcccggcatgtcagccgagaatgaaagagttccaatcagaccccgcaatgccagcgatggcctgctcgttcgctggcagaataagaccctggagtctttgattgaacttcacaataagccgcctgtttggaatgacgactcaggcagctataccctgaattttcaggggcgcgtcactcaggcgagcgtaaaaaacttccagatcgtgcatgcagacgatccggattatatagtactacagtttgggagagttgctgaagacgctttcacacttgactatagataccccctatgcgctctccaggcttttgccatcgctctgtcatcatttgacggcaagttagcctgtgagtag

SEQ ID NO: 108023 - DNA, 561 bp, Artificial Sequence
  derived and/or modified sequence
atgccactgcgcgacgagaccctccgcgaagtctgggccagcgactcaggacacgaggaagagtcactatccccagaggctcctagaagaccaaaacagaggcctgcgcctgcacagaggctgagaaagaaaagaaccgaggccccagaatccccctgcccaaccggatctaaacctcgcaaacccggggaggaagaagaggaggaggaggatgaggaggatgaggaagaagaggccgaggagaagaaggagaagattctactgcctccgaagaagcctctgcgtgagaagtcttccgccgacctgaaagagaggagggctaaagcccaggggcctcgcggggacttgggtagtccggatccccctccaaagcccttgcgggtgcgaaacaaagaagctccagccggtgagggtactaaaatgaggaaaaccaagaagaaaggctctggtgaagcagacaaagatccaagtggcagcccggccagtgctcggaagtctcccgcggcaatgttcttggtgggcgaaggttccccggacaaaaaagctctcaaaaagaagtag

SEQ ID NO: 108024 - DNA, 1470 bp, Artificial Sequence
  derived and/or modified sequence
atgcccctgagagatgagaccctgcgggaggtgtgggccagtgacagcggccacgaggaggagagcctgagccctgaggccccccggcggcccaagcagaggcctgccccagcccagaggctgaggaagaagaggacagaggcccctgagagcccctgccccaccggcagcaagcccaggaagccaggagaggaggaggaggaggaggaggatgaagaagatgaggaggaggaggccgaggagaagaaggagaagatcctgctgccccccaagaagcccctgcgggagaagagcagcgctgacctgaaggagcggcgggccaaggcccagggccccaggggggacctgggcagcccagaccccccacccaagcccctgcgggtgaggaacaaggaggccccagctggggagggcaccaagatgaggaagaccaagaagaagggcagcggggaggccgacaaggaccccagcggcagccctgccagcgccaggaagagccctgctgccatgttcctggtgggggagggcagcccagacaagaaggccctgaagaagaagggcacccccaagggggccaggaaggaggaggaggaggaggaggaggccgccaccgtcatcaagaagagcaaccagaagggcaaggccaagggcaagggcaagaagaaggccaaggaggagcgggcccccagcccccctgtggaggtggatgagccccgggagtttgtgctgcggcctgccccccagggccgcacagtgcgctgccgcctgacccgggacaagaagggcatggaccggggcatgtaccccagctacttcctgcacctggacacagagaagaaggtgttcctgctggccggcaggaagaggaagaggagcaagacagccaactacctgatcagcattgaccccaccaacctgagcagaggaggagagaacttcatcggcaagctgcggagcaacctgctgggcaaccgcttcaccgtgtttgacaatggccagaacccccagaggggctacagcaccaacgtggccagcctgcggcaggagctggccgccgtcatctatgagaccaacgtgctgggcttccggggccccaggaggatgaccgtcatcatccctggcatgtctgcagaaaatgaaagagtgcccatccggcccagaaatgccagtgatggcctgctggtgcgctggcagaacaagaccctggagagcctcatcgagctgcacaacaagccccctgtgtggaatgatgattctggcagctacaccctgaacttccagggccgggtgacccaggcctctgtgaagaacttccagatcgtgcatgctgatgatcctgactacatcgtgctgcagtttggccgggtggccgaggatgccttcaccctggactaccgctaccccctgtgtgccctgcaggcctttgccatcgccctgagcagctttgatggcaagctggcctgtgagtag

SEQ ID NO: 108025 - DNA, 561 bp, Artificial Sequence
  derived and/or modified sequence
atgcccctgagagatgagaccctgcgggaggtgtgggccagtgacagcggccacgaggaggagagcctgagccctgaggccccccggcggcccaagcagaggcctgccccagcccagaggctgaggaagaagaggacagaggcccctgagagcccctgccccaccggcagcaagcccaggaagccaggagaggaggaggaggaggaggaggatgaagaagatgaggaggaggaggccgaggagaagaaggagaagatcctgctgccccccaagaagcccctgcgggagaagagcagcgctgacctgaaggagcggcgggccaaggcccagggccccaggggggacctgggcagcccagaccccccacccaagcccctgcgggtgaggaacaaggaggccccagctggggagggcaccaagatgaggaagaccaagaagaagggcagcggggaggccgacaaggaccccagcggcagccctgccagcgccaggaagagccctgctgccatgttcctggtgggggagggcagcccagacaagaaggccctgaagaagaagtag

SEQ ID NO: 108026 - DNA, 1470 bp, Artificial Sequence
  derived and/or modified sequence
atgcccctgcgggacgagaccctgcgggaggtgtgggccagcgacagtgggcacgaggaggagagtttgtctcctgaagcacctcgcaggcccaagcagcggcccgctccagcccagagattgaggaagaagaggacagaggccccggaatcaccgtgccctacagggtcaaagccccgcaagcccggcgaagaagaagaggaggaggaagacgaagaagacgaggaggaggaggccgaggaaaagaaggaaaagattcttctgccacccaagaagcccttgcgagagaagtcctctgctgatttaaaagagcgtagagccaaggcccagggacccagaggtgatctgggcagcccagatcctccacccaaaccattacgggttagaaacaaggaggccccggcgggagagggcaccaagatgcgcaaaacgaaaaagaagggcagcggagaggctgataaggaccccagcggtagtcccgcttccgctcgcaagtcaccggcagcgatgttcctggttggggagggcagtcccgacaagaaggccctgaaaaaaaagggaaccccgaagggggccaggaaggaggaggaggaggaggaggaagcagcgactgtcatcaaaaagtctaaccagaaaggaaaggccaaaggtaaaggtaagaaaaaagccaaagaagaaagggctcctagtcctcccgtggaagtggatgaaccaagagaattcgtgttacgcccagcaccccaaggtaggacggtaaggtgtcgactcacccgtgataaaaagggaatggaccggggaatgtacccctcatactttctgcaccttgacaccgaaaagaaagttttcttgcttgcaggacggaaacgtaagcgctcaaaaaccgccaactatcttatttcaatcgaccctacaaacctttcacgagggggagaaaactttattggaaagctgaggtccaacttgcttggaaacagatttacagtattcgataatggacagaacccccagagaggttacagcaccaatgtggcttccctgaggcaagagctcgcagccgtgatttatgagaccaatgtgctgggctttaggggccctcggcggatgactgtgatcatccccggaatgtcggcggaaaacgaaagagttcccattcgccctcgcaacgcttctgacggtttgctggtccggtggcagaacaagacattggaatcattgatagaattacataacaagcctcctgtgtggaacgatgactctggatcttatacacttaatttccaaggacgtgtgacgcaagccagcgtaaagaatttccagatagtgcacgccgacgaccctgattacatcgttttacaatttggcagggtggctgaggacgcctttactcttgactaccggtaccctctctgtgcgcttcaggccttcgcgattgctctgtcatccttcgacggtaagctggcatgtgaatag

SEQ ID NO: 108027 - DNA, 561 bp, Artificial Sequence
  derived and/or modified sequence
atgcccctgcgggacgagaccctgcgggaggtgtgggccagcgactcaggacacgaggaagagtccctttctcccgaagctcctcgaagacccaagcagagacccgcccccgcccagcgtctccggaagaagagaaccgaagctcctgagtctccttgtccaaccggtagcaagccaagaaagccaggtgaggaagaagaagaggaggaagacgaagaggatgaggaggaggaggcagaagaaaagaaggagaaaatactcttgccaccaaaaaaacccttgagagagaaatcatctgccgacctgaaagagagaagagccaaggcccaggggccccgcggggacttgggttccccggaccctccccccaaaccgttacgggtcaggaataaggaagcaccagctggtgagggcaccaagatgcgcaagacgaagaagaaaggtagtggagaagcagacaaggatccaagcggctcaccagcctccgccagaaaatcccccgccgccatgtttcttgtgggtgaaggtagccctgacaaaaaagcactgaagaaaaagtag

SEQ ID NO: 108028 - DNA, 1470 bp, Artificial Sequence
  derived and/or modified sequence
atgccgctgagggacgaaactttaagagaagtttgggctagcgatagtggccacgaagaagagtccctgtctcccgaggcccctcggagaccgaagcaacggccagctcccgcacagaggcttcggaagaagcggaccgaggcccctgagagcccctgccctacgggctccaagcctaggaaaccaggcgaagaggaggaggaagaggaggatgaagaggacgaagaggaagaggctgaggagaaaaaggagaagatactcctacctccaaaaaaaccgctgagggagaaatctagcgctgatctgaaggaaaggagggccaaagcacagggtccacgcggtgatctgggcagccctgatccacccccaaaacctctgcgagtccgaaacaaggaggctcccgcaggtgaaggcaccaaaatgcggaagacgaagaagaaggggagtggagaggcagacaaggaccccagcggctctccagccagcgctaggaagagccccgctgcaatgtttctggtcggggaggggagtcccgacaagaaggcactgaaaaagaaggggactcccaagggagcgaggaaggaggaggaggaggaagaagaggccgcaacggtcatcaagaaaagcaatcagaaagggaaggccaagggtaagggtaaaaaaaaggcaaaggaggagagggcaccttctcctcctgtcgaggtcgacgaaccacgagagttcgtactccggccagccccacagggaaggaccgtgaggtgccggctcaccagagacaaaaaagggatggatagaggaatgtacccttcttactttctacatctagacactgagaagaaggtatttctactcgccggaaggaagaggaagaggagtaagactgccaactacctgatctcaattgacccaacgaatctgagtcgaggaggtgagaacttcattggcaaacttcgcagcaatctccttggcaaccggttcacagtgtttgacaatggccagaatcctcaacggggttattcgacaaatgtggcttctctgaggcaggaactcgccgcagtgatttacgagaccaatgtgctcggctttagagggccacgacggatgacagtgatcattccaggcatgagtgcagaaaacgagcgcgtgcctatccgccctcgcaatgcaagtgacggtctgttggtacggtggcagaataagacccttgagtctctgatcgagttacataacaagcctcccgtgtggaacgatgacagcggttcctatacacttaactttcagggacgcgtgacacaagcaagcgtgaagaattttcaaattgtccatgccgacgaccctgattatattgtcctacaatttggccgagtggctgaggatgcgtttaccctcgactataggtatcctctctgtgcgcttcaagctttcgccatagccctgtccagctttgatggaaaattggcctgtgaatag

SEQ ID NO: 108029 - DNA, 561 bp, Artificial Sequence
  derived and/or modified sequence
atgcctctgcgggacgaaactttgagggaggtgtgggcctctgacagcggccacgaggaggaatctctgagtcccgaagcccctagacggccaaagcagcggcctgcacctgcccagcgattacggaagaagcgcacagaggctccggagtccccttgccctacagggtcaaaaccccgtaagcctggtgaagaggaagaggaagaagaggatgaggaagacgaggaagaagaagccgaagagaagaaagagaaaatccttctccctcccaaaaagccattacgtgagaagtcaagcgcagaccttaaagaacggagggccaaggcacaaggccctagaggagatctcggctcacccgaccccccacctaaacctctcagagtccggaacaaagaagcccctgcaggggagggaacaaaaatgaggaaaacaaagaaaaaagggagcggagaagccgataaggatccctccggctcccccgcatccgccagaaagagccccgctgccatgtttctagtgggagagggttcccccgataagaaagctctcaagaagaaatag

SEQ ID NO: 108030 - DNA, 1941 bp, Artificial Sequence
  derived and/or modified sequence
gcgataggcaaaggcaccatgcctctgcgggatgaaaccctccgagaggtgtgggcctctgacagtgggcatgaagaagaaagcctgagcccggaggccccgcggcgccccaaacagcgacccgccccggcacagaggctaaggaagaagaggacggaggcccccgaatccccctgccccacgggatccaagccccggaagcccggagaggaggaggaggaagaggaggacgaggaggacgaggaagaggaggcagaggaaaagaaagagaaaatccttctgcctcccaagaagcccctgagagagaagagctccgcagacctgaaggagaggagggccaaggcccagggcccaaggggagacctgggaagccctgaccccccaccgaaacctctgcgtgttaggaataaggaagctccagcaggggaggggaccaagatgagaaagaccaagaagaaagggtctggggaggccgacaaggacccctcagggagcccagccagtgcgaggaagagcccagcagccatgtttctggttggggaaggcagtcctgacaagaaagccctgaagaagaaaggcactcccaaaggcgcgaggaaggaggaagaagaggaggaggaggcagctacggtgataaagaagagcaatcaaaagggcaaagccaaaggaaaaggcaaaaagaaagcgaaggaggagagggccccgtctccccccgtggaggtggacgaaccccgggagtttgtgctccggcctgccccccagggccgcacggtgcgctgccggctgacccgggacaaaaagggcatggatcgaggcatgtatccctcctacttcctgcacctggacacggagaagaaggtgttcctcttggctggcaggaaacgaaaacggagcaagacagccaattacctcatctccatcgaccctaccaatctgtcccgaggaggggagaatttcatcgggaagctgaggtccaacctcctggggaaccgcttcacggtctttgacaacgggcagaacccacagcgtgggtacagcactaatgtggcaagccttcggcaggagctggcagctgtgatctatgaaaccaacgtgctgggcttccgtggcccccggcgcatgaccgtcatcattcctggcatgagtgcggagaacgagagggtccccatccggccccgaaatgctagtgacggcctgctggtgcgctggcagaacaagacgctggagagcctcatagaactgcacaacaagccacctgtctggaacgatgacagtggctcctacaccctcaacttccaaggccgggtcacccaggcctcagtcaagaacttccagattgtccacgctgatgaccccgactatatcgtgctgcagttcggccgcgtggcggaggacgccttcaccctagactaccggtacccgctgtgcgccctgcaggccttcgccatcgccctctccagtttcgacgggaagctggcctgcgagtgaccccagcagcccctcagcgcccccagagcccgtcagcgtgggggaaaggattcagtggaggctggcagggtccctccagcaaagctcccgcggaaaactgctcctgtgtcggggctgacctctcactgcctctcggtgacctccgtcctctccccagcctggcacaggccgaggcaggaggagcccggacggcgggtaggacggagatgaagaacatctggagttggagccgcacatctggtctcggagctcgcctgcgccgctgtgcccccctcctccccgcgccccagtcacttcctgtccgggagcagtagtcattgttgttttaacctcccctctccccgggaccgcgctagggctccgaggagctggggcgggctaggaggagggggtaggtgatgggggacgagggccaggcacccacatccccaataaagccgcgtccttggccaa

SEQ ID NO: 108031 - DNA, 1938 bp, Artificial Sequence
  derived and/or modified sequence
gcgataggcaaaggcaccatgcctctgcgggatgaaaccctccgagaggtgtgggcctctgacagtgggcatgaagaagaaagcctgagcccggaggccccgcggcgccccaaacagcgacccgccccggcacagaggctaaggaagaagaggacggaggcccccgaatccccctgccccacgggatccaagccccggaagcccggagaggaggaggaggaagaggaggacgaggaggacgaggaagaggaggcagaggaaaagaaagagaaaatccttctgcctcccaagaagcccctgagagagaagagctccgcagacctgaaggagaggagggccaaggcccagggcccaaggggagacctgggaagccctgaccccccaccgaaacctctgcgtgttaggaataaggaagctccagcaggggaggggaccaagatgagaaagaccaagaagaaagggtctggggaggccgacaaggacccctcagggagcccagccagtgcgaggaagagcccagcagccatgtttctggttggggaaggcagtcctgacaagaaagccctgaagaagaaaggcactcccaaaggcgcgaggaaggaggaagaagaggaggaggaggcagctacggtgataaagaagagcaatcaaaagggcaaagccaaaggaaaaggcaaaaagacccagaaggaggagagggccccgtctccccccgtggaggtggacgaaccccgggagtttgtgctccggcctgccccccagggccgcacggtgcgctgccggctgacccgggacaaaaagggcatggatcgaggcatgtatccctcctacttcctgcacctggacacggagaagaaggtgttcctcttggctggcaggaaacgaaaacggagcaagacagccaattacctcatctccatcgaccctaccaatctgtcccgaggaggggagaatttcatcgggaagctgaggtccaacctcctggggaaccgcttcacggtctttgacaacgggcagaacccacagcgtgggtacagcactaatgtggcaagccttcggcaggagctggcagctgtgatctatgaaaccaacgtgctgggcttccgtggcccccggcgcatgaccgtcatcattcctggcatgagtgcggagaacgagagggtccccatccggccccgaaatgctagtgacggcctgctggtgcgctggcagaacaagacgctggagagcctcatagaactgcacaacaagccacctgtctggaacgatgacagtggctcctacaccctcaacttccaaggccgggtcacccaggcctcagtcaagaacttccagattgtccacgctgatgaccccgactatatcgtgctgcagttcggccgcgtggcggaggacgccttcaccctagactaccggtacccgctgtgcgccctgcaggccttcgccatcgccctctccagtttcgacgggaagctggcctgcgagtgaccccagcagcccctcagcgcccccagagcccgtcagcgtgggggaaaggattcagtggaggctggcagggtccctccagcaaagctcccgcggaaaactgctcctgtgtcggggctgacctctcactgcctctcggtgacctccgtcctctccccagcctggcacaggccgaggcaggaggagcccggacggcgggtaggacggagatgaagaacatctggagttggagccgcacatctggtctcggagctcgcctgcgccgctgtgcccccctcctccccgcgccccagtcacttcctgtccgggagcagtagtcattgttgttttaacctcccctctccccgggaccgcgctagggctccgaggagctggggcgggctaggaggagggggtaggtgatgggggacgagggccaggcacccacatccccaataaagccgcgtccttggc

SEQ ID NO: 108032 - protein, 236 aa, Artificial Sequence
  derived and/or modified sequence
MEEEVRLKKRKRRRNVDKDPAKEDVEKAKKRRGRPPAEKLSPNPPKLTKQMNAIIDTVINYKDSSGRQLSEVFIQLPSRKELPEYYELIRKPVDFKKIKERIRNHKYRSLGDLEKDVMLLCHNAQTFNLEGSQIYEDSIVLQSVFKSARQKIAKEEESEDESNEEEEEEDEEESESEAKSVKVKIKLNKKDDKGRDKGKGKKRPNRGKAKPVVSDFDSDEEQDEREQSEGSGTDDE

SEQ ID NO: 108033 - protein, 559 aa, Artificial Sequence
  derived and/or modified sequence
MSTPTDPGAMPHPGPSPGPGPSPGPILGPSPGPGPSPGSVHSMMGPSPGPPSVSHPMPTMGSTDFPQEGMHQMHKPIDGIHDKGIVEDIHCGSMKGTGMRPPHPGMGPPQSPMDQHSQGYMSPHPSPLGAPEHVSSPMSGGGPTPPQMPPSQPGALIPGDPQAMSQPNRGPSPFSPVQLHQLRAQILAYKMLARGQPLPETLQLAVQGKRTLPGLQQQQQQQQQQQQQQQQQQQQQQQPQQQPPQPQTQQQQQPALVNYNRPSGPGPELSGPSTPQKLPVPAPGGRPSPAPPAAAQPPAAAVPGPSVPQPAPGQPSPVLQLQQKQSRISPIQKPQGLDPVEILQEREYRLQARIAHRIQELENLPGSLPPDLRTKATVELKALRLLNFQRQLRQEVVACMRRDTTLETALNSKAYKRSKRQTLREARMTEKLEKQQKIEQERKRRQKHQEYLNSILQHAKDFKEYHRSVAGKIQKLSKAVATWHANTEREQKKETERIEKERMRRLMAEDEEGYRKLIDQKKDRRLAYLLQQTDEYVANLTNLVWEHKQAQAAKEKKKR

SEQ ID NO: 108034 - DNA, 375 bp, Artificial Sequence
  derived and/or modified sequence
atggtgagagccaccagaggctactgggaggccaagggcaagtggcagacctggctgagattcagaaagaagagcagcaagtgcagagaggccagaaccttccccagcttcaagttcctgaagggcagccagagcagcttcagcagcctgctgcagatgcccctgcagagcttcaccgccgcccacacctacagaagaagaaacagccccagccagaaggacgacagagccctgggcgccggcgtgcccctggtgctggccgagagcctggacgcctgcgaggtgaagcccgacctgggcaaggccgccctgtggaccctgctggccgtgccccacacccagctgggcttcctgagaaagcagcacagactgtag

SEQ ID NO: 108035 - DNA, 468 bp, Artificial Sequence
  derived and/or modified sequence
atgagcacccccaccgaccccggcgccatgccccaccccggccccagccccggccccggccccagccccggccccatcctgggccccagccccggccccggccccagccccggcagcgtgcacagcatgatgggccccagccccggcccccccagcgtgagccaccccatgcccaccatgggcagcaccgacttcccccaggagggcatgcaccagatgcacaagcccatcgacggcatccacgacaagggcatcgtggaggacatccactgcggcagcatgaagggcaccggcatgagacccccccaccccggcatgggccccccccagagccccatggaccagcacagccagggctacatgagcccccaccccagccccctgggcgcccccgagcacgtgagcagccccatgagcggcggcggccccacccccccccagatgccccccagccagcccggcgcctag

SEQ ID NO: 108036 - DNA, 1680 bp, Artificial Sequence
  derived and/or modified sequence
atgagcacccccaccgaccccggcgccatgccccaccccggccccagccccggccccggccccagccccggccccatcctgggccccagccccggccccggccccagccccggcagcgtgcacagcatgatgggccccagccccggcccccccagcgtgagccaccccatgcccaccatgggcagcaccgacttcccccaggagggcatgcaccagatgcacaagcccatcgacggcatccacgacaagggcatcgtggaggacatccactgcggcagcatgaagggcaccggcatgagacccccccaccccggcatgggccccccccagagccccatggaccagcacagccagggctacatgagcccccaccccagccccctgggcgcccccgagcacgtgagcagccccatgagcggcggcggccccacccccccccagatgccccccagccagcccggcgccctgatccccggcgacccccaggccatgagccagcccaacagaggccccagccccttcagccccgtgcagctgcaccagctgagagcccagatcctggcctacaagatgctggccagaggccagcccctgcccgagaccctgcagctggccgtgcagggcaagagaaccctgcccggcctgcagcagcagcagcagcagcagcagcagcagcagcagcagcagcagcagcagcagcagcagcagcagcagccccagcagcagcccccccagccccagacccagcagcagcagcagcccgccctggtgaactacaacagacccagcggccccggccccgagctgagcggccccagcaccccccagaagctgcccgtgcccgcccccggcggcagacccagccccgccccccccgccgccgcccagccccccgccgccgccgtgcccggccccagcgtgccccagcccgcccccggccagcccagccccgtgctgcagctgcagcagaagcagagcagaatcagccccatccagaagccccagggcctggaccccgtggagatcctgcaggagagagagtacagactgcaggccagaatcgcccacagaatccaggagctggagaacctgcccggcagcctgccccccgacctgagaaccaaggccaccgtggagctgaaggccctgagactgctgaacttccagagacagctgagacaggaggtggtggcctgcatgagaagagacaccaccctggagaccgccctgaacagcaaggcctacaagagaagcaagagacagaccctgagagaggccagaatgaccgagaagctggagaagcagcagaagatcgagcaggagagaaagagaagacagaagcaccaggagtacctgaacagcatcctgcagcacgccaaggacttcaaggagtaccacagaagcgtggccggcaagatccagaagctgagcaaggccgtggccacctggcacgccaacaccgagagagagcagaagaaggagaccgagagaatcgagaaggagagaatgagaagactgatggccgaggacgaggagggctacagaaagctgatcgaccagaagaaggacagaagactggcctacctgctgcagcagaccgacgagtacgtggccaacctgaccaacctggtgtgggagcacaagcaggcccaggccgccaaggagaagaagaagagatag

SEQ ID NO: 108037 - DNA, 468 bp, Artificial Sequence
  derived and/or modified sequence
atgtctaccccaaccgacccaggggcgatgccacaccccggaccttctcccggcccaggtccctccccagggccgatcctgggccctagcccgggacccggcccatctccaggaagcgtgcattcaatgatgggcccgtcacctgggcctccgtcagtgtctcaccctatgcccacaatgggatccaccgactttccacaagaaggtatgcaccagatgcataaacccatcgatggcatccacgataagggaatagttgaagacatccattgcggttcgatgaaggggactggcatgaggcccccccaccccggtatggggcctcctcaatcccccatggatcaacacagccaggggtacatgtcgccgcatccttctcccctgggtgcccccgagcatgtttctagtccaatgagtggaggtggaccgacccctccgcagatgccaccatcgcaacccggtgcttag

SEQ ID NO: 108038 - DNA, 1680 bp, Artificial Sequence
  derived and/or modified sequence
atgagcacccccaccgacccaggcgccatgccgcacccgggcccatccccagggcctggcccgtcccccggccccatcctgggaccgagtcccggaccggggccatctcctggctcagtgcattcaatgatggggcccagcccgggacctcctagcgtttctcaccccatgccaaccatggggagcaccgactttccccaggagggcatgcaccagatgcacaagccgatcgacggaatccacgataagggaattgtggaggacattcattgtggttctatgaaaggcaccggaatgaggccgcctcaccctggcatgggaccaccccagtccccaatggaccagcatagtcagggctacatgagccctcatccatcccctctcggagcccccgagcacgtgtccagccccatgtccgggggcggacccacaccaccacagatgcctccttcacaacctggcgcccttattcccggagatccgcaggctatgagtcagccaaacagaggtccgagcccttttagcccggtgcaattgcatcagctccgggctcaaatcctagcctacaaaatgctcgcgcgcgggcagccactgccagagactctgcagctcgcggtccagggaaaaaggactctgcctggactgcagcagcagcagcagcaacagcagcaacagcagcaacagcagcagcagcagcagcagcagcagcaacagccccaacaacagccccctcagccccagacccagcagcagcaacaacccgcactagtcaactacaatcgaccttccggccccggacccgaactctccggcccctccacacctcaaaaacttccagttccagctcctggcggccgccccagtcctgcaccacctgcagccgctcaaccacccgctgccgcagttcctggaccatctgtgcctcagcctgcgcctggacaaccctctcctgtgctgcaactccaacagaagcaatccaggatttcacctatccagaaaccgcaagggctggaccccgtggagatcctgcaggagcgggagtatcgtcttcaggcccggatcgcacacagaatacaggaactggaaaatctcccaggttctctcccaccagacctgaggaccaaggctactgtggagctcaaggccctgcggctcttgaactttcaacgccagctgcggcaggaggtagtggcttgtatgcggagggacactaccctggagaccgccctgaacagtaaggcatacaagcgtagcaagagacaaacactgagggaggcaaggatgaccgagaaacttgagaagcagcagaagattgagcaagagcggaaacgccggcagaaacaccaggagtatctcaattcaatcctgcagcatgccaaagattttaaagagtaccacaggtctgttgcgggtaagatccagaaactgtctaaagctgtggcaacctggcacgctaacactgaaagagagcaaaaaaaagagacagagaggatcgaaaaggagcggatgagacgattgatggcagaagatgaggagggttatcggaaattgatcgaccaaaagaaggaccggcgcctggcctatctactgcagcagaccgacgagtacgtggcgaatctgactaacctggtctgggagcataagcaggcccaagccgctaaggaaaaaaagaaaaggtag

SEQ ID NO: 108039 - DNA, 468 bp, Artificial Sequence
  derived and/or modified sequence
atgagcacccccacagatcctggggccatgccccaccctggccccagccctggccctggccccagccctggccccatcctgggccccagccctggccctggccccagccctggctctgtgcacagcatgatgggccccagccctggcccccccagcgtgagccaccccatgcccaccatgggcagcacagacttcccccaggagggcatgcaccagatgcacaagcccattgatggcatccatgacaagggcatcgtggaggacatccactgcggctccatgaagggcaccggcatgaggcctccccaccctggcatgggccccccccagagccccatggaccagcacagccagggctacatgagcccccaccccagccccctgggcgcccctgagcacgtgagcagccccatgtctgggggcggccccaccccaccccagatgccacccagccagcccggggcctag

SEQ ID NO: 108040 - DNA, 1680 bp, Artificial Sequence
  derived and/or modified sequence
atgagcacccccacagatcctggggccatgccccaccctggccccagccctggccctggccccagccctggccccatcctgggccccagccctggccctggccccagccctggctctgtgcacagcatgatgggccccagccctggcccccccagcgtgagccaccccatgcccaccatgggcagcacagacttcccccaggagggcatgcaccagatgcacaagcccattgatggcatccatgacaagggcatcgtggaggacatccactgcggctccatgaagggcaccggcatgaggcctccccaccctggcatgggccccccccagagccccatggaccagcacagccagggctacatgagcccccaccccagccccctgggcgcccctgagcacgtgagcagccccatgtctgggggcggccccaccccaccccagatgccacccagccagcccggggccctgatccctggggacccccaggccatgagccagcccaacagaggccccagccccttcagccctgtgcagctgcaccagctgcgggcccagatcctggcctacaagatgctggcccggggccagcccctgcctgagaccctgcagctggccgtgcagggcaagaggaccctgcccggcctgcagcagcagcagcagcagcagcagcagcagcagcagcagcagcagcagcagcagcagcagcagcagcagccccagcagcagcccccccagccccagacccagcagcagcagcagcctgccctggtgaactacaaccggcccagcggccctggccctgagctgagcggccccagcaccccccagaagctgcctgtgcctgcccctgggggccggcccagccctgcccctcctgctgctgcccagcccccagctgctgctgtgcccggccccagcgtgccccagcctgcccctggccagcccagccctgtgctgcagctgcagcagaagcagagccgcatcagccccatccagaagccccagggcctggaccctgtggagatcctgcaggagcgggagtaccgcctgcaggcccgcatcgcccaccgcatccaggagctggagaacctgcccggcagcctgcccccagacctgcggaccaaggccaccgtggagctgaaggccctgcggctgctgaacttccagaggcagctgcggcaggaggtggtggcctgcatgagaagagacaccaccctggagacagccctgaacagcaaggcctacaagaggagcaagaggcagaccctgcgggaggccaggatgacagagaagctggagaagcagcagaagattgagcaggagaggaagaggcggcagaagcaccaggagtacctgaacagcatcctgcagcacgccaaggacttcaaggagtaccacaggtctgtggccggcaagatccagaagctgagcaaggctgtggccacctggcacgccaacacagagcgggagcagaagaaggagacagagcgcatcgagaaggagaggatgaggcggctgatggctgaagatgaggagggctacaggaagctgattgaccagaagaaggaccggcggctggcctacctgctgcagcagacagatgaatatgtggccaacctgaccaacctggtgtgggagcacaagcaggcccaggccgccaaggagaagaagaagaggtag

SEQ ID NO: 108041 - DNA, 468 bp, Artificial Sequence
  derived and/or modified sequence
atgagcacccccaccgaccccggcgccatgccccaccccggccccagtccaggccccggcccctctccaggacccatcttggggccaagccctggacccggcccatccccaggatcggtccatagtatgatgggacccagccctgggccccctagtgtgtcccaccccatgcccaccatgggctcgaccgattttccccaagaaggcatgcatcagatgcacaagccaattgacggtattcacgataagggaattgtggaagatatacactgcggatccatgaaaggtactggtatgcgccccccacaccccggaatgggccctccacagtctccgatggatcaacattcacagggatacatgagcccccacccaagcccccttggtgctccagagcacgtctcctcccccatgtcagggggcggacctaccccaccccagatgcctccttcccaacccggggcctag

SEQ ID NO: 108042 - DNA, 1680 bp, Artificial Sequence
  derived and/or modified sequence
atgagcacccccaccgaccccggcgccatgccccaccccggcccctcacccggacccggcccctctccaggaccaattctcgggccctcccctgggcccgggcccagtcccgggtctgtccactcaatgatgggtccttcaccaggcccacctagtgtatcacaccccatgccaaccatgggtagtacagactttccgcaagagggcatgcatcagatgcacaagcccatcgatgggatccatgacaaggggatcgtggaggatattcactgtgggtccatgaaggggacggggatgcgcccacctcatccggggatgggccccccgcaaagcccaatggaccagcacagtcagggttacatgtccccacatccttcaccactaggggcacctgaacatgtctcttcacctatgagcggaggaggccccactccgccgcagatgcccccatcccagccgggcgcattgattcccggagacccacaggccatgtcgcaaccgaatcgcgggccctctccgttctcacccgtgcagctgcaccaactccgtgctcagattttggcgtataagatgctggccaggggacagcctttaccggaaacactccagctcgctgtccaaggcaagagaacgctgcccgggctccaacagcagcagcaacagcagcaacagcagcagcagcagcagcaacagcagcagcaacagcagcagcagccgcaacagcagccccctcagcctcagacccagcaacagcagcagccagcgttagtgaactacaataggccgtccgggcccgggcccgaattgagcggcccctcgaccccacagaagctgccagtaccggcgcctggcggaagaccctcaccagcaccgcccgctgccgctcagccccccgctgcagctgtcccaggcccatcagtcccacagcctgctccaggacagccgagccctgtcttgcagctacagcagaaacagtcaagaatttctccaatacaaaagccacagggcctcgacccagtggaaatactgcaggagagagagtacaggcttcaggctagaatcgcacatagaattcaggagctagaaaatctgccaggctcccttcccccagacttacggacaaaggccacagtggaattaaaggctcttcgcttgctgaattttcagcgccagctccgtcaggaggttgtcgcctgcatgcggcgtgataccaccctggaaacagccctgaattcaaaagcctacaagcggagcaagcgccagacactgcgcgaggcacgcatgactgagaagctagaaaagcagcagaaaattgaacaggagcgcaagaggaggcagaaacaccaggaatatttaaattccattctgcagcacgccaaggattttaaggagtatcacagaagcgtcgctgggaagatccaaaaattgtctaaagcagtggcaacctggcacgcaaacacagaaagggagcagaaaaaggaaacggagaggatcgagaaggagaggatgaggaggctgatggctgaggatgaagagggttatcgcaagctaatcgatcagaagaaggataggagacttgcttatctgttgcaacagactgacgaatatgtggccaatcttaccaatctcgtgtgggaacacaaacaggcccaagccgcgaaggagaagaagaagcgttag

SEQ ID NO: 108043 - DNA, 468 bp, Artificial Sequence
  derived and/or modified sequence
atgtccacccccacagaccctggagccatgccccatcctgggccttctcctggtccaggcccatcccccggtcccatcctgggccctagcccaggacccggaccctcgccaggcagcgttcacagcatgatggggccatcacctggacccccttcagtcagtcatcccatgcctaccatgggtagcaccgacttcccccaggagggtatgcatcagatgcacaagccgatcgatgggattcacgacaagggtatcgtagaggacattcattgcggtagcatgaagggcaccggcatgagaccccctcacccaggtatgggcccacctcagtcccctatggaccagcacagtcaggggtacatgagccctcacccgtccccgctgggagcgcctgaacatgtcagctcacccatgtcgggcggagggcctacacctccccaaatgcccccatcccaaccgggagcatag

SEQ ID NO: 108044 - DNA, 1680 bp, Artificial Sequence
  derived and/or modified sequence
atgagcacaccaacggacccaggggctatgccacacccgggaccaagccctgggcctggtccctccccagggccaatcttaggtccctctccaggccctggcccttctcctggctccgtacactcaatgatggggccttctcctggtccgcctagcgtctcacaccccatgcccactatgggcagtacagactttccacaggaggggatgcaccagatgcacaagccaattgatggcatccatgataaaggtatcgtggaggacatccattgcggaagcatgaaaggcaccggcatgaggccgcctcacccagggatgggcccaccacagagcccaatggaccagcatagtcagggctacatgtcaccacatccaagcccactgggggcaccggaacacgtttcctcgccgatgagtgggggtgggcctacccctccgcagatgccccctagccagccaggagcgctcatcccgggtgaccctcaagccatgtctcaacccaatagaggcccatctcccttttcccccgtacaactgcaccagttgagggcacagatattagcctacaaaatgctggccaggggccagccgctgcccgaaaccttgcaactagcagtgcaagggaagagaactcttcctggactacagcagcaacagcagcagcagcaacaacagcaacagcagcagcagcagcagcagcaacagcaacagcaaccacagcagcagccccctcagcctcagacccaacaacagcagcagcctgccctagtcaattataaccggccttctggtcctggcccagaactgagcggtccttctaccccacagaagttgcccgtgcccgctcctggcggaaggccatctcccgctccgcctgctgcagcacagccacctgcagccgctgtccctgggcctagcgttccccagccagctcctggacagccaagccccgttctgcagctgcaacagaagcagtcaaggatcagtcctatccagaagccccagggtctcgaccccgtcgaaatattgcaggagcgggaataccggttacaggcgcgtatagcacatcgcattcaggagcttgaaaatctccctggcagcttgcctcccgacctgaggactaaagcgactgtggagctcaaggcgctgcgcctacttaacttccagcggcagcttagacaggaagtggttgcgtgcatgcgacgagacactaccctggagaccgccctcaattcaaaggcatataagcgttctaaacgccagactctgagagaggccagaatgacagaaaaactggagaaacaacaaaaaatagagcaagagcggaagaggagacaaaaacatcaggagtacctgaattccattctgcagcatgctaaagacttcaaggaataccatcggagcgttgccggtaagattcaaaagctgtcaaaggccgtcgcaacctggcacgccaataccgagcgggaacagaagaaggagacagagcgtattgagaaagagcgaatgagacggctaatggcggaggacgaagaaggatacagaaagctcattgaccagaagaaggatcgccgtttagcatacctactacagcagacagacgagtacgtggcaaatctgaccaacctggtatgggaacacaagcaggcccaggctgccaaggaaaagaaaaaacgctag

SEQ ID NO: 108045 - DNA, 564 bp, Artificial Sequence
  derived and/or modified sequence
gcagcggctcgggcagctgctcctgcccgcaccctcccctggagcccggggaggacaaggcgagcattactctactgactggcagagacaggagaggtagatgtccacgcccacagaccctggtgcgatgccccacccagggccttcgccggggcctgggccttcccctgggccaattcttgggcctagtccaggaccaggaccatccccaggttccgtccacagcatgatggggccaagtcctggacctccaagtgtctcccatcctatgccgacgatggggtccacagacttcccacaggaaggcatgcatcaaatgcataagcccatcgatggtatacatgacaaggggattgtagaagacatccattgtggatccatgaagggcactggtatgcgaccacctcacccaggcatgggccctccccagagtccaatggatcaacacagccaaggttatatgtcaccacacccatctccattaggagccccagagcacgtctccagccctatgtctggaggaggcccaactccacctcagatgccaccaagccagccgggggc

SEQ ID NO: 108046 - DNA, 1744 bp, Artificial Sequence
  derived and/or modified sequence
agattcagccagcacactcctcgcgagcaagcattactctactgactggcagagacaggagaggtagatgtccacgcccacagaccctggtgcgatgccccacccagggccttcgccggggcctgggccttcccctgggccaattcttgggcctagtccaggaccaggaccatccccaggttccgtccacagcatgatggggccaagtcctggacctccaagtgtctcccatcctatgccgacgatggggtccacagacttcccacaggaaggcatgcatcaaatgcataagcccatcgatggtatacatgacaaggggattgtagaagacatccattgtggatccatgaagggcactggtatgcgaccacctcacccaggcatgggccctccccagagtccaatggatcaacacagccaaggttatatgtcaccacacccatctccattaggagccccagagcacgtctccagccctatgtctggaggaggcccaactccacctcagatgccaccaagccagccgggggccctcatcccaggtgatccgcaggccatgagccagcccaacagaggtccctcacctttcagtcctgtccagctgcatcagcttcgagctcagattttagcttataaaatgctggcccgaggccagcccctccccgaaacgctgcagcttgcagtccaggggaaaaggacgttgcctggcttgcagcaacaacagcagcagcaacagcagcagcagcagcagcagcagcagcagcagcagcagcaacagcagccgcagcagcagccgccgcaaccacagacgcagcaacaacagcagccggcccttgttaactacaacagaccatctggcccggggccggagctgagcggcccgagcaccccgcagaagctgccggtgcccgcgcccggcggccggccctcgcccgcgccccccgcagccgcgcagccgcccgcggccgcagtgcccgggccctcagtgccgcagccggccccggggcagccctcgcccgtcctccagctgcagcagaagcagagccgcatcagccccatccagaaaccgcaaggcctggaccccgtggaaattctgcaagagcgggaatacagacttcaggcccgcatagctcataggatacaagaactggaaaatctgcctggctctttgccaccagatttaagaaccaaagcaaccgtggaactaaaagcacttcggttactcaatttccagcgtcagctgagacaggaggtggtggcctgcatgcgcagggacacgaccctggagacggctctcaactccaaagcatacaaacggagcaagcgccagactctgagagaagctcgcatgaccgagaagctggagaagcagcagaagattgagcaggagaggaaacgccgtcagaaacaccaggaatacctgaacagtattttgcaacatgcaaaagattttaaggaatatcatcggtctgtggccggaaagatccagaagctctccaaagcagtggcaacttggcatgccaacactgaaagagagcagaagaaggagacagagcggattgaaaaggagagaatgcggcgactgatggctgaagatgaggagggttatagaaaactgattgatcaaaagaaagacaggcgtttagcttaccttttgcagcagaccgatgagtatgtagccaatctgaccaatctggtttgggagcacaagcaagcccaggcagccaaagagaagaagaagagg

SEQ ID NO: 108047 - protein, 119 aa, Artificial Sequence [sequence omitted]

SEQ ID NO: 108048 - DNA, 711 bp, Artificial Sequence
  derived and/or modified sequence
atggaggaggaggtgagactgaagaagagaaagagaagaagaaacgtggacaaggaccccgccaaggaggacgtggagaaggccaagaagagaagaggcagaccccccgccgagaagctgagccccaacccccccaagctgaccaagcagatgaacgccatcatcgacaccgtgatcaactacaaggacagcagcggcagacagctgagcgaggtgttcatccagctgcccagcagaaaggagctgcccgagtactacgagctgatcagaaagcccgtggacttcaagaagatcaaggagagaatcagaaaccacaagtacagaagcctgggcgacctggagaaggacgtgatgctgctgtgccacaacgcccagaccttcaacctggagggcagccagatctacgaggacagcatcgtgctgcagagcgtgttcaagagcgccagacagaagatcgccaaggaggaggagagcgaggacgagagcaacgaggaggaggaggaggaggacgaggaggagagcgagagcgaggccaagagcgtgaaggtgaagatcaagctgaacaagaaggacgacaagggcagagacaagggcaagggcaagaagagacccaacagaggcaaggccaagcccgtggtgagcgacttcgacagcgacgaggagcaggacgagagagagcagagcgagggcagcggcaccgacgacgagtag

SEQ ID NO: 108049 - DNA, 360 bp, Artificial Sequence
  derived and/or modified sequence
atgctgctgtgccacaacgcccagaccttcaacctggagggcagccagatctacgaggacagcatcgtgctgcagagcgtgttcaagagcgccagacagaagatcgccaaggaggaggagagcgaggacgagagcaacgaggaggaggaggaggaggacgaggaggagagcgagagcgaggccaagagcgtgaaggtgaagatcaagctgaacaagaaggacgacaagggcagagacaagggcaagggcaagaagagacccaacagaggcaaggccaagcccgtggtgagcgacttcgacagcgacgaggagcaggacgagagagagcagagcgagggcagcggcaccgacgacgagtag

SEQ ID NO: 108050 - DNA, 534 bp, Artificial Sequence
  derived and/or modified sequence
atggaggaggaggtgagactgaagaagagaaagagaagaagaaacgtggacaaggaccccgccaaggaggacgtggagaaggccaagaagagaagaggcagaccccccgccgagaagctgagccccaacccccccaagctgaccaagcagatgaacgccatcatcgacaccgtgatcaactacaaggacagcagcggcagacagctgagcgaggtgttcatccagctgcccagcagaaaggagctgcccgagtactacgagctgatcagaaagcccgtggacttcaagaagatcaaggagagaatcagaaaccacaagtacagaagcctgggcgacctggagaaggacgtgatgctgctgtgccacaacgcccagaccttcaacctggagggcagccagatctacgaggacagcatcgtgctgcagagcgtgttcaagagcgccagacagaagatcgccaaggaggaggagagcgaggacgagagcaacgaggaggaggaggaggaggacgaggaggagagcgagagcgagtag

SEQ ID NO: 108051 - DNA, 711 bp, Artificial Sequence
  derived and/or modified sequence
atggaagaggaagtgcgtctcaaaaagagaaaaagacggcgaaatgttgacaaagatccagccaaggaggacgtggaaaaagctaaaaagagacggggcaggccacctgccgagaagctctctccaaaccctcccaaactgaccaagcagatgaatgccatcattgatacagttattaactataaggacagcagcggacgtcagcttagtgaggtcttcattcaactgccttctcggaaagaactgcccgagtattatgagcttatccgaaaaccggtggactttaaaaaaattaaagagcgtataaggaatcataaatatcgcagtctgggcgacctcgaaaaggatgtcatgttactttgtcacaatgcacagacctttaacctcgaggggagtcaaatatatgaggacagtattgtgctgcagtccgtgttcaaaagcgcacggcagaaaatcgcgaaagaggaggaatcggaggacgaatctaatgaggaagaggaggaggaagatgaggaagagtcagaatcagaagccaagagcgtgaaagtgaaaattaagctcaacaagaaagacgacaaggggagagataagggtaagggaaagaagaggcccaaccgcggaaaagccaaacccgtggtaagcgattttgacagcgatgaggaacaagacgaacgcgagcagagcgaagggtctggaacagatgacgagtag

SEQ ID NO: 108052 - DNA, 360 bp, Artificial Sequence
  derived and/or modified sequence
atgctcttgtgccataatgctcaaacgtttaatctggagggctctcagatttatgaagactccatagtgcttcagtccgtctttaagtctgcacgccaaaagattgccaaggaggaggaatctgaggatgagagtaacgaagaggaggaagaggaagacgaggaggagagtgaaagcgaggccaagtccgtgaaagtgaagatcaagctgaacaaaaaagatgataaaggcagggataaaggcaaggggaagaaacgaccgaaccgggggaaggccaaacccgtggtaagcgacttcgatagcgatgaggaacaagatgagcgcgagcagagcgaaggttctgggacagatgacgaatag

SEQ ID NO: 108053 - DNA, 711 bp, Artificial Sequence
  derived and/or modified sequence
atggaggaggaggtgcgccttaagaaacgtaagaggcgacgaaacgtcgataaggatcctgccaaagaagatgtggaaaaagccaagaaacgcagaggtcgccctccggcagagaagctgtcccccaacccacccaagctgaccaagcagatgaacgccatcatcgacaccgtgatcaactataaagacagcagcggccgtcagctcagtgaggtctttattcagctgccaagtcgcaaagaactccccgagtactatgagctgattcggaagccagtggatttcaaaaaaatcaaggagaggatcaggaaccacaaatataggtccctgggggacctggagaaagatgtgatgctgctctgccataacgcacaaaccttcaacctggagggttcccagatctatgaggactctatagtgctccagtccgtgttcaagagtgctcgtcagaaaattgcaaaggaagaagaatcagaagatgaatcaaatgaagaagaggaggaggaagatgaagaggagtccgagtccgaggccaagtccgtgaaagtgaaaataaagttgaacaaaaaagatgataagggccgcgacaagggaaaaggcaagaaaagacctaatcggggcaaggcaaagcctgtcgtatcggatttcgactcagacgaggagcaagatgaaagagagcaatcagaggggagtggtacagatgacgagtag

SEQ ID NO: 108054 - DNA, 711 bp, Artificial Sequence
  derived and/or modified sequence
atggaggaggaagtgcggctgaaaaagagaaaacggcggcgaaatgtcgacaaggaccctgccaaggaagacgtcgaaaaagccaagaagcgccgtggtcgaccacccgcagagaaactttcccctaacccgccgaaactcactaagcagatgaatgccatcattgatacggtaataaactacaaggactcttcggggaggcagctgagtgaagtatttatccaactgccctctaggaaagagctgcccgaatactatgagctaatccgtaagccagtcgatttcaaaaaaattaaagaacgcattcggaaccataagtatcggtcccttggggaccttgagaaagatgttatgctgctctgccataacgcccagactttcaacctggaggggtctcagatctatgaggattctattgtcctgcagagcgtgtttaagtccgcacggcagaagatcgccaaagaagaggagagcgaggatgagtctaatgaggaggaagaggaagaggacgaggaggagtcagagagtgaggcaaagagcgttaaagtgaagatcaaactgaataaaaaggacgacaaaggtagggataagggcaaaggcaagaaaaggcctaataggggcaaggccaaacccgttgtgagcgactttgattctgacgaggaacaggatgaaagagagcagagcgagggcagcggcaccgacgatgagtag

SEQ ID NO: 108055 - DNA, 534 bp, Artificial Sequence
  derived and/or modified sequence
atggaggaggaggtgcggctgaagaagagaaagcgccgcagaaacgtcgataaggatcccgctaaagaggacgtcgagaaagctaaaaagcggcgaggacgcccccctgccgaaaaactctcgccaaatcctcctaaactgaccaagcaaatgaatgccattatcgatacagtcatcaactacaaagactcttctggccgccagttaagcgaggtatttatccagctgcccagtagaaaagaactgcccgagtactacgaacttatcagaaaaccagtcgatttcaagaaaattaaggaacggatccgtaaccataagtacaggtcgttgggagacctggaaaaggatgtgatgctgctttgtcacaacgcccagacattcaatcttgagggttctcagatttacgaagattccatcgtgctccagagcgtgttcaagtcagcgcgccaaaaaattgcgaaagaagaagagtccgaagacgagagtaacgaagaagaagaggaggaggatgaggaggagagcgaatccgaatag

SEQ ID NO: 108056 - DNA, 711 bp, Artificial Sequence
  derived and/or modified sequence
atggaggaggaggtgcggctgaagaagaggaagagaagaagaaatgtggacaaggaccctgccaaggaggatgtggagaaggccaagaagagaagaggccggcccccagctgagaagctgagccccaacccccccaagctgaccaagcagatgaatgccatcatcgacaccgtcatcaactacaaggacagcagcggccggcagctgtctgaggtgttcatccagctgcccagcaggaaggagctgcctgagtactatgagctgatcaggaagcctgtggacttcaagaagatcaaggagcgcatccggaaccacaagtaccgcagcctgggggacctggagaaggatgtgatgctgctgtgccacaatgcccagaccttcaacctggagggcagccagatctatgaggacagcatcgtgctgcagagcgtcttcaagagcgcccggcagaagatcgccaaggaggaggagagtgaagatgagagcaatgaggaggaggaggaggaggatgaggaggagagcgagagcgaggccaagtctgtgaaggtgaagatcaagctgaacaagaaggatgacaagggccgggacaagggcaagggcaagaagaggcccaacagaggcaaggccaagcctgtggtgtctgactttgacagtgatgaggagcaggatgagcgggagcagagcgagggcagcggcacagatgatgaatag

SEQ ID NO: 108057 - DNA, 360 bp, Artificial Sequence
  derived and/or modified sequence
atgctgctgtgccacaatgcccagaccttcaacctggagggcagccagatctatgaagattccatcgtgctgcagagcgtcttcaagagcgcccggcagaagatcgccaaggaggaggagagtgaagatgagagcaatgaggaggaggaggaggaggatgaggaggagagcgagagcgaggccaagtctgtgaaggtgaagatcaagctgaacaagaaggatgacaagggccgggacaagggcaagggcaagaagaggcccaacagaggcaaggccaagcctgtggtgtctgactttgacagtgatgaggagcaggatgagcgggagcagagcgagggcagcggcacagatgatgaatag

SEQ ID NO: 108058 - DNA, 534 bp, Artificial Sequence
  derived and/or modified sequence
atggaggaggaggtgcggctgaagaagaggaagagaagaagaaatgtggacaaggaccctgccaaggaggatgtggagaaggccaagaagagaagaggccggcccccagctgagaagctgagccccaacccccccaagctgaccaagcagatgaatgccatcatcgacaccgtcatcaactacaaggacagcagcggccggcagctgtctgaggtgttcatccagctgcccagcaggaaggagctgcctgagtactatgagctgatcaggaagcctgtggacttcaagaagatcaaggagcgcatccggaaccacaagtaccgcagcctgggggacctggagaaggatgtgatgctgctgtgccacaatgcccagaccttcaacctggagggcagccagatctatgaggacagcatcgtgctgcagagcgtcttcaagagcgcccggcagaagatcgccaaggaggaggagagtgaagatgagagcaatgaggaggaggaggaggaggatgaggaggagagcgagagcgagtag

SEQ ID NO: 108059 - DNA, 711 bp, Artificial Sequence
  derived and/or modified sequence
atggaggaggaggtgcggctgaagaagcggaagcggcggcggaacgttgataaagacccggccaaggaagatgttgagaaggcaaagaagcggcgggggcgtcccccagctgagaagttgagcccgaatcccccgaagctaaccaagcaaatgaatgcgatcattgatactgtcataaattacaaggattcaagcggccgacagctctccgaggtgtttatccagcttccatcccggaaggagctcccagagtattatgagctcatccgaaaacctgtggactttaagaaaataaaggagcgtattcgcaatcataagtacagatcacttggagacctcgagaaagatgtgatgcttttgtgccacaacgcccagacctttaatctggaaggctcccagatctacgaagatagcattgtccttcagagcgtgttcaaatcggcccggcaaaagattgcaaaggaagaagagagtgaggacgaatctaatgaggaagaagaggaggaagacgaggaagagtccgaatcagaggcaaaaagcgtgaaagtgaagatcaaacttaacaaaaaagacgacaaggggcgagataaaggcaaagggaagaaaagacctaacagaggtaaagctaagcccgtggtctccgacttcgatagcgacgaggagcaggatgagcgtgagcaatcagaaggtagtggaaccgacgacgaatag

SEQ ID NO: 108060 - DNA, 360 bp, Artificial Sequence
  derived and/or modified sequence
atgctgctgtgccacaacgcccagaccttcaacctggagggcagccagatttatgaggactcaatagtgcttcagagcgtatttaaatcagccagacagaagatcgctaaagaggaggagtctgaggatgaatcaaatgaggaggaagaggaagaggatgaggaggagtcagaaagcgaagccaagagcgtcaaagtgaagataaagcttaataagaaagacgataaggggagagataaagggaaaggaaagaaacgtccaaataggggcaaggctaaacccgttgttagcgactttgactccgacgaagaacaggatgagcgggagcagtccgaagggagtggcactgacgatgaatag

SEQ ID NO: 108061 - DNA, 711 bp, Artificial Sequence
  derived and/or modified sequence
atggaggaggaggtgcggctgaagaagcggaagcggcggcggaacgttgataaggaccccgcgaaagaggatgtcgaaaaggcaaaaaagcggagaggtcgccctcctgctgaaaagctgtctcctaacccacctaaactgacaaagcagatgaacgccatcattgatacagtgattaattacaaggactcctcagggcggcagctctctgaggtttttatccaactgccgtcaagaaaggaactcccagagtattacgaacttatacggaaacccgtggatttcaagaaaatcaaggaaagaattaggaaccataagtacaggtctctgggcgacctggaaaaagatgtgatgcttttatgtcataatgcccaaacatttaacctcgaaggttctcaaatttatgaagactccatcgtcttgcagtcggtgttcaagtccgctcgacagaaaatagccaaagaggaagagtctgaggacgaatccaacgaggaggaggaggaagaagatgaggaggagagtgaaagcgaagccaaaagcgtgaaggttaagatcaaattaaacaagaaggacgataagggcagagacaaaggaaagggcaagaagcgtcctaacagagggaaagccaaaccagtagttagcgactttgacagcgacgaggagcaggacgagcgggaacagagtgaggggtccggaacagacgatgagtag

SEQ ID NO: 108062 - DNA, 711 bp, Artificial Sequence
  derived and/or modified sequence
atggaggaggaggtgcggctgaagaagcggaagcggcggcggaacgtggataaagatcccgctaaagaggacgtggaaaaggctaagaaacgccgcggcaggccgcctgccgagaagctgagccctaatcctcctaaactcaccaagcagatgaacgctattatcgatacggtaatcaattataaggacagtagtgggcggcagctgagtgaggtgttcatccagcttccttctcgaaaggaactgccagagtactacgaattgataagaaaaccggtcgacttcaaaaagatcaaagagaggatccggaaccacaaatacaggtccctgggggaccttgaaaaggatgtaatgttactctgtcacaacgcccaaaccttcaatctcgaaggctcccagatttacgaggattctatcgtgctgcagtctgtgtttaagtccgctaggcagaagatcgccaaggaggaggaaagcgaagacgaatcgaacgaggaggaagaggaagaggacgaagaagagtcggaatccgaggccaaatctgtaaaggtaaaaattaagcttaataaaaaagacgacaaggggagagacaaagggaagggcaagaaaagacccaatcggggcaaagccaagccagtggtcagcgactttgatagcgacgaagaacaagacgagcgggagcagtctgaggggagtgggacggacgatgagtag

SEQ ID NO: 108063 - DNA, 534 bp, Artificial Sequence
  derived and/or modified sequence
atggaggaggaggtgcggctgaagaagcggaagcggcggcggaacgtcgataaggaccctgctaaggaggacgtggagaaagccaagaagcgccgaggaagacccccagccgagaagctgagccccaacccgcccaaactgaccaaacagatgaacgctatcatagacacagtaattaattacaaggattcctcaggcaggcagctttccgaggtattcatccagcttccctcccggaaagagctacctgaatattatgaactcattaggaaacctgtggacttcaaaaaaatcaaagaaaggattaggaatcataagtaccggagcctgggggatctcgagaaggatgtcatgctgctctgtcataatgcacaaacatttaatctggagggctcacagatatacgaggattcgatcgttctccagagtgtattcaagtccgcaaggcagaagatcgctaaagaggaagagagcgaagatgaatccaacgaggaggaggaggaggaggatgaggaagagagcgagagcgaatag

SEQ ID NO: 108064 - DNA, 711 bp, Artificial Sequence
  derived and/or modified sequence
atggaggaagaggtgcgacttaaaaagaggaaaaggcgaagaaacgtggataaggaccctgccaaggaggacgtggaaaaggctaaaaagagaagaggccgaccacctgctgagaagctgtcacccaaccctcctaaacttactaaacaaatgaacgcgattatcgatacggttatcaactataaggattcttccgggcgacaactctctgaggtttttattcagttgccgtccagaaaggaactgcccgaatattacgagttgatccgcaaaccagtcgattttaagaaaatcaaagaaaggatccggaatcacaagtatcgctccctgggagatttggagaaagatgtgatgctgttgtgtcacaacgcccagactttcaacctggaaggtagtcagatctacgaagactcaattgttttgcagtcagtgttcaaaagcgcaagacagaagattgccaaagaagaggaaagtgaagacgagagcaatgaagaggaggaagaggaagacgaggaggaaagcgaaagtgaggccaaatcagtcaaggttaaaattaaactgaacaagaaggatgataaaggcagggacaagggaaaagggaagaagcggcctaatcgaggtaaggccaagcccgtggtcagcgatttcgattcagatgaggagcaggacgagagggagcaatctgaaggcagcggaacggatgacgagtag

SEQ ID NO: 108065 - DNA, 360 bp, Artificial Sequence
  derived and/or modified sequence
atgttactgtgccataatgcccaaacattcaatctggaaggctcacagatatacgaagattctattgtcctgcagagcgtgtttaaaagtgcaagacagaaaatcgctaaggaagaggaaagtgaggacgaatctaatgaagaggaggaagaggaagatgaagaagaatctgagtctgaggccaaatccgtaaaagtgaagattaaactcaacaaaaaggacgataaaggtcgagataaaggtaagggaaaaaaaagaccaaaccggggaaaggctaaacccgtcgtctccgactttgacagcgacgaggaacaggatgagagggagcagtcagaagggagcggcactgatgatgaatag

SEQ ID NO: 108066 - DNA, 711 bp, Artificial Sequence
  derived and/or modified sequence
atggaagaggaagtgagactgaaaaagaggaagcgcaggcgcaacgtcgacaaggaccctgccaaggaagacgtggagaaggccaagaaaagacgtggcaggccccctgcagagaaactgagccccaatccgcctaaactaaccaagcaaatgaatgctatcatcgacaccgtgataaactataaggactcaagtggaaggcaactctccgaggtcttcattcaactgccctctaggaaggaactacctgaatattatgaactaattcgaaaacctgtcgattttaaaaagattaaagaacggatacgcaaccacaagtatcgtagtctgggcgacttagaaaaagacgttatgctgctgtgccacaacgctcaaacgttcaaccttgagggcagtcagatctacgaggacagtatagtgttgcagtccgttttcaagagcgctcggcagaagatcgctaaagaggaggagtccgaggatgaatcaaatgaagaggaagaggaagaagacgaggaagaaagcgaaagtgaggcgaagtcagtcaaagtcaagatcaagctgaacaagaaagatgacaaaggccgtgataagggcaaaggtaaaaaaagacccaaccggggtaaggcaaaacccgtggttagtgactttgactcagacgaagagcaggatgagagagagcagagcgaaggttccggtactgacgatgagtag

SEQ ID NO: 108067 - DNA, 711 bp, Artificial Sequence
  derived and/or modified sequence
atggaggaggaggtccgcctcaagaagcgaaaaagacgcagaaatgtggataaggaccccgcaaaagaggatgtggaaaaggcaaaaaaaagacggggaaggccccctgcggagaaactgtcacctaatccacccaagctgacaaaacaaatgaatgccataattgataccgtcattaattacaaggattcatccgggcgtcagctcagcgaggtgttcattcaactcccctcacgtaaagagcttcctgaatattatgagctcatcagaaagccagtggacttcaagaagataaaagagcgcatcaggaaccataaataccgcagtctgggggacttggaaaaggacgtgatgctcctttgccacaatgcacaaacattcaacctggaaggctcgcagatttacgaggattcaatcgtgctgcaatccgtctttaagtcagcgaggcaaaaaatcgccaaagaagaggagagcgaagatgagtccaatgaggaagaagaagaagaggatgaggaggagtctgaatcagaggctaagtctgtaaaagtgaagatcaaactgaataagaaggacgacaagggaagagacaaaggaaaaggcaagaaaaggccaaataggggaaaagccaagcccgtggtgagtgactttgacagcgacgaggaacaagatgagcgagagcagtcagagggttcaggaaccgatgatgagtag

SEQ ID NO: 108068 - DNA, 534 bp, Artificial Sequence
  derived and/or modified sequence
atggaggaagaggtacgcctcaagaagcgaaaaagacgcaggaacgtcgacaaggacccagccaaggaggacgtagaaaaagccaagaagcgccgaggcaggcctcctgcagaaaagctgagtccgaatccaccgaaactcactaaacagatgaatgctattatcgataccgtgatcaactacaaggatagctccgggaggcagctgagcgaagtttttattcagctgccttcccgtaaagaacttcccgagtattacgagttgatcaggaagcccgtggatttcaaaaagatcaaagagaggatcagaaatcacaagtatcgcagtcttggcgatctcgagaaagacgtgatgttattgtgccataatgctcaaactttcaacctagaggggagtcagatttacgaagatagcattgttctccagtccgtcttcaagagcgcacgacagaaaatagccaaggaggaagagtctgaagatgagagtaatgaggaagaggaggaggaggatgaggaggagagtgaatctgagtag

SEQ ID NO: 108069 - DNA, 1118 bp, Artificial Sequence
  derived and/or modified sequence
acttcattaaatctagaggcagttgagcatgggagccgtctgtatgttgaattagggctcgcactcttgcgcaacacgtcaccagtcggaaactgggggtttgcttctgtgatttatttcattattgtgctgctgatgaagagactagcagctcgctgctttgctggcttgttaattttatccccactaactgtgatttctgatagccggcctgctgatagtggtaagtgctgctggctctggtttaaagcaagcgtttgcaggccatcgaagacggcaatttggaggaaatggaagaggaagtacggcttaagaagcgaaaaagacgaagaaatgtggataaagatcctgcaaaagaagatgtggaaaaagctaagaagagaagaggccgccctcccgctgagaaactgtcaccaaatccccccaaactgacaaagcagatgaacgctatcatcgatactgtgataaactacaaagatagttcagggcgacagctcagtgaagtcttcattcagttaccttcaaggaaagaattaccagaatactatgaattaattaggaagccagtggatttcaaaaaaataaaggaaaggattcgtaatcataagtaccggagcctaggcgacctggagaaggatgtcatgcttctctgtcacaacgctcagacgttcaacctggagggatcccagatctatgaagactccatcgtcttacagtcagtgtttaagagtgcccggcagaaaattgccaaagaggaagagagtgaggatgaaagcaatgaagaggaggaagaggaagatgaagaagagtcagagtccgaggcaaaatcagtcaaggtgaaaattaagctcaataaaaaagatgacaaaggccgggacaaagggaaaggcaagaaaaggccaaatcgaggaaaagccaaacctgtagtgagcgattttgacagcgatgaggagcaggatgaacgtgaacagtcagaaggaagtgggacggatgatgagtgatcagtatggacctttttccttggtagaactgaattccttcctcccctgtctcatttctacccagtgagttcatttgtcatataggcactgggttgtttctatatcatcatcgtctat

SEQ ID NO: 108070 - DNA, 1787 bp, Artificial Sequence
  derived and/or modified sequence
agggctcgcactcttgcgcaacacgtcaccagtcggaaactgggggtttgcttctgtgatttatttcattattgtgctggtaaaagctgatgaagagactagcagctcgctgctttgctggcttgttaattttatccccactaactgtgatttctgatagccggcctgctgatagtggtaagtgctgctggctctggtttaaagcaagcgtttgcaggccatcgaagacggcaatttggaggaaatggaagaggaagtacggcttaagaagcgaaaaagacgaagaaatgtggataaagatcctgcaaaagaagatgtggaaaaagctaagaagagaagaggccgccctcccgctgagaaactgtcaccaaatccccccaaactgacaaagcagatgaacgctatcatcgatactgtgataaactacaaagatagttcagggcgacagctcagtgaagtcttcattcagttaccttcaaggaaagaattaccagaatactatgaattaattaggaagccagtggatttcaaaaaaataaaggaaaggattcgtaatcataagtaccggagcctaggcgacctggagaaggatgtcatgcttctctgtcacaacgctcagacgttcaacctggagggatcccagatctatgaagactccatcgtcttacagtcagtgtttaagagtgcccggcagaaaattgccaaagaggaagagagtgaggatgaaagcaatgaagaggaggaagaggaagatgaagaagagtcagagtccgaggcaaaatcagtcaaggtgaaaattaagctcaataaaaaagatgacaaaggccgggacaaagggaaaggcaagaaaaggccaaatcgaggaaaagccaaacctgtagtgagcgattttgacagcgatgaggagcaggatgaacgtgaacagtcagaaggaagtgggacggatgatgagtgatcagtatggacctttttccttggtagaactgaattccttcctcccctgtctcatttctacccagtgagttcatttgtcatataggcactgggttgtttctatatcatcatcgtctataaactagctttaggatagtgccagacaaacatatgatatcatggtgtaaaaaacacacacatacacaaatatttgtaacatattgtgaccaaatgggcctcaaagattcagattgaaacaaacaaaaagcttttgatggaaaatatgtgggtggatagtatatttctatgggtgggtctaatttggtaacggtttgattgtgcctggttttatcacctgttcagatgagaagatttttgtcttttgtagcactgataaccaggagaagccattaaaagccactggttattttatttttcatcaggcaattttcgaggtttttatttgttcggtattgtttttttacactgtggtacatataagcaactttaataggtgataaatgtacagtagttagatttcacctgcatatacatttttccattttatgctctatgatctgaacaaaagctttttgaattgtataagatttatgtctactgtaaacattgcttaatttttttgctcttgatttaaaaaaaagttttgttgaaagcgctattgaatattgcaatctatatagtgtattggatggcttcttttgtcaccctgatctcctatgttaccaatgtgtatcgtctccttctccctaaagtgtacttaatctttgctttctttgcacaatgtctttggttgcaagtcataagcctgaggcaaataaaattccagtaatttc

SEQ ID NO: 108071 - DNA, 587 bp, Artificial Sequence
  derived and/or modified sequence
agtagaactacatcccaggcatgtgtaggccatcgaagacggcaatttggaggaaatggaagaggaagtacggcttaagaagcgaaaaagacgaagaaatgtggataaagatcctgcaaaagaagatgtggaaaaagctaagaagagaagaggccgccctcccgctgagaaactgtcaccaaatccccccaaactgacaaagcagatgaacgctatcatcgatactgtgataaactacaaagatagttcagggcgacagctcagtgaagtcttcattcagttaccttcaaggaaagaattaccagaatactatgaattaattaggaagccagtggatttcaaaaaaataaaggaaaggattcgtaatcataagtaccggagcctaggcgacctggagaaggatgtcatgcttctctgtcacaacgctcagacgttcaacctggagggatcccagatctatgaagactccatcgtcttacagtcagtgtttaagagtgcccggcagaaaattgccaaagaggaagagagtgaggatgaaagcaatgaagaggaggaagaggaagatgaagaagagtcagagtccgagg

SEQ ID NO: 108072 - protein, 271 aa, Artificial Sequence
  derived and/or modified sequence
MKRLAARCFAGLLILSPLTVISDSRPADSGKAIEDGNLEEMEEEVRLKKRKRRRNVDKDPAKEDVEKAKKRRGRPPAEKLSPNPPKLTKQMNAIIDTVINYKDSSGRQLSEVFIQLPSRKELPEYYELIRKPVDFKKIKERIRNHKYRSLGDLEKDVMLLCHNAQTFNLEGSQIYEDSIVLQSVFKSARQKIAKEEESEDESNEEEEEEDEEESESEAKSVKVKIKLNKKDDKGRDKGKGKKRPNRGKAKPVVSDFDSDEEQDERVSVADW

SEQ ID NO: 108073 - protein, 153 aa, Artificial Sequence
  derived and/or modified sequence
MKRLAARCFAGLLILSPLTVISDSRPADSGKAIEDGNLEEMEEEVRLKKRKRRRNVDKDPAKEDVEKAKKRRGRPPAEKLSPNPPKLTKQMNAIIDTVINYKDSSGRQLSEVFIQLPSRKELPEYYELIRKPVDFKKIKERIRNHKYRSLGDL

SEQ ID NO: 108074 - DNA, 816 bp, Artificial Sequence
  derived and/or modified sequence
atgaagagactggccgccagatgcttcgccggcctgctgatcctgagccccctgaccgtgatcagcgacagcagacccgccgacagcggcaaggccatcgaggacggcaacctggaggagatggaggaggaggtgagactgaagaagagaaagagaagaagaaacgtggacaaggaccccgccaaggaggacgtggagaaggccaagaagagaagaggcagaccccccgccgagaagctgagccccaacccccccaagctgaccaagcagatgaacgccatcatcgacaccgtgatcaactacaaggacagcagcggcagacagctgagcgaggtgttcatccagctgcccagcagaaaggagctgcccgagtactacgagctgatcagaaagcccgtggacttcaagaagatcaaggagagaatcagaaaccacaagtacagaagcctgggcgacctggagaaggacgtgatgctgctgtgccacaacgcccagaccttcaacctggagggcagccagatctacgaggacagcatcgtgctgcagagcgtgttcaagagcgccagacagaagatcgccaaggaggaggagagcgaggacgagagcaacgaggaggaggaggaggaggacgaggaggagagcgagagcgaggccaagagcgtgaaggtgaagatcaagctgaacaagaaggacgacaagggcagagacaagggcaagggcaagaagagacccaacagaggcaaggccaagcccgtggtgagcgacttcgacagcgacgaggagcaggacgagagagtgagcgtggccgactggtag

SEQ ID NO: 108075 - DNA, 462 bp, Artificial Sequence
  derived and/or modified sequence
atgaagagactggccgccagatgcttcgccggcctgctgatcctgagccccctgaccgtgatcagcgacagcagacccgccgacagcggcaaggccatcgaggacggcaacctggaggagatggaggaggaggtgagactgaagaagagaaagagaagaagaaacgtggacaaggaccccgccaaggaggacgtggagaaggccaagaagagaagaggcagaccccccgccgagaagctgagccccaacccccccaagctgaccaagcagatgaacgccatcatcgacaccgtgatcaactacaaggacagcagcggcagacagctgagcgaggtgttcatccagctgcccagcagaaaggagctgcccgagtactacgagctgatcagaaagcccgtggacttcaagaagatcaaggagagaatcagaaaccacaagtacagaagcctgggcgacctgtag

SEQ ID NO: 108076 - DNA, 816 bp, Artificial Sequence
  derived and/or modified sequence
atgaaacgactggcagcacggtgcttcgcgggactgctcatcttgtctccccttaccgtgatctccgactcgagacccgccgattctggcaaagccattgaggatggaaacttggaggagatggaggaagaagtgcggctgaagaagcggaaaagacgccggaacgttgataaggatccagccaaggaagacgtagaaaaggcaaagaaacgcaggggtaggccgcccgcggaaaagctcagccccaaccctccgaagctgacgaaacagatgaatgccataatcgatacagttataaattataaggacagttctggacgacagcttagcgaagtattcatccagttacccagccgaaaggagctccccgagtattatgagctaatcagaaaacccgttgacttcaaaaagatcaaagagagaatacgtaaccataagtacagaagcctcggggatttggagaaggatgttatgctgctgtgtcataacgcgcagacatttaacctggagggcagccagatctacgaagatagtatcgtcctccagagcgtgtttaagagtgctcgacaaaaaattgcaaaggaagaggagtcagaagacgaatcgaatgaggaggaggaggaagaggacgaggaggagtccgagtccgaagctaagtcagtgaaagtgaaaatcaagcttaacaaaaaagacgacaagggtcgggacaaaggcaagggaaagaagagaccaaatcgcggcaaagcgaagccggtcgtcagcgattttgactcggacgaagaacaggacgaaagggtgtctgtcgctgattggtag

SEQ ID NO: 108077 - DNA, 462 bp, Artificial Sequence
  derived and/or modified sequence
atgaaacggctcgccgcacggtgctttgctggcctgcttatcctgtcccctctgacagtcatcagtgactccaggcctgcagattctgggaaagcaattgaggatgggaatttggaggagatggaggaggaggttcgcttgaaaaagcgtaagcgaaggcgtaacgtcgacaaagatcccgccaaggaagatgtggagaaggccaagaaacgaagagggaggccaccagcagagaagctctcaccaaacccacccaaactaactaaacagatgaatgctatcattgataccgtcattaattacaaggactctagcggaagacagttgtcagaggtgttcatccagttaccctcacgcaaagagcttccagaatactatgaattgattcgcaagccagtggacttcaaaaaaattaaggagcgcatacgtaatcataagtatcgctccctgggcgacctctag

SEQ ID NO: 108078 - DNA, 816 bp, Artificial Sequence
  derived and/or modified sequence
atgaagaggctggccgcccgctgctttgctggcctgctgatcctgagccccctgaccgtcatcagtgacagcaggcctgctgacagcggcaaggccattgaagatggcaacctggaggagatggaggaggaggtgcggctgaagaagaggaagagaagaagaaatgtggacaaggaccctgccaaggaggatgtggagaaggccaagaagagaagaggccggcccccagctgagaagctgagccccaacccccccaagctgaccaagcagatgaatgccatcatcgacaccgtcatcaactacaaggacagcagcggccggcagctgtctgaggtgttcatccagctgcccagcaggaaggagctgcctgagtactatgagctgatcaggaagcctgtggacttcaagaagatcaaggagcgcatccggaaccacaagtaccgcagcctgggggacctggagaaggatgtgatgctgctgtgccacaatgcccagaccttcaacctggagggcagccagatctatgaggacagcatcgtgctgcagagcgtcttcaagagcgcccggcagaagatcgccaaggaggaggagagtgaagatgagagcaatgaggaggaggaggaggaggatgaggaggagagcgagagcgaggccaagtctgtgaaggtgaagatcaagctgaacaagaaggatgacaagggccgggacaagggcaagggcaagaagaggcccaacagaggcaaggccaagcctgtggtgtctgactttgacagtgatgaggagcaggatgagcgggtgtctgtggccgactggtag

SEQ ID NO: 108079 - DNA, 462 bp, Artificial Sequence
  derived and/or modified sequence
atgaagaggctggccgcccgctgctttgctggcctgctgatcctgagccccctgaccgtcatcagtgacagcaggcctgctgacagcggcaaggccattgaagatggcaacctggaggagatggaggaggaggtgcggctgaagaagaggaagagaagaagaaatgtggacaaggaccctgccaaggaggatgtggagaaggccaagaagagaagaggccggcccccagctgagaagctgagccccaacccccccaagctgaccaagcagatgaatgccatcatcgacaccgtcatcaactacaaggacagcagcggccggcagctgtctgaggtgttcatccagctgcccagcaggaaggagctgcctgagtactatgagctgatcaggaagcctgtggacttcaagaagatcaaggagcgcatccggaaccacaagtaccgcagcctgggggacctgtag

SEQ ID NO: 108080 - DNA, 816 bp, Artificial Sequence
  derived and/or modified sequence
atgaagcggctggccgcccggtgcttcgccggcctgctgatcctgtcaccactcacagtaatttcagattcccggcctgccgacagcggaaaagccattgaggacggcaatctagaagagatggaggaggaggtgagacttaaaaagaggaagaggcgcaggaatgtggacaaggatccagccaaggaagacgttgaaaaggccaaaaagagacgaggcaggccaccagcagagaagctttcccctaacccacctaaactcaccaagcagatgaatgccatcatcgatacagtgatcaactataaagattccagtggcaggcagctgtcagaggtctttattcagctgccgagccgtaaagaactcccggaatactacgaacttatccgcaagccggtagacttcaagaaaatcaaggagagaattcggaaccataagtaccggtctttgggagacctggaaaaggacgttatgttgctttgtcacaatgcacagaccttcaatctggagggaagtcagatctacgaagactctatcgttctgcagtcggtttttaaaagtgcacgtcagaagatcgcaaaggaggaggaatcggaggacgagagcaatgaggaggaggaagaggaagatgaagaggagagcgagtccgaggcgaagagcgtcaaagtgaaaataaagcttaacaagaaagacgataaaggaagagacaaaggcaagggaaaaaaaagaccaaaccgtggaaaagcaaaacccgtcgtgagtgatttcgacagtgacgaggaacaggacgaacgtgtaagcgtggcggattggtag

SEQ ID NO: 108081 - DNA, 462 bp, Artificial Sequence
  derived and/or modified sequence
atgaagcggctggccgcccggtgcttcgccggcctgctgatcctgtccccgctcactgtaatctcggattcccgaccagctgactccggcaaggcgatagaagatggaaatttggaggaaatggaggaagaagtccgcctgaaaaagcggaagagacggcggaacgttgacaaagatcccgctaaagaagacgtggagaaagctaaaaagcgccgcgggcgcccacccgcagagaagctgtcccctaacccaccgaaactgaccaaacagatgaatgccatcatcgatactgttatcaactacaaggattcctccggccgacagctcagcgaagtgtttatccagctgccctctcggaaggagctgcccgagtattacgaactgatcaggaagccagtcgacttcaagaagattaaggaaagaatccgtaatcacaagtaccgcagtctgggcgatctatag

SEQ ID NO: 108082 - DNA, 816 bp, Artificial Sequence
  derived and/or modified sequence
atgaagcggttggcagcccgttgctttgctggcctgctaattctgagcccattgactgtgatttctgactctcggcctgcagactcaggcaaggccatcgaggacgggaaccttgaagagatggaggaagaggtgcgtctcaagaagaggaagaggcgtcgtaatgtggacaaggacccagcaaaggaggatgtcgaaaaagctaagaaacgccgtggacgaccccctgccgagaagctcagtcctaaccccccaaaacttactaagcagatgaatgcgataatagacactgtgattaattataaagattcgtccggacgccagttatctgaggtgttcattcaacttcccagcaggaaggaactccccgagtattatgaacttattaggaagcctgttgattttaaaaagatcaaggagcggataagaaatcataaataccgaagtctgggagaccttgaaaaggatgttatgttgctgtgtcacaatgcacagaccttcaacctggaaggatcccaaatctacgaggattcaattgttctgcagtccgtatttaagagcgcgcgtcaaaagatcgcgaaggaggaggagtccgaggacgaatccaatgaagaggaagaggaggaagacgaagaggaatctgagtctgaggccaagagcgttaaggtgaaaatcaagctcaacaaaaaggatgacaagggtagggacaagggcaagggcaaaaagcgtccaaatcgcggaaaagcaaagcccgtcgttagcgacttcgattctgacgaagaacaggacgaacgcgtgagcgtggctgactggtag

SEQ ID NO: 108083 - DNA, 462 bp, Artificial Sequence
  derived and/or modified sequence
atgaagaggctggccgcaagatgctttgccggtctgctaatcctcagtcccctgacagtgatcagcgatagccgcccagcagactcagggaaggccattgaggatggcaatttggaagagatggaggaggaagtccggttgaaaaagaggaaaagacggcgtaatgttgacaaggatcctgcgaaggaagacgtggagaaggcaaagaagcggaggggcaggcctcctgcagagaagctctccccaaatccgcctaagctcacaaagcagatgaatgctatcatcgacaccgtgataaactataaggactcttccggtcgccagctgtctgaggtcttcatccagctaccgtctcggaaagagctgcccgaatattatgagctcatccgtaagcccgtcgattttaagaaaataaaggagaggatcagaaatcacaaataccgcagcttgggagacttgtag

SEQ ID NO: 108084 - DNA, 1121 bp, Artificial Sequence
  derived and/or modified sequence
ctcgcactcttgcgcaacacgtcaccagtcggaaactgggggtttgcttctgtgatttatttcattattgtgctggtaaaaggccatcgaagacggcaatttggaggaaatggaagaggaagtacggcttaagaagcgaaaaagacgaagaaatgtggataaagatcctgcaaaagaagatgtggaaaaagctaagaagagaagaggccgccctcccgctgagaaactgtcaccaaatccccccaaactgacaaagcagatgaacgctatcatcgatactgtgataaactacaaagatagttcagggcgacagctcagtgaagtcttcattcagttaccttcaaggaaagaattaccagaatactatgaattaattaggaagccagtggatttcaaaaaaataaaggaaaggattcgtaatcataagtaccggagcctaggcgacctggagaaggatgtcatgcttctctgtcacaacgctcagacgttcaacctggagggatcccagatctatgaagactccatcgtcttacagtcagtgtttaagagtgcccggcagaaaattgccaaagaggaagagagtgaggatgaaagcaatgaagaggaggaagaggaagatgaagaagagtcagagtccgaggcaaaatcagtcaaggtgaaaattaagctcaataaaaaagatgacaaaggccgggacaaagggaaaggcaagaaaaggccaaatcgaggaaaagccaaacctgtagtgagcgattttgacagcgatgaggagcaggatgaacgtgaacagtcagaaggaagtgggacggatgatgagtgatcagtatggacctttttccttggtagaactgaattccttcctcccctgtctcatttctacccagtgagttcatttgtcatataggcactgggttgtttctatatcatcatcgtctataaactagctttaggatagtgccagacaaacatatgatatcatggtgtaaaaaacacacacatacacaaatatttgtaacatattgtgaccaaatgggcctcaaagattcagattgaaacaaacaaaaagcttttgatggaaaatatgtgggtggatagtatatttctatgggtgggtctaattt

SEQ ID NO: 108085 - protein, 278 aa, Artificial Sequence
  derived and/or modified sequence
MLMKRLAARCFAGLLILSPLTVISDSRPADSGKAIEDGNLEEMEEEVRLKKRKRRRNVDKDPAKEDVEKAKKRRGRPPAEKLSPNPPKLTKQMNAIIDTVINYKDSSGRQLSEVFIQLPSRKELPEYYELIRKPVDFKKIKERIRNHKYRSLGDLEKDVMLLCHNAQTFNLEGSQIYEDSIVLQSVFKSARQKIAKEEESEDESNEEEEEEDEEESESEAKSVKVKIKLNKKDDKGRDKGKGKKRPNRGKAKPVVSDFDSDEEQDEREQSEGSGTDDE

SEQ ID NO: 108086 - DNA, 837 bp, Artificial Sequence
  derived and/or modified sequence
atgctgatgaagagactggccgccagatgcttcgccggcctgctgatcctgagccccctgaccgtgatcagcgacagcagacccgccgacagcggcaaggccatcgaggacggcaacctggaggagatggaggaggaggtgagactgaagaagagaaagagaagaagaaacgtggacaaggaccccgccaaggaggacgtggagaaggccaagaagagaagaggcagaccccccgccgagaagctgagccccaacccccccaagctgaccaagcagatgaacgccatcatcgacaccgtgatcaactacaaggacagcagcggcagacagctgagcgaggtgttcatccagctgcccagcagaaaggagctgcccgagtactacgagctgatcagaaagcccgtggacttcaagaagatcaaggagagaatcagaaaccacaagtacagaagcctgggcgacctggagaaggacgtgatgctgctgtgccacaacgcccagaccttcaacctggagggcagccagatctacgaggacagcatcgtgctgcagagcgtgttcaagagcgccagacagaagatcgccaaggaggaggagagcgaggacgagagcaacgaggaggaggaggaggaggacgaggaggagagcgagagcgaggccaagagcgtgaaggtgaagatcaagctgaacaagaaggacgacaagggcagagacaagggcaagggcaagaagagacccaacagaggcaaggccaagcccgtggtgagcgacttcgacagcgacgaggagcaggacgagagagagcagagcgagggcagcggcaccgacgacgagtag

SEQ ID NO: 108087 - DNA, 837 bp, Artificial Sequence
  derived and/or modified sequence
atgttgatgaaacgcctggctgccaggtgttttgctggactgctgattttgagtcctctgactgtaatttcagacagcagaccagccgactccggaaaggctatcgaggacggcaacttggaagagatggaggaagaggtccggttaaagaagcggaagcgacggcgcaatgtcgataaagatcctgccaaggaggacgtagagaaggccaagaagcgacgagggcgcccccctgccgaaaagttgtcacctaacccgcccaagttgacaaagcaaatgaatgccatcatagataccgtaataaattacaaagatagttctggtagacagttgagcgaggtttttattcaactccccagcagaaaggaactgccagagtactacgaactgattcggaaacctgttgattttaagaaaattaaggagcggatccgaaatcataaatacagatccttgggtgacttggaaaaggacgtcatgctcttgtgtcacaacgctcagacattcaatttggagggctcccagatatatgaggacagtatcgttcttcagagcgtcttcaagtcagccaggcagaagatcgccaaagaggaggagagtgaggatgaatcaaacgaggaggaggaggaagaagacgaggaggagtctgaatctgaagcaaagagcgtcaaagtaaaaattaaacttaataaaaaggacgataaggggcgcgataagggtaaggggaagaagcgacccaacaggggtaaggctaagcccgttgtttccgacttcgactcagatgaagagcaggacgagagggagcagtccgaaggcagcgggaccgacgatgagtag

SEQ ID NO: 108088 - DNA, 837 bp, Artificial Sequence
  derived and/or modified sequence
atgctgatgaagaggctggccgcccgctgctttgctggcctgctgatcctgagccccctgaccgtcatcagtgacagcaggcctgctgacagcggcaaggccattgaagatggcaacctggaggagatggaggaggaggtgcggctgaagaagaggaagagaagaagaaatgtggacaaggaccctgccaaggaggatgtggagaaggccaagaagagaagaggccggcccccagctgagaagctgagccccaacccccccaagctgaccaagcagatgaatgccatcatcgacaccgtcatcaactacaaggacagcagcggccggcagctgtctgaggtgttcatccagctgcccagcaggaaggagctgcctgagtactatgagctgatcaggaagcctgtggacttcaagaagatcaaggagcgcatccggaaccacaagtaccgcagcctgggggacctggagaaggatgtgatgctgctgtgccacaatgcccagaccttcaacctggagggcagccagatctatgaggacagcatcgtgctgcagagcgtcttcaagagcgcccggcagaagatcgccaaggaggaggagagtgaagatgagagcaatgaggaggaggaggaggaggatgaggaggagagcgagagcgaggccaagtctgtgaaggtgaagatcaagctgaacaagaaggatgacaagggccgggacaagggcaagggcaagaagaggcccaacagaggcaaggccaagcctgtggtgtctgactttgacagtgatgaggagcaggatgagcgggagcagagcgagggcagcggcacagatgatgaatag

SEQ ID NO: 108089 - DNA, 837 bp, Artificial Sequence
  derived and/or modified sequence
atgctgatgaagcggctggccgcccggtgcttcgccggcctgctgatcctgtcccccctgacagtcataagcgacagcagacctgccgatagtggcaaagcaattgaagacggaaatcttgaagagatggaagaggaagtccgccttaagaagcgtaaacgacgccgcaacgtggataaagatcctgccaaggaagacgtcgaaaaagctaaaaaaaggagaggacgcccacccgccgagaagctgtctccgaatcccccaaaactcacgaaacaaatgaatgccattatcgacacagtcatcaactataaggactcatctggaagacagctcagcgaggtttttatccaactgccatctagaaaagagcttccggaatactatgaactcattaggaaaccagtggacttcaaaaagataaaagagaggattagaaatcacaagtacaggtctttaggcgatctagagaaggatgtaatgctgctttgccataatgcgcagacatttaacctggaggggtcccagatctacgaagactctatcgtgctgcagagcgttttcaagtcagcccggcaaaagatcgccaaagaggaggaatccgaagacgaatccaacgaggaggaggaggaggaagatgaggaggaaagcgagtcagaggccaagtccgtgaaagtgaagataaaactgaataagaaagatgacaagggacgcgacaagggcaagggaaagaagcgccctaatcgcggcaaagcaaagcctgttgtttctgacttcgattccgacgaggagcaagatgagcgggagcagtcagagggctccggaacagacgacgagtag

SEQ ID NO: 108090 - DNA, 837 bp, Artificial Sequence
  derived and/or modified sequence
atgctgatgaaacggctcgccgcacgatgttttgcaggcctgctgatcctctcacccctcacagtcatcagcgattcaagacctgcggactcaggaaaagcgatagaagacggaaacttagaggagatggaggaggaggtccgtttgaagaaacggaagaggcgccgaaacgttgacaaggacccagcgaaagaagacgtggaaaaggctaaaaaacggagaggcagacctccagccgagaagttgagtccgaacccccctaagctgaccaaacagatgaacgctataatcgacacagtgatcaattacaaagactcaagcggacggcagttgagcgaggtgttcatacaactcccatctcgcaaagaattacccgagtattatgagctcattcgaaaacccgttgacttcaaaaagatcaaggagcggattcgaaatcacaaatatcgtagcctgggagaccttgaaaaggatgtcatgctgttgtgccacaatgcccagaccttcaatctcgaaggctcccaaatctacgaagatagtatcgtgttacagagcgttttcaagagcgcaaggcagaaaatagccaaggaggaggagagcgaggacgaatctaacgaagaagaagaggaagaagacgaggaagagtctgaatcggaggcaaaatccgtcaaagtgaagatcaagcttaacaaaaaggatgataaaggtcgcgacaaagggaaaggtaagaaaagacctaaccggggtaaagcaaaaccagtggtcagtgacttcgactccgacgaggaacaggacgaaagggaacagtctgaggggagcggaaccgatgacgaatag

SEQ ID NO: 108091 - DNA, 2239 bp, Artificial Sequence
  derived and/or modified sequence
acttcattaaatctagaggcagttgagcatgggagccgtctgtatgttgaattagggctcgcactcttgcgcaacacgtcaccagtcggaaactgggggtttgcttctgtgatttatttcattattgtgctggtaaaaggtttggaagggaattctttttgggggtagtactttagcattgtgtagcaagttttggggttttttttgtgtgtgaccccccagcccccagcgctgagtttgagtcagttgagccagtttagtaaataattttttaaaataaaagaacagtttaaaatctccatgaataattttacttacatgcaggagtaatcttactctactctttatgtgcgaaaagcattgggaagtgtttagtgaattgatttccattagaaaaagacccttagaaatcacagaacataaagcactgcatatggatgtgtttggggtctttggggaggagggaagatgttttgtagctctctgcattcctgcataaaaccttagtttgaggggaataatgctgatgaagagactagcagctcgctgctttgctggcttgttaattttatccccactaactgtgatttctgatagccggcctgctgatagtggtaaggccatcgaagacggcaatttggaggaaatggaagaggaagtacggcttaagaagcgaaaaagacgaagaaatgtggataaagatcctgcaaaagaagatgtggaaaaagctaagaagagaagaggccgccctcccgctgagaaactgtcaccaaatccccccaaactgacaaagcagatgaacgctatcatcgatactgtgataaactacaaagatagttcagggcgacagctcagtgaagtcttcattcagttaccttcaaggaaagaattaccagaatactatgaattaattaggaagccagtggatttcaaaaaaataaaggaaaggattcgtaatcataagtaccggagcctaggcgacctggagaaggatgtcatgcttctctgtcacaacgctcagacgttcaacctggagggatcccagatctatgaagactccatcgtcttacagtcagtgtttaagagtgcccggcagaaaattgccaaagaggaagagagtgaggatgaaagcaatgaagaggaggaagaggaagatgaagaagagtcagagtccgaggcaaaatcagtcaaggtgaaaattaagctcaataaaaaagatgacaaaggccgggacaaagggaaaggcaagaaaaggccaaatcgaggaaaagccaaacctgtagtgagcgattttgacagcgatgaggagcaggatgaacgtgaacagtcagaaggaagtgggacggatgatgagtgatcagtatggacctttttccttggtagaactgaattccttcctcccctgtctcatttctacccagtgagttcatttgtcatataggcactgggttgtttctatatcatcatcgtctataaactagctttaggatagtgccagacaaacatatgatatcatggtgtaaaaaacacacacatacacaaatatttgtaacatattgtgaccaaatgggcctcaaagattcagattgaaacaaacaaaaagcttttgatggaaaatatgtgggtggatagtatatttctatgggtgggtctaatttggtaacggtttgattgtgcctggttttatcacctgttcagatgagaagatttttgtcttttgtagcactgataaccaggagaagccattaaaagccactggttattttatttttcatcaggcaattttcgaggtttttatttgttcggtattgtttttttacactgtggtacatataagcaactttaataggtgataaatgtacagtagttagatttcacctgcatatacatttttccattttatgctctatgatctgaacaaaagctttttgaattgtataagatttatgtctactgtaaacattgcttaatttttttgctcttgatttaaaaaaaagttttgttgaaagcgctattgaatattgcaatctatatagtgtattggatggcttcttttgtcaccctgatctcctatgttaccaatgtgtatcgtctccttctccctaaagtgtacttaatctttgctttctttgcacaatgtctttggttgcaagtcataagcctgaggcaaataaaattccagtaatttcgaagaatgtggtgttggtgctttcctaataaagaaataatttagcttgac

SEQ ID NO: 108092 - DNA, 921 bp, Artificial Sequence
  derived and/or modified sequence
tgggagccgtctgtatgttgaattagggctcgcactcttgcgcaacacgtcaccagtcggaaactgggggtttgcttctgtgatttatttcattattgtgctgctgatgaagagactagcagctcgctgctttgctggcttgttaattttatccccactaactgtgatttctgatagccggcctgctgatagtggtaaggccatcgaagacggcaatttggaggaaatggaagaggaagtacggcttaagaagcgaaaaagacgaagaaatgtggataaagatcctgcaaaagaagatgtggaaaaagctaagaagagaagaggccgccctcccgctgagaaactgtcaccaaatccccccaaactgacaaagcagatgaacgctatcatcgatactgtgataaactacaaagatagttcagggcgacagctcagtgaagtcttcattcagttaccttcaaggaaagaattaccagaatactatgaattaattaggaagccagtggatttcaaaaaaataaaggaaaggattcgtaatcataagtaccggagcctaggcgacctggagaaggatgtcatgcttctctgtcacaacgctcagacgttcaacctggagggatcccagatctatgaagactccatcgtcttacagtcagtgtttaagagtgcccggcagaaaattgccaaagaggaagagagtgaggatgaaagcaatgaagaggaggaagaggaagatgaagaagagtcagagtccgaggcaaaatcagtcaaggtgaaaattaagctcaataaaaaagatgacaaaggccgggacaaagggaaaggcaagaaaaggccaaatcgaggaaaagccaaacctgtagtgagcgattttgacagcgatgaggagcaggatgaacgtgtaagtgtagccgactggga

SEQ ID NO: 108093 - DNA, 594 bp, Artificial Sequence
  derived and/or modified sequence
aaatctagaggcagttgagcatgggagccgtctgtatgttgaattagggctcgcactcttgcgcaacacgtcaccagtcggaaactgggggtttgcttctgtgatttatttcattattgtgctggtaaaagctgatgaagagactagcagctcgctgctttgctggcttgttaattttatccccactaactgtgatttctgatagccggcctgctgatagtggtaaggccatcgaagacggcaatttggaggaaatggaagaggaagtacggcttaagaagcgaaaaagacgaagaaatgtggataaagatcctgcaaaagaagatgtggaaaaagctaagaagagaagaggccgccctcccgctgagaaactgtcaccaaatccccccaaactgacaaagcagatgaacgctatcatcgatactgtgataaactacaaagatagttcagggcgacagctcagtgaagtcttcattcagttaccttcaaggaaagaattaccagaatactatgaattaattaggaagccagtggatttcaaaaaaataaaggaaaggattcgtaatcataagtaccggagcctaggcgacctgg

SEQ ID NO: 108094 - protein, 363 aa, Artificial Sequence
  derived and/or modified sequence
MLLGFLKLQQKWSYEDKDQRPLNGFKDQLCSLVFMALTDPSTQLQLVGIRTLTVLGAQPDLLSYEDLELAVGHLYRLSFLKEDSQSCRVAALEASGTLAALYPVAFSSHLVPKLAEELRVGESNLTNGDEPTQCSRHLCCLQALSAVSTHPSIVKETLPLLLQHLWQVNRGNMVAQSSDVIAVCQSLRQMAEKCQQDPESCWYFHQTAIPCLLALAVQASMPEKEPSVLRKVLLEDEVLAAMVSVIGTATTHLSPELAAQSVTHIVPLFLDGNVSFLPENSFPSRFQPFQDGSSGQRRLIALLMAFVCSLPRNVEIPQLNQLMRELLELSCTAAPFLPPLLPSALQDSSTSTLQGSSWMNSYS

SEQ ID NO: 108095 - protein, 375 aa, Artificial Sequence
  derived and/or modified sequence
MKLVWPSAKLLQAAAGASARACDSVTSNVLPLLLEQFHKHSQSSQRRTILEMLLGFLKLQQKWSYEDKDQRPLNGFKDQLCSLVFMALTDPSTQLQLVGIRTLTVLGAQPDLLSYEDLELAVGHLYRLSFLKEDSQSCRVAALEASGTLAALYPVAFSSHLVPKLAEELRVGESNLTNGDEPTQCSRHLCCLQALSAVSTHPSIVKETLPLLLQHLWQVNRGNMVAQSSDVIAVCQSLRQMAEKCQQDPESCWYFHQTAIPCLLALAVQASMPEKEPSVLRKVLLEDEVLAAMVSVIGTATTHLSPELAAQSVTHIVPLFLDGNVSFLPENSFPSRFQPFQVTDGSSGQRRLIALLMAFVCSLPRNGSSWMNSYS

SEQ ID NO: 108096 - protein, 987 aa, Artificial Sequence
  derived and/or modified sequence
MAAAAAVEAAAPMGALWGLVHDFVVGQQEGPADQVAADVKSGNYTVLQVVEALGSSLENPEPRTRARAIQLLSQVLLHCHTLLLEKEVVHLILFYENRLKDHHLVIPSVLQGLKALSLCVALPPGLAVSVLKAIFQEVHVQSLPQVDRHTVYNIITNFMRTREEGPFVEELFEVTSCYFPIDFTPPPNDPHGIQREDLILSLRAVLASTPRFAEFLLPLLIEKVDSEVLSAKLDSLQTLNACCAVYGQKELKDFLPSLWASIRREVFQTASERVEAEGLAALHSLTACLSRSVLRADAEDLLDSFLSNILQDCRHHLCEPDMKLVWPSAKLLQAAAGASARACDSVTSNVLPLLLEQFHKHSQSSQRRTILEMLLGFLKLQQKWSYEDKDQRPLNGFKDQLCSLVFMALTDPSTQLQLVGIRTLTVLGAQPDLLSYEDLELAVGHLYRLSFLKEDSQSCRVAALEASGTLAALYPVAFSSHLVPKLAEELRVGESNLTNGDEPTQCSRHLCCLQALSAVSTHPSIVKETLPLLLQHLWQVNRGNMVAQSSDVIAVCQSLRQMAEKCQQDPESCWYFHQTAIPCLLALAVQASMPEKEPSVLRKVLLEDEVLAAMVSVIGTATTHLSPELAAQSVTHIVPLFLDGNVSFLPENSFPSRFQPFQDGSSGQRRLIALLMAFVCSLPRNVEIPQLNQLMRELLELSCCHSCPFSSTAAAKCFAGLLNKHPAGQQLDEFLQLAVDKVEAGLGSGPCRSQAFTLLLWVTKALVLRYHPLSSCLTARLMGLLSDPELGPAAADGFSLLMSDCTDVLTRAGHAEVRIMFRQRFFTDNVPALVQGFHAAPQDVKPNYLKGLSHVLNRLPKPVLLPELPTLLSLLLEALSCPDCVVQLSTLSCLQPLLLEAPQVMSLHVDTLVTKFLNLSSSPSMAVRIAALQCMHALTRLPTPVLLPYKPQVIRALAKPLDDKKRLVRKEAVSARGEWFLLGSPGS

SEQ ID NO: 108097 - DNA, 2799 bp, Artificial Sequence
  derived and/or modified sequence
atggccgccgccgccgccgtggaggccgccgcccccatgggcgccctgtggggcctggtgcacgacttcgtggtgggccagcaggagggccccgccgaccaggtggccgccgacgtgaagagcggcaactacaccgtgctgcaggtggtggaggccctgggcagcagcctggagaaccccgagcccagaaccagagccagagccatccagctgctgagccaggtgctgctgcactgccacaccctgctgctggagaaggaggtggtgcacctgatcctgttctacgagaacagactgaaggaccaccacctggtgatccccagcgtgctgcagggcctgaaggccctgagcctgtgcgtggccctgccccccggcctggccgtgagcgtgctgaaggccatcttccaggaggtgcacgtgcagagcctgccccaggtggacagacacaccgtgtacaacatcatcaccaacttcatgagaaccagagaggaggagctgaagagcctgggcgccgacttcaccttcggcttcatccaggtgatggacggcgagaaggaccccagaaacctgctggtggccttcagaatcgtgcacgacctgatcagcagagactacagcctgggccccttcgtggaggagctgttcgaggtgaccagctgctacttccccatcgacttcacccccccccccaacgacccccacggcatccagagagaggacctgatcctgagcctgagagccgtgctggccagcacccccagattcgccgagttcctgctgcccctgctgatcgagaaggtggacagcgaggtgctgagcgccaagctggacagcctgcagaccctgaacgcctgctgcgccgtgtacggccagaaggagctgaaggacttcctgcccagcctgtgggccagcatcagaagagagagcagccagagaagaaccatcctggagatgctgctgggcttcctgaagctgcagcagaagtggagctacgaggacaaggaccagagacccctgaacggcttcaaggaccagctgtgcagcctggtgttcatggccctgaccgaccccagcacccagctgcagctggtgggcatcagaaccctgaccgtgctgggcgcccagcccgacctgctgagctacgaggacctggagctggccgtgggccacctgtacagactgagcttcctgaaggaggacagccagagctgcagagtggccgccctggaggccagcggcaccctggccgccctgtaccccgtggccttcagcagccacctggtgcccaagctggccgaggagctgagagtgggcgagagcaacctgaccaacggcgacgagcccacccagtgcagcagacacctgtgctgcctgcaggccctgagcgccgtgagcacccaccccagcatcgtgaaggagaccctgcccctgctgctgcagcacctgtggcaggtgaacagaggcaacatggtggcccagagcagcgacgtgatcgccgtgtgccagagcctgagacagatggccgagaagtgccagcaggaccccgagagctgctggtacttccaccagaccgccatcccctgcctgctggccctggccgtgcaggccagcatgcccgagaaggagcccagcgtgctgagaaaggtgctgctggaggacgaggtgctggccgccatggtgagcgtgatcggcaccgccaccacccacctgagccccgagctggccgcccagagcgtgacccacatcgtgcccctgttcctggacggcaacgtgagcttcctgcccgagaacagcttccccagcagattccagcccttccaggacggcagcagcggccagagaagactgatcgccctgctgatggccttcgtgtgcagcctgcccagaaacgtggagatcccccagctgaaccagctgatgagagagctgctggagctgagctgctgccacagctgccccttcagcagcaccgccgccgccaagtgcttcgccggcctgctgaacaagcaccccgccggccagcagctggacgagttcctgcagctggccgtggacaaggtggaggccggcctgggcagcggcccctgcagaagccaggccttcaccctgctgctgtgggtgaccaaggccctggtgctgagataccaccccctgagcagctgcctgaccgccagactgatgggcctgctgagcgaccccgagctgggccccgccgccgccgacggcttcagcctgctgatgagcgactgcaccgacgtgctgaccagagccggccacgccgaggtgagaatcatgttcagacagagattcttcaccgacaacgtgcccgccctggtgcagggcttccacgccgccccccaggacgtgaagcccaactacctgaagggcctgagccacgtgctgaacagactgcccaagcccgtgctgctgcccgagctgcccaccctgctgagcctgctgctggaggccctgagctgccccgactgcgtggtgcagctgagcaccctgagctgcctgcagcccctgctgctggaggccccccaggtgatgagcctgcacgtggacaccctggtgaccaagttcctgaacctgagcagcagccccagcatggccgtgagaatcgccgccctgcagtgcatgcacgccctgaccagactgcccacccccgtgctgctgccctacaagccccaggtgatcagagccctggccaagcccctggacgacaagaagagactggtgagaaaggaggccgtgagcgccagaggcgagtggttcctgctgggcagccccggcagctag

SEQ ID NO: 108098 - DNA, 2964 bp, Artificial Sequence
  derived and/or modified sequence
atggccgccgccgccgccgtggaggccgccgcccccatgggcgccctgtggggcctggtgcacgacttcgtggtgggccagcaggagggccccgccgaccaggtggccgccgacgtgaagagcggcaactacaccgtgctgcaggtggtggaggccctgggcagcagcctggagaaccccgagcccagaaccagagccagagccatccagctgctgagccaggtgctgctgcactgccacaccctgctgctggagaaggaggtggtgcacctgatcctgttctacgagaacagactgaaggaccaccacctggtgatccccagcgtgctgcagggcctgaaggccctgagcctgtgcgtggccctgccccccggcctggccgtgagcgtgctgaaggccatcttccaggaggtgcacgtgcagagcctgccccaggtggacagacacaccgtgtacaacatcatcaccaacttcatgagaaccagagaggagggccccttcgtggaggagctgttcgaggtgaccagctgctacttccccatcgacttcacccccccccccaacgacccccacggcatccagagagaggacctgatcctgagcctgagagccgtgctggccagcacccccagattcgccgagttcctgctgcccctgctgatcgagaaggtggacagcgaggtgctgagcgccaagctggacagcctgcagaccctgaacgcctgctgcgccgtgtacggccagaaggagctgaaggacttcctgcccagcctgtgggccagcatcagaagagaggtgttccagaccgccagcgagagagtggaggccgagggcctggccgccctgcacagcctgaccgcctgcctgagcagaagcgtgctgagagccgacgccgaggacctgctggacagcttcctgagcaacatcctgcaggactgcagacaccacctgtgcgagcccgacatgaagctggtgtggcccagcgccaagctgctgcaggccgccgccggcgccagcgccagagcctgcgacagcgtgaccagcaacgtgctgcccctgctgctggagcagttccacaagcacagccagagcagccagagaagaaccatcctggagatgctgctgggcttcctgaagctgcagcagaagtggagctacgaggacaaggaccagagacccctgaacggcttcaaggaccagctgtgcagcctggtgttcatggccctgaccgaccccagcacccagctgcagctggtgggcatcagaaccctgaccgtgctgggcgcccagcccgacctgctgagctacgaggacctggagctggccgtgggccacctgtacagactgagcttcctgaaggaggacagccagagctgcagagtggccgccctggaggccagcggcaccctggccgccctgtaccccgtggccttcagcagccacctggtgcccaagctggccgaggagctgagagtgggcgagagcaacctgaccaacggcgacgagcccacccagtgcagcagacacctgtgctgcctgcaggccctgagcgccgtgagcacccaccccagcatcgtgaaggagaccctgcccctgctgctgcagcacctgtggcaggtgaacagaggcaacatggtggcccagagcagcgacgtgatcgccgtgtgccagagcctgagacagatggccgagaagtgccagcaggaccccgagagctgctggtacttccaccagaccgccatcccctgcctgctggccctggccgtgcaggccagcatgcccgagaaggagcccagcgtgctgagaaaggtgctgctggaggacgaggtgctggccgccatggtgagcgtgatcggcaccgccaccacccacctgagccccgagctggccgcccagagcgtgacccacatcgtgcccctgttcctggacggcaacgtgagcttcctgcccgagaacagcttccccagcagattccagcccttccaggacggcagcagcggccagagaagactgatcgccctgctgatggccttcgtgtgcagcctgcccagaaacgtggagatcccccagctgaaccagctgatgagagagctgctggagctgagctgctgccacagctgccccttcagcagcaccgccgccgccaagtgcttcgccggcctgctgaacaagcaccccgccggccagcagctggacgagttcctgcagctggccgtggacaaggtggaggccggcctgggcagcggcccctgcagaagccaggccttcaccctgctgctgtgggtgaccaaggccctggtgctgagataccaccccctgagcagctgcctgaccgccagactgatgggcctgctgagcgaccccgagctgggccccgccgccgccgacggcttcagcctgctgatgagcgactgcaccgacgtgctgaccagagccggccacgccgaggtgagaatcatgttcagacagagattcttcaccgacaacgtgcccgccctggtgcagggcttccacgccgccccccaggacgtgaagcccaactacctgaagggcctgagccacgtgctgaacagactgcccaagcccgtgctgctgcccgagctgcccaccctgctgagcctgctgctggaggccctgagctgccccgactgcgtggtgcagctgagcaccctgagctgcctgcagcccctgctgctggaggccccccaggtgatgagcctgcacgtggacaccctggtgaccaagttcctgaacctgagcagcagccccagcatggccgtgagaatcgccgccctgcagtgcatgcacgccctgaccagactgcccacccccgtgctgctgccctacaagccccaggtgatcagagccctggccaagcccctggacgacaagaagagactggtgagaaaggaggccgtgagcgccagaggcgagtggttcctgctgggcagccccggcagctag

SEQ ID NO: 108099 - DNA, 2799 bp, Artificial Sequence
  derived and/or modified sequence
atggccgcagctgccgccgtcgaggccgctgcccccatgggcgccttgtggggactagtacacgacttcgtagtcgggcagcaggagggtcctgcagaccaggtggcagccgacgtcaagtccggcaattacacagtgctgcaggttgtagaggctctagggagctctctggagaacccagagcctcgcaccagggctcgcgcaatacagctgttatcacaggtactcctccactgccacactctgctgttggaaaaagaggtcgtacatctcattcttttttacgaaaaccggttgaaagaccaccacctagtcatcccctcagtcctacaaggcttaaaggccctgtcactgtgtgtggccttgccaccaggactggctgtctccgtccttaaggcgattttccaggaggtgcacgtccagtcgttgccacaggttgacaggcacactgtctacaacatcattacaaattttatgagaacacgagaggaggagctcaagagtctcggggccgactttaccttcggctttattcaggtcatggatggcgagaaagacccacggaatttgctggttgcattccgtattgtgcacgatctgatctcccgcgactacagtcttggccctttcgtggaggagctttttgaggttacctcctgttatttcccaattgatttcacgccaccccctaacgatccccacggtattcagcgtgaggatctcatcctcagcctgagggcagtcctggctagcacacctcggtttgccgaatttctgctcccactcctcatcgagaaggtggactctgaggtgttaagtgccaagttggacagcctgcaaacactcaatgcctgttgtgccgtctacggtcaaaaggagctcaaagattttctgccaagcctctgggccagcataagaagggaaagctctcagagacgcaccatactggagatgctgctcggtttcctgaagttacagcagaaatggagttacgaggacaaagaccaaaggcccttaaatggttttaaagaccagctgtgttctctagtgtttatggctctcacagacccttccacccagttacaattggtcggaattcggactctgacagttctgggagcccagcctgacctccttagctatgaggatctggaactggcagtaggccatttgtatcgactatcgtttttgaaggaagacagccagagctgtcgggtggccgctttggaggcgtctggaactcttgcggccctttacccagtggccttctcaagccatttggtccctaagctggccgaggagttgcgcgttggagaatctaatctcactaatggggacgagcctacacagtgttcacgccacctatgctgcctacaagccctttccgccgtgtccacccatccttccatagtaaaagaaaccttacctctcctcttgcaacacctttggcaggttaaccgcggaaacatggttgctcagagcagcgatgtcatcgccgtgtgtcaaagcctgcggcagatggcggagaagtgccaacaggaccccgagtcttgctggtattttcaccaaactgccatcccttgtctcctggctctggcagtgcaagcctcgatgccagagaaggaaccttctgttctgcgcaaagtgttattggaggatgaagtccttgcagccatggtctcagtgattgggactgctaccacccacctgtcaccagagttagcagctcagtccgtcacgcatattgttcctctgtttctggacggcaacgtgtcatttcttcctgagaatagctttccttctcgtttccagccttttcaggatggatcttcaggtcagcgcaggcttattgccctcctgatggcctttgtatgttcattgccccgaaacgttgaaatccctcagctcaatcagctgatgcgggagttattggagttatcatgttgtcacagctgccccttttcatccacagctgccgctaaatgctttgcaggcctgctgaataagcaccccgctggacaacagctagacgagttcctgcagttagccgtcgataaagttgaggccggccttggcagcggaccctgtaggagtcaggcattcacactgctactgtgggtgacaaaagcactagtcttacgttatcatccgctgtcaagctgcctgactgctcgattgatgggattacttagcgatccagagttgggccccgcagctgcagatgggttctcactgcttatgtcagattgcaccgacgtgctcacgcgagcgggccatgcagaggtccgaattatgttccgccagaggtttttcaccgataatgtccccgccttggtgcaaggcttccatgccgccccccaggacgtcaagccaaactatctgaaagggcttagccacgtattaaaccgtctgcctaaacccgttctgctgcccgaactgccaactctgctgtcactgctgctagaagccctgagctgcccggactgtgtggttcagctgagcaccttgtcttgcctccagccgttactgctggaggctccacaagttatgtcattacatgtcgacactctggtgacaaagtttctaaacctgtcctctagtccatccatggcagttcgcatagcggctctgcagtgtatgcacgcactgactagactcccaacacctgtgttgttgccatataagccacaggttattcgcgctctggccaaaccccttgacgacaagaaaagacttgtcagaaaagaggcagtgtctgctcgaggtgagtggtttctgctgggatcaccgggatcctag

SEQ ID NO: 108100 - DNA, 2964 bp, Artificial Sequence
  derived and/or modified sequence
atggcagccgcggctgccgtggaagcagcggcccctatgggagccctttggggattagtgcacgattttgtggtcggtcaacaggaagggcctgctgatcaggtagctgctgacgtgaagagcggcaactatactgtgctccaggtcgtggaagcattaggtagctctttagaaaacccggagccccggactcgggcccgcgccattcaactactgtcccaagtgctcttgcactgtcacaccctgctcctcgaaaaagaagttgtccacctcatcttattttatgagaatcgcctcaaagatcaccatctcgtaatcccaagtgtcctacagggtcttaaggccctgtctctgtgcgtcgcactgcccccgggtctggcagtgtccgtgctcaaagccattttccaagaggtgcacgtgcagagcttgccccaggtggacagacatacagtgtacaacatcatcaccaatttcatgcgcacacgggaagaaggtcccttcgtggaggaactctttgaggtaacatcttgctattttcccattgactttacacccccgccgaatgatccacacggtatccaaagagaagatctgatactgagtctgcgggctgtgctcgcctccacccctcgatttgccgagttcctgctgccattactgattgagaaagtggattccgaagttctgtctgctaagctggatagcctgcagacactgaatgcgtgctgcgcggtctatggccaaaaagagcttaaggattttcttccatcgctatgggcatccatccggcgggaggtttttcagaccgccagtgaaagggtagaggctgagggactcgcagcacttcacagtttgaccgcctgtctgtcaaggagtgtcctgcgagcagacgcggaagatctgctggactccttccttagtaacattctgcaagactgtaggcaccacctgtgtgagcctgacatgaaattagtttggccaagtgctaaattacttcaggctgctgccggggctagtgcccgcgcttgcgactccgtcacctcaaacgttctccctctgctgctggaacagttccacaaacattcccagtcttcccagcgccgcacgattttggaaatgctgctcggatttctcaagttacagcagaagtggagctacgaggataaagaccagcgtcccttgaatggcttcaaggaccagttatgttctctggtcttcatggcactgacagacccctccactcagttacagctggtggggattcgcaccctgaccgtgttgggcgcgcagcctgacctcctgtcttatgaagatctggagctggcagtaggacatctctatcgtctttcatttctgaaggaggattcccagagttgtagagtggcagccctcgaggcgagtggaactctggcggctctttaccccgtagcattctctagccacctcgtgcccaaactggccgaagaactcagggttggtgaaagcaatttgacaaacggagacgagcctactcagtgctcgaggcacttatgctgtcttcaggccctaagcgcagtgagcactcatccgtccatcgtgaaggagacactaccgctgctgttgcagcatttgtggcaagtcaataggggcaacatggtcgcacagagttcagatgtgattgcagtgtgccaaagtctgcgccagatggcagaaaagtgccagcaggaccctgagtcctgttggtatttccatcagactgcgattccatgtttgctggcgctggcagtccaggctagtatgccagagaaggagccaagcgtgctccgcaaggttctgctggaagacgaggttctcgccgcgatggtgtccgtcatcggaacagcaacaacacatctgagccctgagctagccgcccagtccgtgacccacattgtgccgctcttcctggacggtaacgtgtcgtttctgccagaaaactcttttcctagtagatttcagcctttccaggacggttctagcggccagcgcaggctcatcgcgcttctgatggcttttgtgtgttcgcttccccgaaacgtagagatcccccagttaaaccagttaatgcgagaattactcgaactgtcttgttgccactcctgcccgttctcttcaacagccgccgctaagtgcttcgctggtcttttaaacaaacacccggcgggccagcagctggacgaattcctgcagctggcagtggacaaagtggaggctggcctgggatccgggccatgccgatcccaagccttcactctgctcttgtgggtgacgaaagctctcgttctacgctaccatcccctgtctagctgcctaactgcaaggctaatgggcctactgtctgacccagagctgggccccgccgcggcggatggcttttcccttcttatgtctgactgcacagatgtcttaaccagggccggccacgcagaagttaggataatgttcagacaaaggttcttcacggacaatgtccccgccttggtgcagggcttccatgctgcaccacaggacgtgaaaccaaactatcttaaaggtctttcccacgttctaaataggttgcccaagcccgtcttgctgccagaactgccaacactgcttagcttgctgctcgaggccctgtcttgtcccgattgtgtcgtgcaattaagtaccctcagttgtttgcagcccttactcttagaggccccccaggtgatgtctttgcatgtggacactttggtgaccaaatttctgaatctgagttcctctccctctatggccgtaaggattgctgcgctgcagtgtatgcatgctctgaccaggttgcctaccccagtcttactgccgtacaaaccacaagtgattcgggcactggcaaagccactcgatgataagaagcggttagtacgcaaggaggctgtttccgcaaggggcgaatggtttctcctgggatcaccaggcagctag

SEQ ID NO: 108101 - DNA, 2799 bp, Artificial Sequence
  derived and/or modified sequence
atggctgctgctgctgctgtggaggccgccgcccccatgggcgccctgtggggcctggtgcatgactttgtggtgggccagcaggagggccctgctgaccaggtggccgcagatgtgaagagcggcaactacacagtgctgcaggtggtggaggccctgggcagcagcctggagaaccctgagcccaggacccgggcccgggccatccagctgctgagccaggtgctgctgcactgccacaccctgctgctggagaaggaggtggtgcacctgatcctcttctatgagaaccggctgaaggaccaccacctggtgatccccagcgtgctgcagggcctgaaggccctgagcctgtgtgtggccctgcccccaggcctggccgtgtctgtgctgaaggccatcttccaggaggtgcacgtgcagagcctgccccaggtggacagacacacagtgtacaacatcatcaccaacttcatgaggacccgggaggaggagctgaagagcctgggcgctgacttcaccttcggcttcatccaggtgatggatggagagaaggaccccaggaacctgctggtggccttccgcatcgtgcatgacctgatcagccgggactacagcctgggcccctttgtggaggagctgtttgaggtgaccagctgctacttccccatcgacttcaccccacctccaaatgacccccacggcatccagagagaagatctcatcctgagcctgcgggctgtgctggccagcacccccaggtttgctgagttcctgctgcccctgctgattgagaaggtggacagcgaggtgctgagcgccaagctggacagcctgcagaccctgaatgcctgctgtgctgtgtatggccagaaggagctgaaggacttcctgcccagcctgtgggccagcatccggcgggagagcagccagaggaggaccatcctggagatgctgctgggcttcctgaagctgcagcagaagtggagctatgaggacaaggaccagaggcccctgaatggcttcaaggaccagctgtgcagcctggtgttcatggccctgacagaccccagcacccagctgcagctggtgggcatccgcaccctgactgtgctgggcgcccagcctgacctgctgtcctatgaggacctggagctggccgtgggccacctgtaccgcctgtccttcctgaaggaggacagccagagctgccgggtggccgccctggaggccagcggcaccctggccgccctgtaccctgtggccttcagcagccacctggtgcccaagctggccgaggagctgcgggtgggggagagcaacctgaccaatggagatgagcccacccagtgcagccgccacctgtgctgcctgcaggccctgtctgctgtgtccacccaccccagcatcgtgaaggagaccctgcccctgctgctgcagcacctgtggcaggtgaacagaggcaacatggtggcccagagcagtgatgtgattgctgtgtgccagagcctgcggcagatggccgagaagtgccagcaggaccctgagagctgctggtacttccaccagacagccatcccctgcctgctggccctggccgtgcaggcctccatgcctgagaaggagcccagcgtgctgaggaaggtgctgctggaggatgaggtgctggccgccatggtgtctgtgattggaacagccaccacccacctgagccctgagctggccgcccagagcgtgacccacatcgtgcccctcttcctggatggaaatgtgtccttcctgcctgagaacagcttccccagccgcttccagcccttccaggacggcagcagcggccagaggcggctgattgccctgctgatggcctttgtgtgcagcctgcccagaaatgtggagatcccccagctgaaccagctgatgagggagctgctggagctgagctgctgccacagctgccccttcagcagcacagctgctgccaagtgctttgctggcctgctgaacaagcaccctgctggccagcagctggatgagttcctgcagctggccgtggacaaggtggaggccggcctgggcagcggcccctgccgcagccaggccttcaccctgctgctgtgggtgaccaaggccctggtgctgcgctaccaccccctgagcagctgcctgacagcccggctgatgggcctgctgagtgaccctgagctgggccctgctgctgctgatggcttcagcctgctgatgtctgactgcacagatgtgctgaccagggctggccacgccgaggtgcgcatcatgttccggcagcgcttcttcacagacaacgtgcctgccctggtgcagggcttccacgccgccccccaggatgtgaagcccaactacctgaagggcctgagccacgtgctgaaccggctgcccaagcctgtgctgctgcctgagctgcccaccctgctgagcctgctgctggaggccctgagctgcccagactgtgtggtgcagctgagcaccctgagctgcctgcagcccctgctgctggaggccccccaggtgatgagcctgcacgtggacaccctggtgaccaagttcctgaacctgagcagcagccccagcatggctgtgagaattgctgccctgcagtgcatgcacgccctgacccggctgcccacccctgtgctgctgccctacaagccccaggtgatccgggccctggccaagcccctggatgacaagaagaggctggtgaggaaggaggccgtgtctgcccggggggagtggttcctgctgggcagccctggcagctag

SEQ ID NO: 108102 - DNA, 2964 bp, Artificial Sequence
  derived and/or modified sequence
atggctgctgctgctgctgtggaggccgccgcccccatgggcgccctgtggggcctggtgcatgactttgtggtgggccagcaggagggccctgctgaccaggtggccgcagatgtgaagagcggcaactacacagtgctgcaggtggtggaggccctgggcagcagcctggagaaccctgagcccaggacccgggcccgggccatccagctgctgagccaggtgctgctgcactgccacaccctgctgctggagaaggaggtggtgcacctgatcctcttctatgagaaccggctgaaggaccaccacctggtgatccccagcgtgctgcagggcctgaaggccctgagcctgtgtgtggccctgcccccaggcctggccgtgtctgtgctgaaggccatcttccaggaggtgcacgtgcagagcctgccccaggtggacagacacacagtgtacaacatcatcaccaacttcatgaggacccgggaggagggcccctttgtggaggagctgtttgaggtgaccagctgctacttccccatcgacttcaccccacctccaaatgacccccacggcatccagcgggaggacctgatcctgagcctgcgggctgtgctggccagcacccccaggtttgctgagttcctgctgcccctgctgattgagaaggtggacagcgaggtgctgagcgccaagctggacagcctgcagaccctgaatgcctgctgtgctgtgtatggccagaaggagctgaaggacttcctgcccagcctgtgggccagcatcagaagagaggtgttccagacagccagcgagcgggtggaggccgagggcctggccgccctgcacagcctgacagcctgcctgagccgctctgtgctgcgggcagatgctgaggacctgctggacagcttcctgagcaacatcctgcaggactgccgccaccacctgtgtgagccagacatgaagctggtgtggcccagcgccaagctgctgcaggccgccgccggggccagcgcccgggcctgtgacagcgtgaccagcaatgtgctgcccctgctgctggagcagttccacaagcacagccagagcagccagaggaggaccatcctggagatgctgctgggcttcctgaagctgcagcagaagtggagctatgaggacaaggaccagaggcccctgaatggcttcaaggaccagctgtgcagcctggtgttcatggccctgacagaccccagcacccagctgcagctggtgggcatccgcaccctgactgtgctgggcgcccagcctgacctgctgtcctatgaggacctggagctggccgtgggccacctgtaccgcctgtccttcctgaaggaggacagccagagctgccgggtggccgccctggaggccagcggcaccctggccgccctgtaccctgtggccttcagcagccacctggtgcccaagctggccgaggagctgcgggtgggggagagcaacctgaccaatggagatgagcccacccagtgcagccgccacctgtgctgcctgcaggccctgtctgctgtgtccacccaccccagcatcgtgaaggagaccctgcccctgctgctgcagcacctgtggcaggtgaacagaggcaacatggtggcccagagcagtgatgtgattgctgtgtgccagagcctgcggcagatggccgagaagtgccagcaggaccctgagagctgctggtacttccaccagacagccatcccctgcctgctggccctggccgtgcaggcctccatgcctgagaaggagcccagcgtgctgaggaaggtgctgctggaggatgaggtgctggccgccatggtgtctgtcatcggcacagccaccacccacctgagccctgagctggccgcccagagcgtgacccacatcgtgcccctcttcctggatggaaatgtgtccttcctgcctgaaaattccttccccagccgcttccagcccttccaggacggcagcagcggccagaggaggctcatcgccctgctgatggcctttgtgtgcagcctgcccagaaatgtggagatcccccagctgaaccagctgatgagggagctgctggagctgagctgctgccacagctgccccttcagcagcacagctgctgccaagtgctttgctggcctgctgaacaagcaccctgctggccagcagctggatgagttcctgcagctggccgtggacaaggtggaggccggcctgggcagcggcccctgccgcagccaggccttcaccctgctgctgtgggtgaccaaggccctggtgctgcgctaccaccccctgagcagctgcctgacagcccggctgatgggcctgctgagtgaccctgagctgggccctgctgctgctgatggcttcagcctgctgatgtctgactgcacagatgtgctgacccgggccggccatgctgaggtgcgcatcatgttccggcagcgcttcttcacagacaacgtgcctgccctggtgcagggcttccacgccgccccccaggatgtgaagcccaactacctgaagggcctgagccacgtgctgaaccggctgcccaagcctgtgctgctgcctgagctgcccaccctgctgagcctgctgctggaggccctgagctgcccagactgtgtggtgcagctgagcaccctgagctgcctgcagcccctgctgctggaggccccccaggtgatgagcctgcacgtggacaccctggtgaccaagttcctgaacctgagcagcagccccagcatggctgtgagaattgctgccctgcagtgcatgcacgccctgacccggctgcccacccctgtgctgctgccctacaagccccaggtgatccgggccctggccaagcccctggatgacaagaagaggctggtgaggaaggaggccgtgtctgcccggggggagtggttcctgctgggcagccctggcagctag

SEQ ID NO: 108103 - DNA, 2799 bp, Artificial Sequence
  derived and/or modified sequence
atggccgccgccgccgccgtggaggccgccgcccccatgggcgccctgtggggactcgttcacgatttcgtcgtggggcagcaggaagggcccgcagaccaggtcgctgccgatgtgaagtcaggaaattacacagtactgcaggtggtggaagcactaggcagctcgctggagaaccctgagcctcgtacccgggcaagagccatccaacttctgtcccaggtgctcctgcattgccacactctgttgctcgagaaggaagtagtccacttaatcctgttctacgagaacagactcaaggaccatcatcttgttattccgagtgtgctccagggactgaaagccctgtccctgtgcgtggccttaccaccgggattagcagtatctgtgctgaaagccatctttcaagaagtgcatgtacagtctctgcctcaggtggacaggcacacagtgtataacatcatcactaactttatgcgcacacgggaggaagagctaaagagcctgggtgccgactttacattcggctttattcaggtaatggacggcgagaaggatccccgtaatctgcttgtcgccttccgaatcgtgcacgacctgatcagtagggactactctctgggccccttcgtggaagagctttttgaagttaccagctgctactttccgatcgacttcacccctcccccgaatgacccccacggcatccaaagagaagatttgatcctctcgcttcgcgctgtcttggcttctacaccaagattcgccgaatttctgttgccactgctcattgagaaggtggatagtgaagtgctgagtgcaaagctggactctctgcagacactcaatgcctgttgcgccgtctatggtcagaaggagctgaaggacttcctgccgtctctgtgggccagtatacgccgggagagcagccagcgaaggaccatcctggaaatgttattagggttcctcaagcttcagcaaaaatggtcttatgaagacaaggatcagagacctctgaacgggttcaaagatcaactgtgcagcctagtcttcatggcactcaccgacccttcgactcagctgcaactggttggaattagaacactgacagtcctcggagcccaacccgatttgcttagttacgaagacctcgagcttgcagtgggtcacctctatagactgtcttttctgaaggaagattcacagtcatgtcgggtagcagcattggaagctagcggcactctggccgccctgtacccagtggctttttcaagccacctggtccccaaactagcagaagaactgagggtgggggagtccaatttgacaaacggtgatgagcccacccagtgttctaggcacttgtgttgcctgcaggccctctccgccgtgtccacacatccctccatagtgaaagaaacacttccgctgctactgcagcacttgtggcaggtgaacagaggcaacatggttgctcaatcttcagacgttatagcagtgtgtcaatccttgagacagatggccgagaagtgccagcaggatccagagtcgtgttggtattttcatcagactgcaatcccatgcctgctagcgttggccgtgcaggcttcaatgccagagaaggagccatctgtcttgcgtaaggtactacttgaagatgaagtcctggcagctatggtaagtgtcatcggtactgcaaccactcacttatctcccgagctggccgcccagtcagtcacacacattgtgccattatttttggatggaaacgtcagcttcctgccagaaaatagcttcccctccagattccagcctttccaggatggcagtagtgggcagcggagacttatcgctctgctgatggcatttgtttgtagcctgccacggaacgtcgagatcccgcagcttaaccagcttatgagggagttactcgagctctcttgctgtcactcttgccctttttcctccactgccgccgcgaaatgttttgccggtttgttgaataagcaccctgctggtcaacagctggatgaattcttgcaactggctgtggacaaggtggaggcaggcttgggcagtgggccctgtcgtagccaggccttcactctcctactgtgggtaactaaggccctagtcctgcgatatcaccccctaagttcctgtctcacagctcgactgatgggcttgctctctgaccccgaactgggccctgcagccgcagacggattctcccttttgatgagcgattgcaccgacgtgttgacaagggccggccatgccgaggtacgcattatgtttagacagaggttctttaccgacaacgtccctgcgctcgtacagggatttcacgcagccccacaggacgtaaaaccaaattacctaaaaggactgagtcatgttctgaaccggctgcccaagccggtgctcctgcctgagctccctacattgctatctcttctgctggaggcgctgagctgccccgattgcgttgtccagttatctacactgtcatgcctgcagcccctccttctagaggcaccccaggtgatgtctcttcacgtcgacactctcgtgaccaaattcctaaatctgtcatctagtccttccatggctgtacgcatcgccgctcttcagtgtatgcacgccttgaccagactgcccaccccagtgctgcttccctataaaccccaggtcatccgcgcactagctaagcctctggatgataagaagcgactcgtgaggaaggaggccgtcagcgctaggggagagtggttcctgttgggctcaccaggttcctag

SEQ ID NO: 108104 - DNA, 2964 bp, Artificial Sequence
  derived and/or modified sequence
atggccgccgccgccgccgtggaggccgccgcccccatgggcgccttatggggactcgttcacgatttcgtcgttggacagcaggaaggcccagccgaccaggtagcggctgacgtgaaatctgggaactataccgtgcttcaggttgtggaggccctggggagttccctcgaaaatcctgagcctcgcacacgagctcgcgccatccaattgttaagccaagtccttctccactgccacacacttctccttgaaaaagaggttgtccacctgatcctgttttatgaaaatcgtctaaaagatcatcatctggtaatccccagcgttctacagggacttaaggcgctgagcctgtgcgttgccctgcctcccggcctagcagtgagcgtcctcaaggccatctttcaggaagtgcacgtgcaaagtctcccacaagtcgatcgccatactgtctacaatatcatcaccaatttcatgagaaccagggaggagggcccattcgtcgaggaactgttcgaagttactagctgttattttccaatcgacttcactccgccacctaatgaccctcacggcattcagagggaggatctgattctttcactgcgggccgtgttggctagtacaccaagattcgcagaattcctgctgccccttctgattgagaaggtggacagtgaagtactgagcgccaaacttgactccttgcagactctgaatgcctgctgtgccgtttacggtcaaaaggagctgaaggactttcttccctccctctgggcttccatacgtagagaggttttccagactgcttccgaacgggtcgaagccgaaggcctagccgctctccatagcctgaccgcatgtctgtcaagaagtgttcttagggctgacgcggaggacttgttggactcattccttagcaatatactccaggactgcaggcatcacttgtgtgaaccagatatgaagcttgtctggccttctgccaaactgttgcaggctgctgccggggcctccgccagggcctgcgacagcgtgacctcaaatgttcttccactcctgctcgagcagttccacaaacactcacagtcttcccagagacggacaattctggagatgcttctgggttttctcaaacttcagcagaagtggagctacgaggataaagatcagcggccgcttaatggatttaaagatcagttatgtagcctggtctttatggccttgactgaccccagcacccagttgcaactggtcgggattagaaccctgaccgtgttgggggcgcagcctgatctgctgtcgtatgaggacttggagctggccgttggtcatctctaccgcctctcctttctgaaggaagacagccagtcgtgcagggttgcagcgctcgaggcttccggtactctggctgcactttatccagtggcttttagctcgcatcttgtaccgaaactggcagaggaactgcgtgttggcgaatctaacttgacgaacggcgacgagcctacacaatgtagtaggcatttgtgctgcctgcaagcactcagtgccgtgtctacccacccctcaattgtgaaagagactctgccactccttctacagcacctatggcaggtaaacagaggaaatatggtagcacaatctagtgatgtgattgcagtgtgccagagtctacggcagatggctgaaaagtgccagcaagacccagagagctgttggtattttcatcaaaccgcgattccctgcctcctggcactagcggttcaggcgtccatgccagagaaggagccctcggtcctacggaaagtgctgctcgaggacgaagtgctggctgcaatggtgtccgtaatcggaacggccacgacccatctgtcccctgagctcgcggcccagagcgtcacccacatcgttccattgttcctcgacggaaatgtgagcttcctcccggagaactcctttccttcaaggttccagccttttcaggacggatccagcgggcagagacgattgattgctttactgatggcctttgtttgcagtctcccacggaatgtggaaatcccacagctgaaccagttgatgagagagctgttagaactatcttgttgtcacagctgtccctttagctctactgctgccgccaagtgctttgccgggctcctgaataagcatccagccgggcagcagttggacgagttcctgcaactggccgtcgataaagtcgaggcggggttggggagtgggccctgtcgtagtcaggcttttaccttactcctttgggtaacgaaggcactggttctgagatatcaccccttgagctcatgcctaaccgctagactgatggggcttcttagcgacccagagttggggcccgctgctgctgacggtttctcactgctgatgagcgactgtactgacgtcctcacgcgggctgggcatgccgaggtgcgaatcatgtttagacagcggttcttcacggacaatgtcccggctttggtgcaggggttccatgcagccccacaggatgtcaaaccaaactatctcaagggtctcagtcacgtgctcaacagactccccaaacccgtgcttctacccgagttgccaacgctgctgtctctgctcctggaagctctctcgtgcccagactgtgtggttcaactgtccaccctgtcctgcctgcagccgttgttgctggaggctccccaggtgatgtcactccatgttgacactttagttactaaatttctcaatctgtcatcctcccctagcatggcagtgagaattgccgcactgcagtgcatgcacgctcttacacgcctgccaacgccagtcctcttaccttacaaaccacaggtgatcagagctctcgccaagcctctcgacgataaaaagcgcttggtgcgcaaagaggctgtgagcgcccgtggggagtggtttctcctgggcagccccggaagctag

SEQ ID NO: 108105 - DNA, 3165 bp, Artificial Sequence
  derived and/or modified sequence
atggccgctgccgcggctgtggaggcggcggcgcctatgggtgccctatggggcctcgtgcacgacttcgtcgtgggtcagcaagagggccccgctgaccaggtggctgcagatgtgaaatctggcaactatacagtgttacaagttgtggaagcccttgggtcctctctagagaatccagaaccccgaactcgggcacgagcaatccagcttttgtcacaggtgctactccactgtcacaccttgctcctggagaaggaagtggtacacctgatactgttctatgagaaccggctgaaggaccatcatcttgtgatcccatctgtcctgcagggtttgaaggcacttagcctgtgtgtggccctgcccccagggctggctgtttctgtgcttaaagccatcttccaggaagtgcatgtacagtccctgccacaggtggaccgacacacagtctacaatatcatcaccaattttatgcgaacccgggaagaagagctaaagagcctaggagctgacttcacctttggcttcatccaggtgatggatggggaaaaggatccccgtaatcttctggtggccttccgcatcgtccatgacctcatctccagggactatagcctgggaccctttgtggaggagttgtttgaagtgacatcctgttatttccctatcgattttacccctccacctaatgatccccatggtatccagagagaagacctcatcctgagtcttcgcgctgtgctggcttctacaccacgatttgctgagtttctgctgcccctgttgattgagaaagtggattctgaggttctgagtgccaagttggattctctacagactctgaatgcttgctgtgctgtgtatggacagaaggaactgaaggacttcctccccagcctttgggcttctatccgcagagagagcagccagcggcggacaatccttgaaatgctcctgggtttcttgaagctgcagcagaaatggagctatgaagacaaagatcaaaggcctctgaatggcttcaaggaccagctgtgctcactggtattcatggctctaacagaccccagcacccagcttcagcttgttggcatccgtacactgacagtcttgggtgcccagccagatctcctatcttatgaggacttggagctggcagtgggtcacctgtacagactgagcttcctgaaggaggattcccagagttgcagggtggcagcactggaagcatcaggaaccctggctgctctctaccctgtggccttcagcagccacctcgtacccaagctcgctgaggagctgcgtgtaggggagtcaaatttgactaacggagatgagcccacccaatgctcccggcatctgtgctgtctgcaagccttgtcagctgtatcaacacatcccagcatcgtcaaggagacactgcctctgctgctgcagcatctctggcaagtgaacagagggaatatggttgcacaatccagtgacgttattgctgtctgtcagagcctcagacagatggcagaaaaatgtcagcaggaccctgagagttgctggtatttccaccagacagctataccttgcctgcttgccttggctgtgcaggcctctatgccagagaaggagccctcagttctgagaaaagtactattggaggatgaggtgttggctgccatggtgtctgtcattggcactgctacaacccacctgagccctgagttagctgcccagagtgtgacacacattgtgcccctcttcttggatggcaacgtgtcctttctgcctgaaaacagcttcccgagcagattccagccattccaggatggctcctcagggcagaggcggctgattgcactgcttatggcctttgtctgctccctgcctcgaaatgtggaaatccctcagctgaaccaactcatgcgggagcttttggaactgagctgctgccacagctgccccttttcttccaccgctgctgccaagtgctttgcaggactcctcaacaagcaccctgcagggcagcagctggatgaattcctacagctagctgtggacaaagtggaggctggcctgggctctgggccctgtcgtagtcaggccttcactcttcttctctgggtaacaaaggccctagtgctcagataccatcctctcagctcctgccttacagcccggctcatgggcctcctgagtgacccagaattaggtccagcagcagctgatggcttctctctgctcatgtctgactgcactgatgtgctgactcgtgctggccatgccgaagtgcggatcatgttccgccagcggttcttcacagataatgtgcctgctttggtccagggcttccatgctgctccccaagatgtgaagccaaactacttgaagggtctttctcatgtacttaacaggctgcccaagcctgtactcttgccagagctgcccacgcttctttccttgctgctggaggccctgtcctgccctgactgtgtggtgcagctctccaccctcagctgccttcagcctcttctactggaagcaccccaagtcatgagtcttcacgtggacaccctcgtcaccaagtttctgaacctcagctctagcccttccatggctgtccggatcgccgcactgcagtgcatgcatgctctcactcgcctgcccacccctgtgctgctgccgtacaaaccacaggtgattcgggccttagccaaacccctggatgacaagaagagactggtgcgcaaggaagcagtgtcagccagaggggagtggtttctgttggggagccctggcagctgagccctcagtcctggcctagactgttctgacaatctaacctgggattactaactgttgagccatcttccccaaagcagggaaaccactggtctctgactgcctttcccacagacacagcacaaatgctaggcctctgttgcatggctgtacaaagaacataagagtccatatttctagtggatttgtaaaataagtgtgtgtgagacacttgcgtttgaagaaagatctagggtcctgggtctcttgcatttatatgtcagaaaaggggcgatatgctgctgaggggtgagtgcatatgagtgtggccctgaggaccagggctggcagatgttgtctacctgctgaagaataaagatttcttttggt

SEQ ID NO: 108106 - DNA, 3174 bp, Artificial Sequence
  derived and/or modified sequence
acggtctctagttcgcgttatggccgctgccgcggctgtggaggcggcggcgcctatgggtgccctatggggcctcgtgcacgacttcgtcgtgggtcagcaagagggccccgctgaccaggtggctgcagatgtgaaatctggcaactatacagtgttacaagttgtggaagcccttgggtcctctctagagaatccagaaccccgaactcgggcacgagcaatccagcttttgtcacaggtgctactccactgtcacaccttgctcctggagaaggaagtggtacacctgatactgttctatgagaaccggctgaaggaccatcatcttgtgatcccatctgtcctgcagggtttgaaggcacttagcctgtgtgtggccctgcccccagggctggctgtttctgtgcttaaagccatcttccaggaagtgcatgtacagtccctgccacaggtggaccgacacacagtctacaatatcatcaccaattttatgcgaacccgggaagaaggaccctttgtggaggagttgtttgaagtgacatcctgttatttccctatcgattttacccctccacctaatgatccccatggtatccagagagaagacctcatcctgagtcttcgcgctgtgctggcttctacaccacgatttgctgagtttctgctgcccctgttgattgagaaagtggattctgaggttctgagtgccaagttggattctctacagactctgaatgcttgctgtgctgtgtatggacagaaggaactgaaggacttcctccccagcctttgggcttctatccgcagagaggtgttccagacggcaagtgagcgggtggaggcagagggcctggcggccctccactccctgactgcgtgtttgtctcgctctgtgctgagggctgatgctgaggacctccttgactccttccttagcaacattctacaggactgcaggcaccacctgtgtgaaccggacatgaaactggtgtggcctagtgccaagctgttgcaggcagctgcaggtgcatctgcccgggcctgtgactctgtcaccagcaatgtactgcctttactgctggaacagttccacaagcacagtcagagcagccagcggcggacaatccttgaaatgctcctgggtttcttgaagctgcagcagaaatggagctatgaagacaaagatcaaaggcctctgaatggcttcaaggaccagctgtgctcactggtattcatggctctaacagaccccagcacccagcttcagcttgttggcatccgtacactgacagtcttgggtgcccagccagatctcctatcttatgaggacttggagctggcagtgggtcacctgtacagactgagcttcctgaaggaggattcccagagttgcagggtggcagcactggaagcatcaggaaccctggctgctctctaccctgtggccttcagcagccacctcgtacccaagctcgctgaggagctgcgtgtaggggagtcaaatttgactaacggagatgagcccacccaatgctcccggcatctgtgctgtctgcaagccttgtcagctgtatcaacacatcccagcatcgtcaaggagacactgcctctgctgctgcagcatctctggcaagtgaacagagggaatatggttgcacaatccagtgacgttattgctgtctgtcagagcctcagacagatggcagaaaaatgtcagcaggaccctgagagttgctggtatttccaccagacagctataccttgcctgcttgccttggctgtgcaggcctctatgccagagaaggagccctcagttctgagaaaagtactattggaggatgaggtgttggctgccatggtgtctgtcattggcactgctacaacccacctgagccctgagttagctgcccagagtgtgacacacattgtgcccctcttcttggatggcaacgtgtcctttctgcctgaaaacagcttcccgagcagattccagccattccaggatggctcctcagggcagaggcggctgattgcactgcttatggcctttgtctgctccctgcctcgaaatgtggaaatccctcagctgaaccaactcatgcgggagcttttggaactgagctgctgccacagctgccccttttcttccaccgctgctgccaagtgctttgcaggactcctcaacaagcaccctgcagggcagcagctggatgaattcctacagctagctgtggacaaagtggaggctggcctgggctctgggccctgtcgtagtcaggccttcactcttcttctctgggtaacaaaggccctagtgctcagataccatcctctcagctcctgccttacagcccggctcatgggcctcctgagtgacccagaattaggtccagcagcagctgatggcttctctctgctcatgtctgactgcactgatgtgctgactcgtgctggccatgccgaagtgcggatcatgttccgccagcggttcttcacagataatgtgcctgctttggtccagggcttccatgctgctccccaagatgtgaagccaaactacttgaagggtctttctcatgtacttaacaggctgcccaagcctgtactcttgccagagctgcccacgcttctttccttgctgctggaggccctgtcctgccctgactgtgtggtgcagctctccaccctcagctgccttcagcctcttctactggaagcaccccaagtcatgagtcttcacgtggacaccctcgtcaccaagtttctgaacctcagctctagcccttccatggctgtccggatcgccgcactgcagtgcatgcatgctctcactcgcctgcccacccctgtgctgctgccgtacaaaccacaggtgattcgggccttagccaaacccctggatgacaagaagagactggtgcgcaaggaagcagtgtcagccagaggggagtggtttctgttggggagccctggcagctgagccctcagtcctggcctagactgttctgacaatctaacctgggattactaactgttgagccatcttccccaaagcagggaaaccactggtctctgactgcctttcccacagacacagcacaaatgctaggcctctgttgcatggctgtacaaagaacataagagtccatatttctagtggatttgtaaaat

SEQ ID NO: 108107 - DNA, 2799 bp, Artificial Sequence
  derived and/or modified sequence
atggcagccgcagctgcagtggaagccgcagctcctatgggcgctctttgggggctggtacatgatttcgtagtgggacagcaggaggggcctgccgatcaggtggcagccgacgttaaatctggaaactatacagtgctgcaagtggtggaagccctggggagctcattagagaacccagagccacggacgcgtgccagggccattcagctcctgagtcaggtgcttctgcattgccacacattacttctcgaaaaggaggtcgtgcacctcatcctattttatgagaacagactgaaggatcaccacctcgtgattccctccgtactgcaggggctgaaggccctctccttgtgtgttgctctgccgccaggcctggccgtgtcagttctaaaggccatctttcaggaggtgcacgtgcagtctctaccccaggttgacagacacacagtgtataatataatcacgaattttatgagaacgcgcgaagaggaacttaagtccctcggggcagacttcacctttggctttatccaggtgatggatggggagaaagatcctcgaaatctgctcgtagcgttccgaattgtgcacgacctgattagcagagactatagcctgggacccttcgtggaggagctgttcgaggtcacttcttgctatttcccaattgactttaccccacctcctaatgacccgcatggaatccaacgcgaggacctgattctgagtctcagggcagtgctcgctagcaccccaagattcgcagaattcctgctgccactgctgatagagaaagtcgacagcgaggtgctcagcgcaaagctggattcacttcagacccttaacgcctgctgcgctgtctacggtcagaaggagttgaaggattttctgccttccctttgggcttccatccggcgagagtcatcccagagacgcactatcctagagatgttgcttggcttcctcaagctgcaacaaaagtggagctatgaagataaggatcaacgacccctgaatgggtttaaggatcagctgtgtagtttagtgttcatggcgctcacagacccctccacccagttacaactggtcggtatcaggaccttgacggtgctgggcgctcagcctgacctgctgtcctatgaggacctggaacttgccgtgggacatctctatcggctctctttcctaaaagaagactcacagtcctgtcgcgtggccgcacttgaggctagcggcaccttagccgcactttatcccgtggccttctccagccatttggtccccaaactagcggaggaactcagggtgggggaaagtaacctcaccaacggggacgagcccactcagtgcagtcgccacctgtgctgcctgcaggccttgtccgccgtaagcacccacccttccatcgtgaaggagacccttcctctgctgttgcaacacctgtggcaagtgaatagaggtaacatggtggctcagtcctccgacgttattgctgtctgtcagtccttgagacagatggcagagaagtgccagcaggacccggagtcttgctggtactttcaccagacggccataccctgcttgctggccctggcagtacaggcttcaatgcccgaaaaggagccaagcgtgttgaggaaagttctcttggaggatgaggtgctcgcagccatggtgtccgtgatcgggactgcaaccacccacttgtcccctgagctggccgcacaatcagtgactcatattgtgcccctcttcctggacgggaacgtgagctttcttcccgaaaactccttcccatccagattccaacctttccaggacgggagcagtggacaacgaagactgatcgctctcctgatggctttcgtgtgctccttgccccgaaacgtggaaataccccagctaaaccagctgatgagagagctgctggagctcagctgttgccactcttgcccctttagcagcaccgccgcagcaaagtgcttcgcgggactgctgaataaacatccagccggacagcagttggacgaatttctgcagcttgcagtggacaaagtagaggccggactcggcagtgggccatgcaggagccaggccttcacccttctgttatgggtgaccaaggcactcgtcctgcgctaccatccactatcctcttgtctgaccgctcgtctcatgggtctcctgagtgatccagagctggggccagctgccgctgacggctttagcctcttaatgtcagactgtacagacgtactcacacgggctggccacgctgaagtacgaattatgttcaggcagcgtttttttaccgataatgttcccgcactggtccagggattccacgctgcgcctcaggacgtcaagcccaactatctgaagggcctcagtcacgttctcaatcgattacccaaacctgtactcctgccagaacttccgacgctcctgagtcttcttctggaggccctctcgtgtcccgactgtgtcgtgcagctgtctactctgagctgtcttcagcccctgctcctcgaagctccacaggtgatgagcttacatgttgatactttggtgacgaaatttctaaatctgagctccagccccagcatggctgtgcggatcgccgcacttcagtgtatgcacgcactcacccggctgccgacccccgtcttgctcccgtataaaccccaggtgatccgcgcattagctaagcctctcgatgacaagaaacgtttggtgcgcaaggaagccgtgtccgcccgaggggaatggttcctcctgggcagtcccggatcatag

SEQ ID NO: 108108 - DNA, 2964 bp, Artificial Sequence
  derived and/or modified sequence
atggccgctgcagccgcagtggaggctgccgcacctatgggggcactgtggggcctcgtgcatgactttgtggtgggccaacaggagggaccagctgatcaggttgccgcagacgtcaagagtgggaactataccgttctacaggtcgtcgaggcactgggatcaagccttgaaaatcccgagcctcggacgcgggctcgtgccattcagctgctttctcaggttttgctccactgtcatacattgcttctagaaaaggaggtggttcacttaatcctgttttacgagaaccgtttaaaggatcaccacctggtaatcccctccgtgcttcagggcctgaaggcattaagcctgtgtgtcgccctcccacccggtctggcagtgtctgtgctgaaggccatattccaggaagttcatgtgcagagcttgccacaggtagatcgccataccgtttacaatattatcacaaattttatgcgcacccgggaggaaggtcctttcgtggaggaactgttcgaggttacatcctgctacttccccatagactttacgccccctccaaatgacccacatggaattcaaagggaggatctcatactgtccctgagagcagtgttggccagtaccccacgattcgccgagtttcttctccctttgcttattgagaaagttgattctgaggtcctgagcgctaagttagactctctgcagacccttaacgcctgttgcgcagtgtacggtcagaaggaactcaaggatttccttccctcgctttgggcgtccataaggagggaagtgttccagaccgccagtgagagagtggaggctgagggcttggcagctctccactcactgaccgcctgtctcagccgttctgtgctgagagccgacgctgaagatcttctggactcctttctcagcaatatcctgcaggattgccggcaccacctttgcgagcccgacatgaagttggtatggccatcagccaagctcttgcaggctgcagccggagcatctgcacgggcttgcgatagtgtcacaagtaacgtgttaccgctactcctggaacagtttcataaacattctcagtcctctcagcgcagaaccatcctggagatgctgttgggtttcctgaagctccagcagaaatggagctatgaggacaaggaccagaggcctcttaatggctttaaagatcagctgtgcagcctggtatttatggcactgaccgaccccagcacacagctgcagctggtcggcatcaggacactgaccgtgctgggcgctcagcccgacctgttgtcgtatgaggatcttgaattggcagtcggccacctctatagattgtctttcttgaaggaagacagccagtcctgtagggtggctgccttagaagcaagtggtacgttggccgcactgtaccctgtggcattctcttctcatctcgttccgaaattggcagaggaactgagagtgggcgagtcgaacctcactaatggtgacgaacccacacaatgcagtcggcacttgtgttgtcttcaagcgctgtccgctgtatcgacgcaccctagtattgttaaggaaactctgcctctgctgctgcagcacttgtggcaagtcaacaggggcaacatggtggcccaaagctctgacgttatcgctgtttgccagtctctgcgccagatggcagagaaatgccagcaggatcccgagtcttgctggtactttcaccagacagctattccttgcctgctggccctggcagtacaagccagcatgcccgagaaggagccgtcggtcctgcgaaaggtgctgctcgaggatgaggtgctcgcagctatggtttcagtgatagggaccgccacaacccacctctcacctgaattagcggctcaatccgttacgcacatcgttcctctattcctcgatggtaacgtgtcattcctgccagagaattcatttcccagtcggtttcagccttttcaagacggcagcagcgggcagaggcgactcatcgctctgctgatggctttcgtatgttcgctgcccaggaacgtggagatccctcagctcaatcagctcatgcgagagctactcgaactgagctgctgccacagctgcccattctcaagtaccgcagccgctaagtgctttgccggattactcaataaacaccctgccggtcagcagcttgacgaattcctccaactcgccgtcgacaaggtggaggcgggtctcggcagcggcccttgtcgcagtcaagctttcacacttcttttgtgggtgacaaaagccctggtgctgcggtaccatcctctgtcctcatgcttaacggccagattgatgggcctgctctccgatcctgagttgggtccagcggcagctgatggtttctctctactgatgtccgattgtaccgacgtcctcacaagggccggtcatgccgaagttcgaattatgttccgacagagattcttcacagataatgtgccagcgcttgttcaggggttccatgctgcaccacaggatgttaagcccaactatctgaaggggctgtctcatgttttgaatcggttgccaaagcccgttctgctcccagaactccctacccttctgtcactgctgctcgaggctctgagctgtccagattgcgtcgtgcagctgtccacactttcctgtttacagcctctgctcctggaggctcctcaggtgatgtctctacatgtagataccttggtgacaaaatttctgaatctgtctagctctcccagcatggctgtacgaatagccgcacttcaatgtatgcacgcactgacacgattgcccacgcccgtgcttctgccttacaaaccgcaggttattagggccctcgcaaagccccttgacgataagaagagattagtgaggaaagaggccgtgtccgccagaggggagtggttcctgctcgggagccccggaagctag

SEQ ID NO: 108109 - protein, 1030 aa, Artificial Sequence
  derived and/or modified sequence
MAAAAAVEAAAPMGALWGLVHDFVVGQQEGPADQVAADVKSGNYTVLQVVEALGSSLENPEPRTRARAIQLLSQVLLHCHTLLLEKEVVHLILFYENRLKDHHLVIPSVLQGLKALSLCVALPPGLAVSVLKAIFQEVHVQSLPQVDRHTVYNIITNFMRTREEELKSLGADFTFGFIQVMDGEKDPRNLLVAFRIVHDLISRDYSLGPFVEELFEVTSCYFPIDFTPPPNDPHGIQREDLILSLRAVLASTPRFAEFLLPLLIEKVDSEVLSAKLDSLQTLNACCAVYGQKELKDFLPSLWASIRREVFQTASERVEAEGLAALHSLTACLSRSVLRADAEDLLDSFLSNILQDCRHHLCEPDMKLVWPSAKLLQAAAGASARACDSVTSNVLPLLLEQFHKHSQSSQRRTILEMLLGFLKLQQKWSYEDKDQRPLNGFKDQLCSLVFMALTDPSTQLQLVGIRTLTVLGAQPDLLSYEDLELAVGHLYRLSFLKEDSQSCRVAALEASGTLAALYPVAFSSHLVPKLAEELRVGESNLTNGDEPTQCSRHLCCLQALSAVSTHPSIVKETLPLLLQHLWQVNRGNMVAQSSDVIAVCQSLRQMAEKCQQDPESCWYFHQTAIPCLLALAVQASMPEKEPSVLRKVLLEDEVLAAMVSVIGTATTHLSPELAAQSVTHIVPLFLDGNVSFLPENSFPSRFQPFQDGSSGQRRLIALLMAFVCSLPRNVEIPQLNQLMRELLELSCCHSCPFSSTAAAKCFAGLLNKHPAGQQLDEFLQLAVDKVEAGLGSGPCRSQAFTLLLWVTKALVLRYHPLSSCLTARLMGLLSDPELGPAAADGFSLLMSDCTDVLTRAGHAEVRIMFRQRFFTDNVPALVQGFHAAPQDVKPNYLKGLSHVLNRLPKPVLLPELPTLLSLLLEALSCPDCVVQLSTLSCLQPLLLEAPQVMSLHVDTLVTKFLNLSSSPSMAVRIAALQCMHALTRLPTPVLLPYKPQVIRALAKPLDDKKRLVRKEAVSARGEWFLLGSPGS

SEQ ID NO: 108110 - protein, 1009 aa, Artificial Sequence
  derived and/or modified sequence
MAAAAAVEAAAPMGALWGLVHDFVVGQQEGPADQVAASSLENPEPRTRARAIQLLSQVLLHCHTLLLEKEVVHLILFYENRLKDHHLVIPSVLQGLKALSLCVALPPGLAVSVLKAIFQEVHVQVDRHTVYNIITNFMRTREEELKSLGADFTFGFIQVMDGEKDPRNLLVAFRIVHDLISRDYSLGPFVEELFEVTSCYFPIDFTPPPNDPHGIQREDLILSLRAVLASTPRFAEFLLPLLIEKVDSEVLSAKLDSLQTLNACCAVYGQKELKDFLPSLWASIRREVFQTASERVEAEGLAALHSLTACLSRSVLRADAEDLLDSFLSNILQDCRHHLCEPDMKLVWPSAKLLQAAAGASARACDSVTSNVLPLLLEQFHKHSQSSQRRTILEMLLGFLKLQQKWSYEDKDQRPLNGFKDQLCSLVFMALTDPSTQLQLVGIRTLTVLGAQPDLLSYEDLELAVGHLYRLSFLKEDSQSCRVAALEASGTLAALYPVAFSSHLVPKLAEELRVGESNLTNGDEPTQCSRHLCCLQALSAVSTHPSIVKETLPLLLQHLWQVNRGNMVAQSSDVIAVCQSLRQMAEKCQQDPESCWYFHQTAIPCLLALAVQASMPEKEPSVLRKVLLEDEVLAAMVSVIGTATTHLSPELAAQSVTHIVPLFLDGNVSFLPENSFPSRFQPFQDGSSGQRRLIALLMAFVCSLPRNVEIPQLNQLMRELLELSCCHSCPFSSTAAAKCFAGLLNKHPAGQQLDEFLQLAVDKVEAGLGSGPCRSQAFTLLLWVTKALVLRYHPLSSCLTARLMGLLSDPELGPAAADGFSLLMSDCTDVLTRAGHAEVRIMFRQRFFTDNVPALVQGFHAAPQDVKPNYLKGLSHVLNRLPKPVLLPELPTLLSLLLEALSCPDCVVQLSTLSCLQPLLLEAPQVMSLHVDTLVTKFLNLSSSPSMAVRIAALQCMHALTRLPTPVLLPYKPQVIRALAKPLDDKKRLVRKEAVSARGEWFLLGSPGS

SEQ ID NO: 108111 - DNA, 3093 bp, Artificial Sequence
  derived and/or modified sequence
atggccgccgccgccgccgtggaggccgccgcccccatgggcgccctgtggggcctggtgcacgacttcgtggtgggccagcaggagggccccgccgaccaggtggccgccgacgtgaagagcggcaactacaccgtgctgcaggtggtggaggccctgggcagcagcctggagaaccccgagcccagaaccagagccagagccatccagctgctgagccaggtgctgctgcactgccacaccctgctgctggagaaggaggtggtgcacctgatcctgttctacgagaacagactgaaggaccaccacctggtgatccccagcgtgctgcagggcctgaaggccctgagcctgtgcgtggccctgccccccggcctggccgtgagcgtgctgaaggccatcttccaggaggtgcacgtgcagagcctgccccaggtggacagacacaccgtgtacaacatcatcaccaacttcatgagaaccagagaggaggagctgaagagcctgggcgccgacttcaccttcggcttcatccaggtgatggacggcgagaaggaccccagaaacctgctggtggccttcagaatcgtgcacgacctgatcagcagagactacagcctgggccccttcgtggaggagctgttcgaggtgaccagctgctacttccccatcgacttcacccccccccccaacgacccccacggcatccagagagaggacctgatcctgagcctgagagccgtgctggccagcacccccagattcgccgagttcctgctgcccctgctgatcgagaaggtggacagcgaggtgctgagcgccaagctggacagcctgcagaccctgaacgcctgctgcgccgtgtacggccagaaggagctgaaggacttcctgcccagcctgtgggccagcatcagaagagaggtgttccagaccgccagcgagagagtggaggccgagggcctggccgccctgcacagcctgaccgcctgcctgagcagaagcgtgctgagagccgacgccgaggacctgctggacagcttcctgagcaacatcctgcaggactgcagacaccacctgtgcgagcccgacatgaagctggtgtggcccagcgccaagctgctgcaggccgccgccggcgccagcgccagagcctgcgacagcgtgaccagcaacgtgctgcccctgctgctggagcagttccacaagcacagccagagcagccagagaagaaccatcctggagatgctgctgggcttcctgaagctgcagcagaagtggagctacgaggacaaggaccagagacccctgaacggcttcaaggaccagctgtgcagcctggtgttcatggccctgaccgaccccagcacccagctgcagctggtgggcatcagaaccctgaccgtgctgggcgcccagcccgacctgctgagctacgaggacctggagctggccgtgggccacctgtacagactgagcttcctgaaggaggacagccagagctgcagagtggccgccctggaggccagcggcaccctggccgccctgtaccccgtggccttcagcagccacctggtgcccaagctggccgaggagctgagagtgggcgagagcaacctgaccaacggcgacgagcccacccagtgcagcagacacctgtgctgcctgcaggccctgagcgccgtgagcacccaccccagcatcgtgaaggagaccctgcccctgctgctgcagcacctgtggcaggtgaacagaggcaacatggtggcccagagcagcgacgtgatcgccgtgtgccagagcctgagacagatggccgagaagtgccagcaggaccccgagagctgctggtacttccaccagaccgccatcccctgcctgctggccctggccgtgcaggccagcatgcccgagaaggagcccagcgtgctgagaaaggtgctgctggaggacgaggtgctggccgccatggtgagcgtgatcggcaccgccaccacccacctgagccccgagctggccgcccagagcgtgacccacatcgtgcccctgttcctggacggcaacgtgagcttcctgcccgagaacagcttccccagcagattccagcccttccaggacggcagcagcggccagagaagactgatcgccctgctgatggccttcgtgtgcagcctgcccagaaacgtggagatcccccagctgaaccagctgatgagagagctgctggagctgagctgctgccacagctgccccttcagcagcaccgccgccgccaagtgcttcgccggcctgctgaacaagcaccccgccggccagcagctggacgagttcctgcagctggccgtggacaaggtggaggccggcctgggcagcggcccctgcagaagccaggccttcaccctgctgctgtgggtgaccaaggccctggtgctgagataccaccccctgagcagctgcctgaccgccagactgatgggcctgctgagcgaccccgagctgggccccgccgccgccgacggcttcagcctgctgatgagcgactgcaccgacgtgctgaccagagccggccacgccgaggtgagaatcatgttcagacagagattcttcaccgacaacgtgcccgccctggtgcagggcttccacgccgccccccaggacgtgaagcccaactacctgaagggcctgagccacgtgctgaacagactgcccaagcccgtgctgctgcccgagctgcccaccctgctgagcctgctgctggaggccctgagctgccccgactgcgtggtgcagctgagcaccctgagctgcctgcagcccctgctgctggaggccccccaggtgatgagcctgcacgtggacaccctggtgaccaagttcctgaacctgagcagcagccccagcatggccgtgagaatcgccgccctgcagtgcatgcacgccctgaccagactgcccacccccgtgctgctgccctacaagccccaggtgatcagagccctggccaagcccctggacgacaagaagagactggtgagaaaggaggccgtgagcgccagaggcgagtggttcctgctgggcagccccggcagctag

SEQ ID NO: 108112 - DNA, 3030 bp, Artificial Sequence
  derived and/or modified sequence
atggccgccgccgccgccgtggaggccgccgcccccatgggcgccctgtggggcctggtgcacgacttcgtggtgggccagcaggagggccccgccgaccaggtggccgccagcagcctggagaaccccgagcccagaaccagagccagagccatccagctgctgagccaggtgctgctgcactgccacaccctgctgctggagaaggaggtggtgcacctgatcctgttctacgagaacagactgaaggaccaccacctggtgatccccagcgtgctgcagggcctgaaggccctgagcctgtgcgtggccctgccccccggcctggccgtgagcgtgctgaaggccatcttccaggaggtgcacgtgcaggtggacagacacaccgtgtacaacatcatcaccaacttcatgagaaccagagaggaggagctgaagagcctgggcgccgacttcaccttcggcttcatccaggtgatggacggcgagaaggaccccagaaacctgctggtggccttcagaatcgtgcacgacctgatcagcagagactacagcctgggccccttcgtggaggagctgttcgaggtgaccagctgctacttccccatcgacttcacccccccccccaacgacccccacggcatccagagagaggacctgatcctgagcctgagagccgtgctggccagcacccccagattcgccgagttcctgctgcccctgctgatcgagaaggtggacagcgaggtgctgagcgccaagctggacagcctgcagaccctgaacgcctgctgcgccgtgtacggccagaaggagctgaaggacttcctgcccagcctgtgggccagcatcagaagagaggtgttccagaccgccagcgagagagtggaggccgagggcctggccgccctgcacagcctgaccgcctgcctgagcagaagcgtgctgagagccgacgccgaggacctgctggacagcttcctgagcaacatcctgcaggactgcagacaccacctgtgcgagcccgacatgaagctggtgtggcccagcgccaagctgctgcaggccgccgccggcgccagcgccagagcctgcgacagcgtgaccagcaacgtgctgcccctgctgctggagcagttccacaagcacagccagagcagccagagaagaaccatcctggagatgctgctgggcttcctgaagctgcagcagaagtggagctacgaggacaaggaccagagacccctgaacggcttcaaggaccagctgtgcagcctggtgttcatggccctgaccgaccccagcacccagctgcagctggtgggcatcagaaccctgaccgtgctgggcgcccagcccgacctgctgagctacgaggacctggagctggccgtgggccacctgtacagactgagcttcctgaaggaggacagccagagctgcagagtggccgccctggaggccagcggcaccctggccgccctgtaccccgtggccttcagcagccacctggtgcccaagctggccgaggagctgagagtgggcgagagcaacctgaccaacggcgacgagcccacccagtgcagcagacacctgtgctgcctgcaggccctgagcgccgtgagcacccaccccagcatcgtgaaggagaccctgcccctgctgctgcagcacctgtggcaggtgaacagaggcaacatggtggcccagagcagcgacgtgatcgccgtgtgccagagcctgagacagatggccgagaagtgccagcaggaccccgagagctgctggtacttccaccagaccgccatcccctgcctgctggccctggccgtgcaggccagcatgcccgagaaggagcccagcgtgctgagaaaggtgctgctggaggacgaggtgctggccgccatggtgagcgtgatcggcaccgccaccacccacctgagccccgagctggccgcccagagcgtgacccacatcgtgcccctgttcctggacggcaacgtgagcttcctgcccgagaacagcttccccagcagattccagcccttccaggacggcagcagcggccagagaagactgatcgccctgctgatggccttcgtgtgcagcctgcccagaaacgtggagatcccccagctgaaccagctgatgagagagctgctggagctgagctgctgccacagctgccccttcagcagcaccgccgccgccaagtgcttcgccggcctgctgaacaagcaccccgccggccagcagctggacgagttcctgcagctggccgtggacaaggtggaggccggcctgggcagcggcccctgcagaagccaggccttcaccctgctgctgtgggtgaccaaggccctggtgctgagataccaccccctgagcagctgcctgaccgccagactgatgggcctgctgagcgaccccgagctgggccccgccgccgccgacggcttcagcctgctgatgagcgactgcaccgacgtgctgaccagagccggccacgccgaggtgagaatcatgttcagacagagattcttcaccgacaacgtgcccgccctggtgcagggcttccacgccgccccccaggacgtgaagcccaactacctgaagggcctgagccacgtgctgaacagactgcccaagcccgtgctgctgcccgagctgcccaccctgctgagcctgctgctggaggccctgagctgccccgactgcgtggtgcagctgagcaccctgagctgcctgcagcccctgctgctggaggccccccaggtgatgagcctgcacgtggacaccctggtgaccaagttcctgaacctgagcagcagccccagcatggccgtgagaatcgccgccctgcagtgcatgcacgccctgaccagactgcccacccccgtgctgctgccctacaagccccaggtgatcagagccctggccaagcccctggacgacaagaagagactggtgagaaaggaggccgtgagcgccagaggcgagtggttcctgctgggcagccccggcagctag

SEQ ID NO: 108113 - DNA, 3093 bp, Artificial Sequence
  derived and/or modified sequence
atggccgctgcagccgccgtcgaggccgccgcacccatgggcgccctttggggcctcgtgcacgacttcgtcgtcggtcagcaggagggccccgcggaccaggtggcagctgatgtcaagtctggtaactatacggtattgcaggtggttgaagcgcttgggtcgagtttggaaaatcccgagccccggacccgggcacgagccatccagcttttatcgcaggtcctgctgcattgtcacacactgttgctcgagaaagaggttgtccacctgattcttttctatgagaataggctgaaggatcaccatctggtgatccccagcgttctgcagggtttgaaggcactgtcactctgcgtcgcactgcctcctggcctggctgtgtctgtactcaaagctatcttccaagaggtgcatgtgcaatctctgcctcaggtcgatcgccatactgtgtacaatatcatcactaactttatgcgcacaagggaggaagagctgaaaagtttgggcgctgatttcacctttggcttcatccaggtcatggatggggaaaaggacccccgtaacctactcgtcgctttccggatcgtccacgatctcatatctagagactatagcctgggcccatttgtggaggagctcttcgaagtgacatcttgttatttccccatcgattttaccccaccccccaatgatccacacggcattcaaagggaggacctgatcctttcgctgagggccgttctggctagcactccacgtttcgccgaattcctgttacccctgctgatagagaaggtggactccgaagtgctctcagccaagctggattccttgcaaactctgaacgcgtgctgcgctgtgtatggccagaaagagctcaaggatttcctcccctccctgtgggccagcatccgaagggaggtgtttcaaacagcatcagagagagttgaggcagagggactggctgccctgcactctctcactgcctgcctgtctcgctccgtgctgcgggcagatgcggaggatttactggacagcttcctgtccaacatccttcaagactgccggcatcatctgtgcgaacctgatatgaagcttgtgtggccctcagcaaagctcttacaggcagctgccggcgcgtccgccagagcatgtgactccgtgacaagcaatgtcctgcccctgttgttggaacagttccacaaacactcccagtcgagtcagagaaggacaatcttagaaatgctgctcggattcctcaaactgcaacagaagtggagctatgaggacaaagatcagaggcccttaaacggttttaaggaccagctttgctctctggtgtttatggctctaactgatccctccacacagctgcagttagtgggcataaggacactgactgtcttgggagcccagcccgaccttttgtcttacgaggaccttgagctggctgtgggccatctgtatcgactatcttttttaaaggaagactcccaatcatgtcgagttgccgccttagaagcttctggtaccctggcagccctttatcctgtcgcgttttcgtctcatctggttccaaaactcgccgaggaactgcgggttggagagtctaacctaacaaatggtgacgagcccacacaatgttcacgtcacttgtgctgtctgcaggcgctgtctgccgtgagcacccacccttcaatcgtgaaagagacacttccacttctgttgcaacatctgtggcaggtgaacaggggaaacatggtcgcacagtctagcgacgttatcgcagtgtgccagtccctgcgccagatggccgagaagtgtcagcaggaccctgaatcttgctggtactttcaccagaccgctatcccgtgtctcctggctctggccgtccaggcgtcaatgcccgagaaggagccgtcggtcttgcgaaaggtgttattggaggacgaagttttagcggccatggtgtctgtcattggtacggctacaacccacctgtcgcctgaactggccgcacagagcgtcacccacatagtccccttgttcctcgacggcaatgtgagcttcctgcctgagaactcttttccatcccggttccagcccttccaggacggctcctccggacaacgcagattaatcgcactgctgatggcttttgtctgctccttgccgaggaatgtggaaatcccccagctaaaccaattgatgagggaactcttggagctgtcatgctgtcacagttgcccgtttagctccacagcagcagctaagtgtttcgccggtctgctgaacaagcatcccgcgggtcagcagctggacgagttcctgcaactggcggtggataaagtcgaagccggcctcggttccgggccgtgcagatcacaagcttttaccctgttattatgggttacaaaagcactggtgctgaggtaccaccctctatcgtcttgcctgactgcccggcttatgggtctcctgagtgatcccgagttagggccagccgcagccgatggtttcagcctgttgatgagcgactgtacagatgtgctgactagagctgggcacgccgaggtgaggataatgttccggcagagattcttcactgacaacgtaccagcactggtgcagggcttccatgctgctccccaagacgtgaaacccaattaccttaaaggtctgagccatgtgctcaatagactgccaaaacccgtactcctcccagagctacccactctgctgagtctgctgctcgaagccctcagctgccctgattgcgtagtgcagctgagcactctctcctgccttcagcctctactgctagaggcgcctcaggttatgtccctccacgtggatacactggtgacgaagttcctgaatctgtcttccagccccagcatggccgtgagaatagctgcgctccagtgcatgcatgcccttacccggctccctacacctgtgttgttgccgtacaagcctcaggtgattcgggcgctcgctaaacctttggacgataagaaacgcctagtgcgaaaggaggccgtctcagcccgaggcgagtggttcctgctggggtcgccaggctcatag

SEQ ID NO: 108114 - DNA, 3030 bp, Artificial Sequence
  derived and/or modified sequence
atggccgccgcagccgctgttgaggcagctgccccaatgggagctctgtgggggctggtccatgactttgtggtgggtcagcaggagggacctgcggaccaggtggcagcttcctccttagaaaaccccgaacccaggactagggcccgtgctattcagctcttgagtcaggtactgcttcactgtcacacactactgcttgaaaaggaagtggtgcatctgatcctgttttatgaaaacaggctgaaggatcaccatctggttatcccctcagtgctgcaaggactgaaggcactctcgttgtgtgtggctcttcctcctgggttagccgtgagcgtgttgaaggctatcttccaggaggtgcacgtccaggtcgacagacatacggtctacaatattatcaccaactttatgaggactcgcgaggaagagctgaagtcactgggtgccgacttcaccttcggcttcatccaggtgatggatggcgagaaagatcctagaaatcttctggttgctttccgaatagtgcacgatctcatctcgagagattactccctcggaccatttgtggaggagttatttgaggtgacctcctgttacttccctattgacttcacaccacccccgaatgatccccacggtatacagcgcgaagatctcattttgtccttgagggccgtactcgcctcaaccccccgattcgcggaattcctgctcccactgctgatcgagaaagtggatagcgaagtgctcagcgcaaaattagactccttgcagaccttaaacgcctgttgtgcagtttatggacagaaagagctcaaagattttcttccaagcctctgggcttccatcagacgcgaagtgttccagacagcttctgagcgcgtggaagccgaagggctggccgccctgcactccctgactgcctgtctgagccgtagcgtgcttagggccgatgctgaggatctgctggattcattcctcagtaacatccttcaggactgcaggcaccacctgtgcgaacctgacatgaagctcgtgtggccatccgctaagctactgcaagctgctgctggggccagcgccagagcgtgcgacagcgtcacctccaatgtcttaccactactcctggaacagttccataagcatagtcagtcttctcaaagaaggacgatacttgaaatgctgttgggcttcttgaagttgcagcagaagtggagctacgaggacaaggaccagcggccccttaatgggtttaaggaccagctgtgcagcctggtttttatggcgctgactgaccccagcacacagttgcagctcgtgggcatacggacacttacggtgctgggggcccagcctgacctcctcagctacgaggatcttgagctggctgtcgggcatctctaccgcctctctttcttaaaagaagattcccagagttgtagggttgcagctctggaggcgagcggcacgctggcggctctctatccagtggccttcagctcccatctagtccccaagttggccgaagagctgagagtcggggaatcaaacttgaccaatggagacgagcccacccagtgcagccggcatttgtgttgtctgcaggctctgagtgctgtgagcacccatccatctatcgtgaaggagacactgcctctgttattgcagcacttatggcaggtcaatagaggtaatatggtggctcagtcatcagacgtaatcgctgtctgccagtcgctgagacaaatggctgagaagtgccagcaagatcccgaatcttgctggtactttcatcagaccgctatcccctgcttactcgcactggcagtccaagctagcatgcccgaaaaagagccgagtgtgttgcgcaaagtgctgctcgaggatgaagtgttagctgccatggtgagtgttataggaactgccaccacccacctgagtcctgaactcgccgcacagtctgtcacacatatcgtgcccctgttcctggacggcaacgtgtctttcctgcccgaaaacagcttcccgtcgagatttcagccattccaggacggatcctccggacaacgacggctaatagcccttcttatggccttcgtatgcagtctccctcggaacgtggagattccccagctgaaccaactcatgagggaactactggagctctcatgctgtcattcttgtcctttctcttccaccgccgccgcaaaatgcttcgcagggcttttaaacaaacatcccgctggccagcagctggacgagttcctgcaactcgccgtcgacaaagtggaggcaggcctgggttctggtccctgcagatcacaagcgtttactctgttgctctgggtgacaaaggccttggtgctgagataccacccattgagcagttgtctcacagccaggttgatgggcttgctctctgatcccgagttggggcctgccgccgccgatggcttcagtcttctgatgtccgattgtacggacgttctgacaagggctggacatgcggaggtcagaattatgttcagacagcgtttcttcactgataatgtgccagctttagttcagggttttcacgccgctccccaagatgtgaagcctaactacttgaagggattaagtcacgtccttaatcgcctgcccaaaccggtcctactgcccgaattgcccacccttctgtcgctgttactagaagctttgagttgtccggattgtgtggtgcaactgagcaccctgtcctgtctccagcccctgctgctggaggcaccacaggttatgtctctgcacgtggacacactggttacaaaattcctgaatctgtcaagcagtccaagtatggcagtgcgaatcgcggcactacagtgcatgcacgctcttacaagactccctacgcctgtgctcttgccttacaaacctcaagtgattcgggcactcgccaaacctcttgacgacaaaaaacggttagttcggaaggaagccgtgtccgcccgcggagagtggttcctgctgggctccccaggatcatag

SEQ ID NO: 108115 - DNA, 3093 bp, Artificial Sequence
  derived and/or modified sequence
atggccgcagctgcagcagtggaagccgctgcccctatgggcgcattatggggcctagtacatgacttcgtggtaggacaacaggagggtcctgccgatcaggtagcggcagacgttaagagcgggaattacaccgttcttcaagtggttgaagccctaggaagtagcctagaaaaccctgagccccgcacccgtgctcgagccatacaactgctgagtcaggtccttctgcactgtcatacactgcttctagagaaagaggtggtgcatctgatcctgttctacgagaacagactgaaggaccaccatctggtgattccttccgtcctgcagggactgaaggcattgtccttatgtgtcgcgctcccgcccggtctggcagtgtcagttctgaaggcgatctttcaggaagtgcacgtgcagagtttacctcaagtcgacaggcacaccgtgtacaacattatcactaattttatgcggacaagggaggaagagctgaagagtttgggggctgacttcacctttggctttatacaggttatggatggggaaaaagatcctcggaacctccttgtagcctttcgtattgttcacgatttgatctcccgcgattatagtttgggcccctttgtggaggaactgtttgaagtcaccagttgctattttcccatcgatttcacaccgccccctaacgacccccatgggatccagagagaagacttgatcttatcactaagagccgtgctcgcgtcgacacctcggtttgcggaatttctcctccctcttctgattgaaaaggttgactcggaagtgctgagtgccaagctggactccctgcagaccctcaacgcctgttgtgcggtctacggacagaaagaactgaaggactttctgccgtctctgtgggcgtccatcagaagagaggtttttcagacagcttctgagagggtggaagccgaagggttggccgccctgcactcccttacagcgtgcctgagcaggtcggtcctaagggctgacgccgaagatcttctggactcttttctttccaatatccttcaggattgccgccatcacttatgtgagcccgatatgaaacttgtgtggccctctgccaaactgcttcaggctgcagctggggcttcagccagagcctgtgattcggtcacctccaatgtcctgccactgctcctggagcagttccataaacactctcagtcgagccagcgacgaaccatactcgagatgctcttgggtttcctgaagcttcagcagaaatggagctacgaggacaaggaccaaaggcccctgaacggatttaaggatcagttgtgctcgctcgtgtttatggccctgaccgatcctagtacccagctccagttggtaggtatacggacactaacggttctgggggctcaacctgacctcctcagctatgaggatctggagctggctgtgggccatctgtatcggctgtccttcctgaaggaggacagtcaaagttgtcgcgtcgcagctctcgaggcctccgggacactggccgcgctttaccctgttgctttctcttcacacctggtacccaagcttgccgaggaactcagggtcggtgagagtaacctcacaaatggcgatgagccaactcaatgcagtcggcacctgtgttgtcttcaagcattaagtgcggtgtcgacacacccttccatcgtgaaagagaccctacccttactcctccagcatttgtggcaggtcaacagagggaatatggtggcacaaagctctgacgtgattgcagtgtgccagtcactacggcagatggccgaaaagtgtcaacaagatccagagagttgctggtattttcaccagactgcgattccgtgtctactggcgctggcggttcaagcatctatgcctgaaaaagagcccagcgtgcttaggaaggttctgctcgaggatgaagtgcttgcagccatggtgtccgttatcggcacagcgacgactcatctgtcccccgaattggccgcccagtctgtgactcatatagtgcctctttttctcgatggtaatgtgagctttctcccagagaactctttcccaagcagatttcagccatttcaggacggctcgtcaggccagcgccgattaatcgcactgttgatggcctttgtatgtagcctgccaaggaacgtcgagatcccacagctaaatcagctgatgagggagttactggaacttagttgctgccacagttgtccttttagcagtaccgcggccgcaaagtgcttcgccggactgcttaacaaacacccggccggtcagcagcttgatgaattcttgcaactggctgtcgataaggtggaagcaggcctggggtctgggccctgtcgcagtcaggccttcaccttactcctctgggttactaaagccctggtcctgaggtatcaccccttgtcctcatgtctgaccgcccgactgatgggcttactttctgacccagaattgggacccgcagccgccgatggctttagtttgctgatgtcagactgtactgatgtgctgacaagggccgggcatgcggaggttcgcattatgtttaggcagagattctttaccgataatgtgccagccctggttcagggcttccacgccgcaccgcaggacgtcaagccaaactatttaaaaggtctgtcccacgtgttgaatcggctacccaagcctgtgctcctgccggaacttcctacacttctgtcacttctgttggaggctctgagttgtcccgattgcgtcgtgcaactgtcaaccttatcctgcctgcagccattattgctggaagcgcctcaggtaatgtccctccatgtggatacactagtgaccaaattcttgaacctgagttcctcacccagtatggcagtgagaattgccgccctgcagtgcatgcatgctctgacacggctgccaacccccgtgcttttgccatataagccacaggttatccgggcactggcgaagccactggacgacaagaagcgtctggtcaggaaagaggctgtttccgccagaggcgagtggttcctcctcggaagcccgggcagctag

SEQ ID NO: 108116 - DNA, 3093 bp, Artificial Sequence
  derived and/or modified sequence
atggctgctgctgctgctgtggaggccgccgcccccatgggcgccctgtggggcctggtgcatgactttgtggtgggccagcaggagggccctgctgaccaggtggccgcagatgtgaagagcggcaactacacagtgctgcaggtggtggaggccctgggcagcagcctggagaaccctgagcccaggacccgggcccgggccatccagctgctgagccaggtgctgctgcactgccacaccctgctgctggagaaggaggtggtgcacctgatcctcttctatgagaaccggctgaaggaccaccacctggtgatccccagcgtgctgcagggcctgaaggccctgagcctgtgtgtggccctgcccccaggcctggccgtgtctgtgctgaaggccatcttccaggaggtgcacgtgcagagcctgccccaggtggacagacacacagtgtacaacatcatcaccaacttcatgaggacccgggaggaggagctgaagagcctgggcgctgacttcaccttcggcttcatccaggtgatggatggagagaaggaccccaggaacctgctggtggccttccgcatcgtgcatgacctgatcagccgggactacagcctgggcccctttgtggaggagctgtttgaggtgaccagctgctacttccccatcgacttcaccccacctccaaatgacccccacggcatccagagagaagatctcatcctgagcctgcgggctgtgctggccagcacccccaggtttgctgagttcctgctgcccctgctgattgagaaggtggacagcgaggtgctgagcgccaagctggacagcctgcagaccctgaatgcctgctgtgctgtgtatggccagaaggagctgaaggacttcctgcccagcctgtgggccagcatccggcgggaggtgttccagacagccagcgagcgggtggaggccgagggcctggccgccctgcacagcctgacagcctgcctgagccgctctgtgctgcgggcagatgctgaggacctgctggacagcttcctgagcaacatcctgcaggactgccgccaccacctgtgtgagccagacatgaagctggtgtggcccagcgccaagctgctgcaggccgctgctggggccagcgcccgggcctgtgacagcgtgaccagcaatgtgctgcccctgctgctggagcagttccacaagcacagccagagcagccagaggaggaccatcctggagatgctgctgggcttcctgaagctgcagcagaagtggagctatgaggacaaggaccagaggcccctgaatggcttcaaggaccagctgtgcagcctggtgttcatggccctgacagaccccagcacccagctgcagctggtgggcatccgcaccctgactgtgctgggcgcccagcctgacctgctgtcctatgaggacctggagctggccgtgggccacctgtaccgcctgtccttcctgaaggaggacagccagagctgccgggtggccgccctggaggccagcggcaccctggccgccctgtaccctgtggccttcagcagccacctggtgcccaagctggccgaggagctgcgggtgggggagagcaacctgaccaatggagatgagcccacccagtgcagccgccacctgtgctgcctgcaggccctgtctgctgtgtccacccaccccagcatcgtgaaggagaccctgcccctgctgctgcagcacctgtggcaggtgaacagaggcaacatggtggcccagagcagtgatgtgattgctgtgtgccagagcctgcggcagatggccgagaagtgccagcaggaccctgagagctgctggtacttccaccagacagccatcccctgcctgctggccctggccgtgcaggcctccatgcctgagaaggagcccagcgtgctgaggaaggtgctgctggaggatgaggtgctggccgccatggtgtctgtgattggaacagccaccacccacctgagccctgagctggccgcccagagcgtgacccacatcgtgcccctcttcctggatggaaatgtgtccttcctgcctgagaacagcttccccagccgcttccagcccttccaggacggcagcagcggccagaggcggctgattgccctgctgatggcctttgtgtgcagcctgcccagaaatgtggagatcccccagctgaaccagctgatgagggagctgctggagctgagctgctgccacagctgccccttcagcagcacagctgctgccaagtgctttgctggcctgctgaacaagcaccctgctggccagcagctggatgagttcctgcagctggccgtggacaaggtggaggccggcctgggcagcggcccctgccgcagccaggccttcaccctgctgctgtgggtgaccaaggccctggtgctgcgctaccaccccctgagcagctgcctgacagcccggctgatgggcctgctgagtgaccctgagctgggccctgctgctgctgatggcttcagcctgctgatgtctgactgcacagatgtgctgaccagggctggccacgccgaggtgcgcatcatgttccggcagcgcttcttcacagacaacgtgcctgccctggtgcagggcttccacgccgccccccaggatgtgaagcccaactacctgaagggcctgagccacgtgctgaaccggctgcccaagcctgtgctgctgcctgagctgcccaccctgctgagcctgctgctggaggccctgagctgcccagactgtgtggtgcagctgagcaccctgagctgcctgcagcccctgctgctggaggccccccaggtgatgagcctgcacgtggacaccctggtgaccaagttcctgaacctgagcagcagccccagcatggctgtgagaattgctgccctgcagtgcatgcacgccctgacccggctgcccacccctgtgctgctgccctacaagccccaggtgatccgggccctggccaagcccctggatgacaagaagaggctggtgaggaaggaggccgtgtctgcccggggggagtggttcctgctgggcagccctggcagctag

SEQ ID NO: 108117 - DNA, 3030 bp, Artificial Sequence
  derived and/or modified sequence
atggctgctgctgctgctgtggaggccgccgcccccatgggcgccctgtggggcctggtgcatgactttgtggtgggccagcaggagggccctgctgaccaggtggccgccagcagcctggagaaccctgagcccaggacccgggcccgggccatccagctgctgagccaggtgctgctgcactgccacaccctgctgctggagaaggaggtggtgcacctgatcctcttctatgaaaatcggctgaaggaccaccacctggtgatccccagcgtgctgcagggcctgaaggccctgagcctgtgtgtggccctgcccccaggcctggccgtgtctgtgctgaaggccatcttccaggaggtgcacgtgcaggtggacagacacacagtgtacaacatcatcaccaacttcatgaggacccgggaggaggagctgaagagcctgggcgctgacttcaccttcggcttcatccaggtgatggatggagagaaggaccccaggaacctgctggtggccttcagaattgtgcatgacctgatcagccgggactacagcctgggcccctttgtggaggagctgtttgaggtgaccagctgctacttccccatcgacttcaccccacctccaaatgacccccacggcatccagcgggaggacctgatcctgagcctgcgggctgtgctggccagcacccccaggtttgctgagttcctgctgcccctgctgattgagaaggtggacagcgaggtgctgagcgccaagctggacagcctgcagaccctgaatgcctgctgtgctgtgtatggccagaaggagctgaaggacttcctgcccagcctgtgggccagcatcagaagagaggtgttccagacagccagcgagcgggtggaggccgagggcctggccgccctgcacagcctgacagcctgcctgagccgctctgtgctgcgggcagatgctgaggacctgctggacagcttcctgagcaacatcctgcaggactgccgccaccacctgtgtgagccagacatgaagctggtgtggcccagcgccaagctgctgcaggccgccgccggggccagcgcccgggcctgtgacagcgtgaccagcaatgtgctgcccctgctgctggagcagttccacaagcacagccagagcagccagaggaggaccatcctggagatgctgctgggcttcctgaagctgcagcagaagtggagctatgaggacaaggaccagaggcccctgaatggcttcaaggaccagctgtgcagcctggtgttcatggccctgacagaccccagcacccagctgcagctggtgggcatccgcaccctgactgtgctgggcgcccagcctgacctgctgtcctatgaggacctggagctggccgtgggccacctgtaccgcctgtccttcctgaaggaggacagccagagctgccgggtggccgccctggaggccagcggcaccctggccgccctgtaccctgtggccttcagcagccacctggtgcccaagctggccgaggagctgcgggtgggggagagcaacctgaccaatggagatgagcccacccagtgcagccgccacctgtgctgcctgcaggccctgtctgctgtgtccacccaccccagcatcgtgaaggagaccctgcccctgctgctgcagcacctgtggcaggtgaacagaggcaacatggtggcccagagcagtgatgtgattgctgtgtgccagagcctgcggcagatggccgagaagtgccagcaggaccctgagagctgctggtacttccaccagacagccatcccctgcctgctggccctggccgtgcaggcctccatgcctgagaaggagcccagcgtgctgaggaaggtgctgctggaggatgaggtgctggccgccatggtgtctgtcatcggcacagccaccacccacctgagccctgagctggccgcccagagcgtgacccacatcgtgcccctcttcctggatggaaatgtgtccttcctgcctgaaaattccttccccagccgcttccagcccttccaggacggcagcagcggccagaggaggctcatcgccctgctgatggcctttgtgtgcagcctgcccagaaatgtggagatcccccagctgaaccagctgatgagggagctgctggagctgagctgctgccacagctgccccttcagcagcacagctgctgccaagtgctttgctggcctgctgaacaagcaccctgctggccagcagctggatgagttcctgcagctggccgtggacaaggtggaggccggcctgggcagcggcccctgccgcagccaggccttcaccctgctgctgtgggtgaccaaggccctggtgctgcgctaccaccccctgagcagctgcctgacagcccggctgatgggcctgctgagtgaccctgagctgggccctgctgctgctgatggcttcagcctgctgatgtctgactgcacagatgtgctgacccgggccggccatgctgaggtgcgcatcatgttccggcagcgcttcttcacagacaacgtgcctgccctggtgcagggcttccacgccgccccccaggatgtgaagcccaactacctgaagggcctgagccacgtgctgaaccggctgcccaagcctgtgctgctgcctgagctgcccaccctgctgagcctgctgctggaggccctgagctgcccagactgtgtggtgcagctgagcaccctgagctgcctgcagcccctgctgctggaggccccccaggtgatgagcctgcacgtggacaccctggtgaccaagttcctgaacctgagcagcagccccagcatggctgtgagaattgctgccctgcagtgcatgcacgccctgacccggctgcccacccctgtgctgctgccctacaagccccaggtgatccgggccctggccaagcccctggatgacaagaagaggctggtgaggaaggaggccgtgtctgcccggggggagtggttcctgctgggcagccctggcagctag

SEQ ID NO: 108118 - DNA, 3093 bp, Artificial Sequence
  derived and/or modified sequence
atggccgccgccgccgccgtggaggccgccgcccccatgggcgccctgtgggggctggtccatgattttgttgtcgggcaacaagaggggcccgcggatcaggtggccgcggatgtcaagagcggaaattatactgttctacaggttgtggaagctcttggctcttctctcgagaatccagagccaagaacgagagctcgcgccattcagcttttgagccaggtgctgctccactgccacactctgctgttagagaaagaggtggtgcatctgatcttgttctacgagaaccggctcaaggaccaccatctcgtgataccttcagttcttcaggggcttaaggcccttagtttatgcgtggctcttccacctggcttggccgttagcgtgctcaaggctatcttccaggaagtgcacgttcagtctctgcctcaagtggatcggcacactgtctataatattattacaaactttatgcgcactagagaggaagaactcaaatctctgggcgccgattttacctttgggtttattcaggtaatggacggtgagaaggaccccagaaatttgctggttgcctttcgaatcgtacacgatcttatctctagagactatagtcttggcccattcgtggaggaactgtttgaggtgacatcatgttacttccccattgactttactcctcctccaaacgatccccacggtattcaacgcgaagatttgatcctgtccttgcgggccgtactcgccagcacccctcggttcgctgagttcctactgccactgttgatcgagaaagtagatagtgaagtcctgtcagcgaagcttgactcgctgcaaaccctgaacgcgtgctgcgctgtctatggacagaaggaacttaaggatttcctccccagtctatgggctagcataaggcgggaggtgtttcagacggcatcggagcgcgtcgaggctgaaggcctggccgccctacattctctgaccgcctgtctttctcggagcgtgctgagggcggacgcagaagatttattggacagcttcctgtcgaatattctacaagactgtaggcaccatctgtgcgagcccgatatgaaacttgtctggcccagcgcaaaattgctgcaggctgcagccggcgcaagtgcccgtgcctgtgactccgttacctccaatgtgctgcccctgcttttagagcagttccacaagcatagtcaatccagtcaaagaagaacaattctcgaaatgctgctcggttttcttaaactgcagcagaagtggagctacgaggataaagaccagcggccgttaaatgggttcaaagatcagctctgtagccttgtctttatggctctcactgatcccagcacccaacttcagctggtggggattagaaccctcacagtgctgggcgctcagcccgatctcttatcatatgaggacctggagctggcagttggacacttgtaccgtctgtccttcttaaaggaggatagccagtcctgtcgcgtggccgcgctagaagccagcggaaccctcgctgccttatatcctgtggctttcagctcgcatttggtcccaaagctggccgaagagctgagagtcggtgaatccaatcttactaacggggacgaaccaacgcagtgctcacggcacctatgttgcctgcaggccctgagtgccgtgtctacacatccttcaattgtgaaagaaaccttgcctttgctcttacagcacctgtggcaggtcaaccgcggcaacatggtggctcagtccagtgacgttatcgcagtatgccagagcttaaggcagatggccgagaagtgccaacaggatcctgagtcctgctggtactttcatcaaactgcgatcccttgtcttctggcgcttgctgtccaggcatctatgcctgagaaagaacccagtgtacttaggaaggttctcctggaggatgaggtactggcagccatggtttcggtgatagggacagctacaacacatctgagtccagagctagctgcccagagcgtgacacatatcgtccctctctttctggacggaaacgtgagttttttacccgaaaatagcttccccagtagatttcagccgtttcaggacgggtcaagcgggcagcgtcggctaattgccttactcatggctttcgtgtgttctttgcctagaaatgtcgaaatcccacagttaaatcaactcatgcgggagctccttgagttgagctgctgccattcctgtcccttctcatccactgccgccgccaagtgtttcgccggtctcctgaataagcatccagctgggcagcagcttgacgagtttttgcagctggctgtggataaggtggaggcaggacttgggtcgggaccctgccggtctcaggctttcacgcttctcttgtgggtgacaaaagcgctggtcctacggtaccacccgctgagcagctgtctgaccgcccggctgatgggcttactgtccgacccggagctgggccctgctgcggcagacggcttctcgcttctgatgagtgattgtacagacgtgttaacacgggccggacacgccgaggttcggatcatgttcaggcagaggtttttcacagacaatgttcccgctctggtccagggctttcacgctgctccccaggacgttaagcccaattatttaaaaggccttagccacgtcctcaacaggctccctaagcccgtgttgttgcccgagcttccaactctgctgtccctgctactggaggccctgagctgccccgattgcgtcgtacagttgtccacgctatcgtgcctccaacctttactgctggaagctccacaagtgatgagcctgcacgtcgataccctagttactaaatttctcaatctcagttcttctcctagtatggcggtgcgtatcgctgctctccaatgcatgcatgctctcacgaggctgcccacccccgttcttttaccctataagccccaggtgataagggcactggcgaaaccactggatgataaaaaacgcctggtcagaaaagaagctgtgtccgccaggggcgaatggttccttctgggctcccctgggagctag

SEQ ID NO: 108119 - DNA, 3030 bp, Artificial Sequence
  derived and/or modified sequence
atggccgccgccgccgccgtggaggccgccgcccccatgggcgccctgtgggggttagtgcacgactttgttgtgggccagcaggagggccctgccgaccaggttgctgccagttccctcgagaatccggagcctcgaaccagggctagagccatccagctgctgtcccaggtgctgctgcactgtcacactctgctcctcgagaaagaggtggtgcaccttatccttttctatgaaaaccgcttgaaggatcaccacctcgtaatcccaagtgtgctgcaaggcctcaaagcattatcactctgtgttgcgctgccccctggtctcgccgtcagcgttctgaaggccatcttccaggaagtccacgttcaagtggatcgccacacggtgtataatatcatcactaactttatgcgcacaagagaagaagagttgaagagcctgggggcggactttacattcggcttcattcaagttatggatggggaaaaggatcctaggaaccttcttgtggcatttaggatcgtgcatgacctgatctcacgcgattactccctgggtcctttcgttgaggaactgttcgaagtaacctcatgttactttcccatcgattttacaccccctcccaatgaccctcacggtattcaacgagaagacctgatccttagccttcgtgcggtgctcgccagcacccctcgttttgcagaatttttgctgcccctgctaatcgaaaaagtggattctgaggtcctatctgcaaagctggactcactgcagaccttgaatgcctgctgcgcggtgtatggccagaaagagcttaaagattttttgccttctctctgggcatcaataaggagagaggtgtttcaaactgccagtgaaagggtcgaagcagaaggtctggcagctctgcacagtttaaccgcatgtctcagccggagcgtccttcgggcggatgctgaggacctgctggattcatttctttcaaacattcttcaggactgccggcatcacctgtgcgagcctgatatgaagttggtgtggccttccgcgaagctgctgcaggctgcagctggcgccagcgccagggcttgcgattctgttacctcaaacgttttgcctttacttctcgaacagtttcacaagcattctcagtcaagccagcggagaacgattctagagatgcttttggggttcctgaaactccagcagaaatggtcctacgaggataaggatcagcggcctctgaacgggtttaaggatcaattatgtagcttagtcttcatggccttgacagaccccagtacgcagctccagctagtaggaattaggacattaactgtgctcggcgctcagcccgatttgctcagctacgaggacttagagctggccgtcggacacctgtatcggctgtcttttctcaaagaagactctcagtcctgccgggttgccgccctggaggcatcaggcacccttgccgcactctatcccgtggctttctcctctcacctcgtcccgaagctggccgaggaacttcgcgtcggggagtccaacttgacaaacggggatgaacccactcagtgttctagacacctctgttgtctgcaggcgctgtctgctgtatctacacatcccagtatcgttaaggagactctcccactgttgttacaacatctttggcaggtaaataggggcaacatggtcgcacagagctccgacgtcatcgccgtttgtcagagcttgcgccagatggcagaaaaatgtcagcaggaccccgaatcttgctggtactttcaccagactgctataccctgcctgctagcgctagcagtccaggctagcatgcccgagaaagaaccatctgtgctgaggaaggttcttcttgaggatgaggttctggctgctatggtcagcgtgattggcactgcgaccacccacctctctcccgagcttgccgcccagtcagttacccacattgtgcccttgtttttagatggaaacgtgtctttccttcccgaaaatagctttcccagccgtttccaacctttccaggacgggtcctctggccagaggagactgatcgccctgctaatggcttttgtgtgctcgctgcctagaaacgtggagatcccacaactgaaccagttgatgagggaactcttggaactctcttgttgtcacagctgccctttcagcagtaccgctgccgctaaatgttttgccggtctgcttaacaagcaccccgctggacaacagctggacgaatttctgcaactggcggtggataaggtagaggccggtttaggctcaggcccctgcaggtcccaagctttcaccctgctgttgtgggtgaccaaggcactggtgctgagataccatccactcagctcatgcctcaccgctcggttgatggggctgttgtcagacccggaactgggacccgctgccgccgacgggttcagcctgctgatgtccgattgcactgacgtcctcacgagagccggtcacgccgaggtgcgtataatgttcagacagcggttctttacagacaatgtgccagccttggtgcagggcttccacgccgctccacaggacgttaagcctaattacctgaaggggcttagtcacgttctcaacaggctgcccaaacctgttcttctgccagagctgccaaccctgctttccctgttgctcgaggctctaagctgtcccgattgtgtagtccaattgtcgactctttcctgcctccagcctttgctcctcgaggccccacaggtcatgtcactgcacgtggacactctcgtgaccaaattccttaatctgagctcttcaccaagtatggcagtcagaatagccgctctgcagtgcatgcacgcccttactaggttgcctactccagttctgctgccttacaaaccccaggtcattcgggctttggccaagcctctggatgacaagaagcgcctggtaagaaaagaggcagtatccgcaaggggagagtggttcttgttagggagccctggcagctag

SEQ ID NO: 108120 - DNA, 3093 bp, Artificial Sequence
  derived and/or modified sequence
atggccgccgccgccgccgtggaggccgccgcccccatgggcgccctgtggggcttggttcacgattttgtggtcggccaacaggagggacctgcggatcaggtggctgccgacgtcaaaagcggtaactacactgtgctgcaggtggtggaagcgctcggctcttccctggagaaccctgaacctcgaaccagggccagggccatccagttgctgtcccaggtgttactgcactgtcacaccctgctattagagaaagaggttgtacacctcatactcttctacgagaaccggctgaaagatcatcaccttgtcattccctctgttttgcaagggctcaaagcactgtccctctgtgtcgctctgccccccggtctggctgtatcagtactcaaggcaatattccaggaagtacacgttcagagtcttcctcaggttgacagacacacggtgtacaacattattacaaactttatgagaacacgcgaagaggagctcaagtctctaggcgcagattttaccttcggcttcattcaagtcatggacggcgagaaggacccacgcaatctgctggtagctttccgaatagtgcacgatctaatcagcagagactactcactggggccgttcgtggaggaacttttcgaggtaacctcgtgctatttccccatcgatttcacccctccgccaaacgatccccatgggatacagcgggaagacctgatcctaagcttgagggctgtactggcctctacccctaggttcgcagagtttctgctgccattactgatcgaaaaggtggactctgaggtgctgtccgccaaactcgactctttgcagaccctaaacgcctgttgcgctgtgtatggccagaaagagttgaaggacttcctgcctagcctgtgggcatctattcgtagggaagtcttccaaacagcaagcgaacgcgtcgaggccgagggcctcgctgccttgcatagcctcactgcctgtttgtcaaggtcagttctgagggccgacgccgaggacttgctggactcttttctgagcaacattctgcaagactgccggcaccacctgtgcgagcctgatatgaagctggtgtggccaagcgccaagctgctgcaggccgccgccggtgcgtccgctagggcttgcgattctgttacctccaacgtgcttccactgctcttagagcaatttcataagcattctcaatctagccaacgacgcaccatactagagatgttactgggtttcctcaaactgcagcagaaatggtcttacgaagacaaggaccagagacccctgaacggattcaaggatcagttatgctcccttgtgtttatggccctcaccgacccatcaacccaactgcagctcgtgggaataagaaccctgaccgtgctcggcgctcagcctgatctgctcagctatgaggatttggaattggccgtgggccacttgtacagacttagtttcttaaaggaagattcacagtcgtgtagagtggcagcccttgaagccagcgggaccctggctgccctgtatcccgtcgcgttctcctctcacctggtccccaaattagcagaggagctacgggtgggtgagagcaatctgaccaatggcgacgagcccacacagtgttcgagacacctgtgctgcttacaggcgctgtcggccgtcagcacacacccttcaattgtcaaagaaacactgccgcttctcctgcagcatttgtggcaggttaaccggggaaatatggttgcgcagtcgtccgacgtcatcgctgtgtgtcagagcctgcggcagatggccgaaaaatgccagcaggaccctgagagttgctggtattttcatcagaccgctatcccatgccttctcgctctcgcagtccaggctagcatgcccgagaaggaaccatccgtgctgcgtaaggtcttgctcgaagacgaggtcttggcggccatggtttccgtgatcggcacagcaaccacccacctgagtcctgaattggcagcgcagagcgtgactcatatcgttcccctatttctcgatgggaacgtaagttttctgccagagaattctttcccaagtagatttcagccttttcaggacggttcaagtggacagcgccgcctcattgccttgctgatggccttcgtgtgcagtctgcctcgcaacgtcgagatccctcagctgaaccagctgatgagggagctcctcgaactcagctgctgtcattcatgtccattttcttccaccgctgccgcgaagtgtttcgctggacttctgaacaaacatcccgctggacagcagttggacgaattcctgcagctcgccgtggataaagtcgaagccggtctcgggagcggcccgtgtcgaagtcaagctttcactcttctgctgtgggtcacaaaagccctggtgctccggtaccatcctctttcctcctgtttgaccgctaggttaatgggcttacttagtgaccccgagctcggcccagccgccgcagacgggttctcactgcttatgtccgattgcacagacgtgctcactagggcaggacatgcagaagtgcgcattatgtttcgtcagcggtttttcaccgataatgtgcctgccctcgtgcagggcttccacgcagctccccaggacgttaaaccgaactacctaaaaggactgagccatgtcttgaacaggctccccaagcctgtcctgctccctgaactgccaacactgctgagtttactcctggaggcactcagctgtcccgattgcgtggtccagctgtcgacactgtcctgtctccaaccacttctgctggaggctccacaagttatgtcactgcacgtggacacactggttactaagtttctaaacctgtcgagcagcccgtcaatggccgttcgtatagccgccctgcagtgcatgcatgccctcacaagactccccacccccgtgctgcttccctacaagcctcaggtgattcgtgcgttggcaaagcctctagacgataagaagcgccttgttcggaaagaggccgtctcggctcgcggcgagtggttcctgctgggaagtccaggaagctag

SEQ ID NO: 108121 - DNA, 3465 bp, Artificial Sequence
  derived and/or modified sequence
agttcgcgttatggccgctgccgcggctgtggaggcggcggcgcctatgggtgccctatggggcctcgtgcacgacttcgtcgtgggtcagcaagagggccccgctgaccaggtggctgcagatgtgaaatctggcaactatacagtgttacaagttgtggaagcccttgggtcctctctagagaatccagaaccccgaactcgggcacgagcaatccagcttttgtcacaggtgctactccactgtcacaccttgctcctggagaaggaagtggtacacctgatactgttctatgagaaccggctgaaggaccatcatcttgtgatcccatctgtcctgcagggtttgaaggcacttagcctgtgtgtggccctgcccccagggctggctgtttctgtgcttaaagccatcttccaggaagtgcatgtacagtccctgccacaggtggaccgacacacagtctacaatatcatcaccaattttatgcgaacccgggaagaagagctaaagagcctaggagctgacttcacctttggcttcatccaggtgatggatggggaaaaggatccccgtaatcttctggtggccttccgcatcgtccatgacctcatctccagggactatagcctgggaccctttgtggaggagttgtttgaagtgacatcctgttatttccctatcgattttacccctccacctaatgatccccatggtatccagagagaagacctcatcctgagtcttcgcgctgtgctggcttctacaccacgatttgctgagtttctgctgcccctgttgattgagaaagtggattctgaggttctgagtgccaagttggattctctacagactctgaatgcttgctgtgctgtgtatggacagaaggaactgaaggacttcctccccagcctttgggcttctatccgcagagaggtgttccagacggcaagtgagcgggtggaggcagagggcctggcggccctccactccctgactgcgtgtttgtctcgctctgtgctgagggctgatgctgaggacctccttgactccttccttagcaacattctacaggactgcaggcaccacctgtgtgaaccggacatgaaactggtgtggcctagtgccaagctgttgcaggcagctgcaggtgcatctgcccgggcctgtgactctgtcaccagcaatgtactgcctttactgctggaacagttccacaagcacagtcagagcagccagcggcggacaatccttgaaatgctcctgggtttcttgaagctgcagcagaaatggagctatgaagacaaagatcaaaggcctctgaatggcttcaaggaccagctgtgctcactggtattcatggctctaacagaccccagcacccagcttcagcttgttggcatccgtacactgacagtcttgggtgcccagccagatctcctatcttatgaggacttggagctggcagtgggtcacctgtacagactgagcttcctgaaggaggattcccagagttgcagggtggcagcactggaagcatcaggaaccctggctgctctctaccctgtggccttcagcagccacctcgtacccaagctcgctgaggagctgcgtgtaggggagtcaaatttgactaacggagatgagcccacccaatgctcccggcatctgtgctgtctgcaagccttgtcagctgtatcaacacatcccagcatcgtcaaggagacactgcctctgctgctgcagcatctctggcaagtgaacagagggaatatggttgcacaatccagtgacgttattgctgtctgtcagagcctcagacagatggcagaaaaatgtcagcaggaccctgagagttgctggtatttccaccagacagctataccttgcctgcttgccttggctgtgcaggcctctatgccagagaaggagccctcagttctgagaaaagtactattggaggatgaggtgttggctgccatggtgtctgtcattggcactgctacaacccacctgagccctgagttagctgcccagagtgtgacacacattgtgcccctcttcttggatggcaacgtgtcctttctgcctgaaaacagcttcccgagcagattccagccattccaggatggctcctcagggcagaggcggctgattgcactgcttatggcctttgtctgctccctgcctcgaaatgtggaaatccctcagctgaaccaactcatgcgggagcttttggaactgagctgcacagctgccccttttcttccaccgctgctgccaagtgctttgcaggactcctcaacaagcaccctgcagggcagcagctggatgaattcctacagctagctgtggacaaagtggaggctggcctgggctctgggccctgtcgtagtcaggccttcactcttcttctctgggtaacaaaggccctagtgctcagataccatcctctcagctcctgccttacagcccggctcatgggcctcctgagtgacccagaattaggtccagcagcagctgatggcttctctctgctcatgtctgactgcactgatgtgctgactcgtgctggccatgccgaagtgcggatcatgttccgccagcggttcttcacagataatgtgcctgctttggtccagggcttccatgctgctccccaagatgtgaagccaaactacttgaagggtctttctcatgtacttaacaggctgcccaagcctgtactcttgccagagctgcccacgcttctttccttgctgctggaggccctgtcctgccctgactgtgtggtgcagctctccaccctcagctgccttcagcctcttctactggaagcaccccaagtcatgagtcttcacgtggacaccctcgtcaccaagtttctgaacctcagctctagcccttccatggctgtccggatcgccgcactgcagtgcatgcatgctctcactcgcctgcccacccctgtgctgctgccgtacaaaccacaggtgattcgggccttagccaaacccctggatgacaagaagagactggtgcgcaaggaagcagtgtcagccagaggggagtggtttctgttggggagccctggcagctgagccctcagtcctggcctagactgttctgacaatctaacctgggattactaactgttgagccatcttccccaaagcagggaaaccactggtctctgactgcctttcccacagacacagcacaaatgctaggcctctgttgcatggctgtacaaagaacataagagtccatatttctagtggatttgtaaaataagtgtgtgtgagacacttgcgtttgaagaaagatctagggtcctgggtctcttgcatttatatgtcagaaaaggggcgatatgctgctgaggggtgagtgcatatgagtgtggccctgaggaccagggctggcagatgttgtctacctgctgaagaataaagatttcttttggt

SEQ ID NO: 108122 - DNA, 3348 bp, Artificial Sequence
  derived and/or modified sequence
agttcgcgttatggccgctgccgcggctgtggaggcggcggcgcctatgggtgccctatggggcctcgtgcacgacttcgtcgtgggtcagcaagagggccccgctgaccaggtggctgcagatgtgaaatctggcaactatacagtgttacaagttgtggaagcccttgggtcctctctagagaatccagaaccccgaactcgggcacgagcaatccagcttttgtcacaggtgctactccactgtcacaccttgctcctggagaaggaagtggtacacctgatactgttctatgagaaccggctgaaggaccatcatcttgtgatcccatctgtcctgcagggtttgaaggcacttagcctgtgtgtggccctgcccccagggctggctgtttctgtgcttaaagccatcttccaggaagtgcatgtacagtccctgccacaggtggaccgacacacagtctacaatatcatcaccaattttatgcgaacccgggaagaagagctaaagagcctaggagctgacttcacctttggcttcatccaggtgatggatggggaaaaggatccccgtaatcttctggtggccttccgcatcgtccatgacctcatctccagggactatagcctgggaccctttgtggaggagttgtttgaagtgacatcctgttatttccctatcgattttacccctccacctaatgatccccatggtatccagagagaagacctcatcctgagtcttcgcgctgtgctggcttctacaccacgatttgctgagtttctgctgcccctgttgattgagaaagtggattctgaggttctgagtgccaagttggattctctacagactctgaatgcttgctgtgctgtgtatggacagaaggaactgaaggacttcctccccagcctttgggcttctatccgcagagaggtgttccagacggcaagtgagcgggtggaggcagagggcctggcggccctccactccctgactgcgtgtttgtctcgctctgtgctgagggctgatgctgaggacctccttgactccttccttagcaacattctacaggactgcaggcaccacctgtgtgaaccggacatgaaactggtgtggcctagtgccaagctgttgcaggcagctgcaggtgcatctgcccgggcctgtgactctgtcaccagcaatgtactgcctttactgctggaacagttccacaagcacagtcagagcagccagcggcggacaatccttgaaatgctcctgggtttcttgaagctgcagcagaaatggagctatgaagacaaagatcaaaggcctctgaatggcttcaaggaccagctgtgctcactggtattcatggctctaacagaccccagcacccagcttcagcttgttggcatccgtacactgacagtcttgggtgcccagccagatctcctatcttatgaggacttggagctggcagtgggtcacctgtacagactgagcttcctgaaggaggattcccagagttgcagggtggcagcactggaagcatcaggaaccctggctgctctctaccctgtggccttcagcagccacctcgtacccaagctcgctgaggagctgcgtgtaggggagtcaaatttgactaacggagatgagcccacccaatgctcccggcatctgtgctgtctgcaagccttgtcagctgtatcaacacatcccagcatcgtcaaggagacactgcctctgctgctgcagcatctctggcaagtgaacagagggaatatggttgcacaatccagtgacgttattgctgtctgtcagagcctcagacagatggcagaaaaatgtcagcaggaccctgagagttgctggtatttccaccagacagctataccttgcctgcttgccttggctgtgcaggcctctatgccagagaaggagccctcagttctgagaaaagtactattggaggatgaggtgttggctgccatggtgtctgtcattggcactgctacaacccacctgagccctgagttagctgcccagagtgtgacacacattgtgcccctcttcttggatggcaacgtgtcctttctgcctgaaaacagcttcccgagcagattccagccattccaggtaacagatggctcctcagggcagaggcggctgattgcactgcttatggcctttgtctgctccctgcctcgaaatggcagcagctggatgaattcctacagctagctgtggacaaagtggaggctggcctgggctctgggccctgtcgtagtcaggccttcactcttcttctctgggtaacaaaggccctagtgctcagataccatcctctcagctcctgccttacagcccggctcatgggcctcctgagtgacccagaattaggtccagcagcagctgatggcttctctctgctcatgtctgactgcactgatgtgctgactcgtgctggccatgccgaagtgcggatcatgttccgccagcggttcttcacagataatgtgcctgctttggtccagggcttccatgctgctccccaagatgtgaagccaaactacttgaagggtctttctcatgtacttaacaggctgcccaagcctgtactcttgccagagctgcccacgcttctttccttgctgctggaggccctgtcctgccctgactgtgtggtgcagctctccaccctcagctgccttcagcctcttctactggaagcaccccaagtcatgagtcttcacgtggacaccctcgtcaccaagtttctgaacctcagctctagcccttccatggctgtccggatcgccgcactgcagtgcatgcatgctctcactcgcctgcccacccctgtgctgctgccgtacaaaccacaggtgattcgggccttagccaaacccctggatgacaagaagagactggtgcgcaaggaagcagtgtcagccagaggggagtggtttctgttggggagccctggcagctgagccctcagtcctggcctagactgttctgacaatctaacctgggattactaactgttgagccatcttccccaaagcagggaaaccactggtctctgactgcctttcccacagacacagcacaaatgctaggcctctgttgcatggctgtacaaagaacataagagtccatatttctagtggatttgtaaaataagtgtgtgtgagacacttgcgtttgaagaaagatctagggtcctgggtctcttgcatttatatgtcagaaaaggggcgatatgctgctgaggggtgagtgcatatgagtgtggccctgaggaccagggctggcagatgttgtctacctgctgaagaataaagatttcttttggt

SEQ ID NO: 108123 - DNA, 3530 bp, Artificial Sequence
  derived and/or modified sequence
atgtgaccgacagcaccgccccctagggctgggcctgattttctcattggcttcccccgtgttcgcgttatggccgctgccgcggctgtggaggcggcggcgcctatgggtgccctatggggcctcgtgcacgacttcgtcgtgggtcagcaagagggccccgctgaccaggtggctgcagatgtgaaatctggcaactatacagtgttacaagttgtggaagcccttgggtcctctctagagaatccagaaccccgaactcgggcacgagcaatccagcttttgtcacaggtgctactccactgtcacaccttgctcctggagaaggaagtggtacacctgatactgttctatgagaaccggctgaaggaccatcatcttgtgatcccatctgtcctgcagggtttgaaggcacttagcctgtgtgtggccctgcccccagggctggctgtttctgtgcttaaagccatcttccaggaagtgcatgtacagtccctgccacaggtggaccgacacacagtctacaatatcatcaccaattttatgcgaacccgggaagaagagctaaagagcctaggagctgacttcacctttggcttcatccaggtgatggatggggaaaaggatccccgtaatcttctggtggccttccgcatcgtccatgacctcatctccagggactatagcctgggaccctttgtggaggagttgtttgaagtgacatcctgttatttccctatcgattttacccctccacctaatgatccccatggtatccagagagaagacctcatcctgagtcttcgcgctgtgctggcttctacaccacgatttgctgagtttctgctgcccctgttgattgagaaagtggattctgaggttctgagtgccaagttggattctctacagactctgaatgcttgctgtgctgtgtatggacagaaggaactgaaggacttcctccccagcctttgggcttctatccgcagagaggtgttccagacggcaagtgagcgggtggaggcagagggcctggcggccctccactccctgactgcgtgtttgtctcgctctgtgctgagggctgatgctgaggacctccttgactccttccttagcaacattctacaggactgcaggcaccacctgtgtgaaccggacatgaaactggtgtggcctagtgccaagctgttgcaggcagctgcaggtgcatctgcccgggcctgtgactctgtcaccagcaatgtactgcctttactgctggaacagttccacaagcacagtcagagcagccagcggcggacaatccttgaaatgctcctgggtttcttgaagctgcagcagaaatggagctatgaagacaaagatcaaaggcctctgaatggcttcaaggaccagctgtgctcactggtattcatggctctaacagaccccagcacccagcttcagcttgttggcatccgtacactgacagtcttgggtgcccagccagatctcctatcttatgaggacttggagctggcagtgggtcacctgtacagactgagcttcctgaaggaggattcccagagttgcagggtggcagcactggaagcatcaggaaccctggctgctctctaccctgtggccttcagcagccacctcgtacccaagctcgctgaggagctgcgtgtaggggagtcaaatttgactaacggagatgagcccacccaatgctcccggcatctgtgctgtctgcaagccttgtcagctgtatcaacacatcccagcatcgtcaaggagacactgcctctgctgctgcagcatctctggcaagtgaacagagggaatatggttgcacaatccagtgacgttattgctgtctgtcagagcctcagacagatggcagaaaaatgtcagcaggaccctgagagttgctggtatttccaccagacagctataccttgcctgcttgccttggctgtgcaggcctctatgccagagaaggagccctcagttctgagaaaagtactattggaggatgaggtgttggctgccatggtgtctgtcattggcactgctacaacccacctgagccctgagttagctgcccagagtgtgacacacattgtgcccctcttcttggatggcaacgtgtcctttctgcctgaaaacagcttcccgagcagattccagccattccaggatggctcctcagggcagaggcggctgattgcactgcttatggcctttgtctgctccctgcctcgaaatgtggaaatccctcagctgaaccaactcatgcgggagcttttggaactgagctgctgccacagctgccccttttcttccaccgctgctgccaagtgctttgcaggactcctcaacaagcaccctgcagggcagcagctggatgaattcctacagctagctgtggacaaagtggaggctggcctgggctctgggccctgtcgtagtcaggccttcactcttcttctctgggtaacaaaggccctagtgctcagataccatcctctcagctcctgccttacagcccggctcatgggcctcctgagtgacccagaattaggtccagcagcagctgatggcttctctctgctcatgtctgactgcactgatgtgctgactcgtgctggccatgccgaagtgcggatcatgttccgccagcggttcttcacagataatgtgcctgctttggtccagggcttccatgctgctccccaagatgtgaagccaaactacttgaagggtctttctcatgtacttaacaggctgcccaagcctgtactcttgccagagctgcccacgcttctttccttgctgctggaggccctgtcctgccctgactgtgtggtgcagctctccaccctcagctgccttcagcctcttctactggaagcaccccaagtcatgagtcttcacgtggacaccctcgtcaccaagtttctgaacctcagctctagcccttccatggctgtccggatcgccgcactgcagtgcatgcatgctctcactcgcctgcccacccctgtgctgctgccgtacaaaccacaggtgattcgggccttagccaaacccctggatgacaagaagagactggtgcgcaaggaagcagtgtcagccagaggggagtggtttctgttggggagccctggcagctgagccctcagtcctggcctagactgttctgacaatctaacctgggattactaactgttgagccatcttccccaaagcagggaaaccactggtctctgactgcctttcccacagacacagcacaaatgctaggcctctgttgcatggctgtacaaagaacataagagtccatatttctagtggatttgtaaaataagtgtgtgtgagacacttgcgtttgaagaaagatctagggtcctgggtctcttgcatttatatgtcagaaaaggggcgatatgctgctgaggggtgagtgcatatgagtgtggccctgaggaccagggctggcagatgttgtctacctgctgaagaataaagatttcttttggtaa

SEQ ID NO: 108124 - DNA, 3396 bp, Artificial Sequence
  derived and/or modified sequence
atggccgctgccgcggctgtggaggcggcggcgcctatgggtgccctatggggcctcgtgcacgacttcgtcgtgggtcagcaagagggccccgctgaccaggtggctgcgtcctctctagagaatccagaaccccgaactcgggcacgagcaatccagcttttgtcacaggtgctactccactgtcacaccttgctcctggagaaggaagtggtacacctgatactgttctatgagaaccggctgaaggaccatcatcttgtgatcccatctgtcctgcagggtttgaaggcacttagcctgtgtgtggccctgcccccagggctggctgtttctgtgcttaaagccatcttccaggaagtgcatgtacaggtggaccgacacacagtctacaatatcatcaccaattttatgcgaacccgggaagaagagctaaagagcctaggagctgacttcacctttggcttcatccaggtgatggatggggaaaaggatccccgtaatcttctggtggccttccgcatcgtccatgacctcatctccagggactatagcctgggaccctttgtggaggagttgtttgaagtgacatcctgttatttccctatcgattttacccctccacctaatgatccccatggtatccagagagaagacctcatcctgagtcttcgcgctgtgctggcttctacaccacgatttgctgagtttctgctgcccctgttgattgagaaagtggattctgaggttctgagtgccaagttggattctctacagactctgaatgcttgctgtgctgtgtatggacagaaggaactgaaggacttcctccccagcctttgggcttctatccgcagagaggtgttccagacggcaagtgagcgggtggaggcagagggcctggcggccctccactccctgactgcgtgtttgtctcgctctgtgctgagggctgatgctgaggacctccttgactccttccttagcaacattctacaggactgcaggcaccacctgtgtgaaccggacatgaaactggtgtggcctagtgccaagctgttgcaggcagctgcaggtgcatctgcccgggcctgtgactctgtcaccagcaatgtactgcctttactgctggaacagttccacaagcacagtcagagcagccagcggcggacaatccttgaaatgctcctgggtttcttgaagctgcagcagaaatggagctatgaagacaaagatcaaaggcctctgaatggcttcaaggaccagctgtgctcactggtattcatggctctaacagaccccagcacccagcttcagcttgttggcatccgtacactgacagtcttgggtgcccagccagatctcctatcttatgaggacttggagctggcagtgggtcacctgtacagactgagcttcctgaaggaggattcccagagttgcagggtggcagcactggaagcatcaggaaccctggctgctctctaccctgtggccttcagcagccacctcgtacccaagctcgctgaggagctgcgtgtaggggagtcaaatttgactaacggagatgagcccacccaatgctcccggcatctgtgctgtctgcaagccttgtcagctgtatcaacacatcccagcatcgtcaaggagacactgcctctgctgctgcagcatctctggcaagtgaacagagggaatatggttgcacaatccagtgacgttattgctgtctgtcagagcctcagacagatggcagaaaaatgtcagcaggaccctgagagttgctggtatttccaccagacagctataccttgcctgcttgccttggctgtgcaggcctctatgccagagaaggagccctcagttctgagaaaagtactattggaggatgaggtgttggctgccatggtgtctgtcattggcactgctacaacccacctgagccctgagttagctgcccagagtgtgacacacattgtgcccctcttcttggatggcaacgtgtcctttctgcctgaaaacagcttcccgagcagattccagccattccaggatggctcctcagggcagaggcggctgattgcactgcttatggcctttgtctgctccctgcctcgaaatgtggaaatccctcagctgaaccaactcatgcgggagcttttggaactgagctgctgccacagctgccccttttcttccaccgctgctgccaagtgctttgcaggactcctcaacaagcaccctgcagggcagcagctggatgaattcctacagctagctgtggacaaagtggaggctggcctgggctctgggccctgtcgtagtcaggccttcactcttcttctctgggtaacaaaggccctagtgctcagataccatcctctcagctcctgccttacagcccggctcatgggcctcctgagtgacccagaattaggtccagcagcagctgatggcttctctctgctcatgtctgactgcactgatgtgctgactcgtgctggccatgccgaagtgcggatcatgttccgccagcggttcttcacagataatgtgcctgctttggtccagggcttccatgctgctccccaagatgtgaagccaaactacttgaagggtctttctcatgtacttaacaggctgcccaagcctgtactcttgccagagctgcccacgcttctttccttgctgctggaggccctgtcctgccctgactgtgtggtgcagctctccaccctcagctgccttcagcctcttctactggaagcaccccaagtcatgagtcttcacgtggacaccctcgtcaccaagtttctgaacctcagctctagcccttccatggctgtccggatcgccgcactgcagtgcatgcatgctctcactcgcctgcccacccctgtgctgctgccgtacaaaccacaggtgattcgggccttagccaaacccctggatgacaagaagagactggtgcgcaaggaagcagtgtcagccagaggggagtggtttctgttggggagccctggcagctgagccctcagtcctggcctagactgttctgacaatctaacctgggattactaactgttgagccatcttccccaaagcagggaaaccactggtctctgactgcctttcccacagacacagcacaaatgctaggcctctgttgcatggctgtacaaagaacataagagtccatatttctagtggatttgtaaaataagtgtgtgtgagacacttgcgtttgaagaaagatctagggtcctgggtctcttgcatttatatgtcagaaaaggggcgatatgctgctgaggggtgagtgcatatgagtgtggccctgaggaccagggctggcagatgttgtctacctgctgaagaataaagatttcttttggt

SEQ ID NO: 108125 - DNA, 3797 bp, Artificial Sequence
  derived and/or modified sequence
gattttctcattggcttcccccgtggtgcgtaccgcccctctccccacccagccaggtgcccgccccgcagcccgtctcccggggagccgggctgggaattattcgccctcaatcgcctccggctgcgtgcccagcagccgccttccctctcggtgccaccgccccatttcaggccccgcccctccctggaactgcctaggcagaagccggcaggcacgtgaccccggcgccccgcccccttgcgcttccccggagattggctcgggaggcgcatgcgcggagagcccgtctcgagccaccgcccatatcccctcccacggtctctagttcgcgttatggccgctgccgcggctgtggaggcggcggcgcctatgggtgccctatggggcctcgtgcacgacttcgtcgtgggtcagcaagagggccccgctgaccaggtggctgcagatgtgaaatctggcaactatacagtgttacaagttgtggaagcccttgggtcctctctagagaatccagaaccccgaactcgggcacgagcaatccagcttttgtcacaggtgctactccactgtcacaccttgctcctggagaaggaagtggtacacctgatactgttctatgagaaccggctgaaggaccatcatcttgtgatcccatctgtcctgcagggtttgaaggcacttagcctgtgtgtggccctgcccccagggctggctgtttctgtgcttaaagccatcttccaggaagtgcatgtacagtccctgccacaggtggaccgacacacagtctacaatatcatcaccaattttatgcgaacccgggaagaagagctaaagagcctaggagctgacttcacctttggcttcatccaggtgatggatggggaaaaggatccccgtaatcttctggtggccttccgcatcgtccatgacctcatctccagggactatagcctgggaccctttgtggaggagttgtttgaagtgacatcctgttatttccctatcgattttacccctccacctaatgatccccatggtatccagagagaagacctcatcctgagtcttcgcgctgtgctggcttctacaccacgatttgctgagtttctgctgcccctgttgattgagaaagtggattctgaggttctgagtgccaagttggattctctacagactctgaatgcttgctgtgctgtgtatggacagaaggaactgaaggacttcctccccagcctttgggcttctatccgcagagaggtgttccagacggcaagtgagcgggtggaggcagagggcctggcggccctccactccctgactgcgtgtttgtctcgctctgtgctgagggctgatgctgaggacctccttgactccttccttagcaacattctacaggactgcaggcaccacctgtgtgaaccggacatgaaactggtgtggcctagtgccaagctgttgcaggcagctgcaggtgcatctgcccgggcctgtgactctgtcaccagcaatgtactgcctttactgctggaacagttccacaagcacagtcagagcagccagcggcggacaatccttgaaatgctcctgggtttcttgaagctgcagcagaaatggagctatgaagacaaagatcaaaggcctctgaatggcttcaaggaccagctgtgctcactggtattcatggctctaacagaccccagcacccagcttcagcttgttggcatccgtacactgacagtcttgggtgcccagccagatctcctatcttatgaggacttggagctggcagtgggtcacctgtacagactgagcttcctgaaggaggattcccagagttgcagggtggcagcactggaagcatcaggaaccctggctgctctctaccctgtggccttcagcagccacctcgtacccaagctcgctgaggagctgcgtgtaggggagtcaaatttgactaacggagatgagcccacccaatgctcccggcatctgtgctgtctgcaagccttgtcagctgtatcaacacatcccagcatcgtcaaggagacactgcctctgctgctgcagcatctctggcaagtgaacagagggaatatggttgcacaatccagtgacgttattgctgtctgtcagagcctcagacagatggcagaaaaatgtcagcaggaccctgagagttgctggtatttccaccagacagctataccttgcctgcttgccttggctgtgcaggcctctatgccagagaaggagccctcagttctgagaaaagtactattggaggatgaggtgttggctgccatggtgtctgtcattggcactgctacaacccacctgagccctgagttagctgcccagagtgtgacacacattgtgcccctcttcttggatggcaacgtgtcctttctgcctgaaaacagcttcccgagcagattccagccattccaggatggctcctcagggcagaggcggctgattgcactgcttatggcctttgtctgctccctgcctcgaaatgtggaaatccctcagctgaaccaactcatgcgggagcttttggaactgagctgctgccacagctgccccttttcttccaccgctgctgccaagtgctttgcaggactcctcaacaagcaccctgcagggcagcagctggatgaattcctacagctagctgtggacaaagtggaggctggcctgggctctgggccctgtcgtagtcaggccttcactcttcttctctgggtaacaaaggccctagtgctcagataccatcctctcagctcctgccttacagcccggctcatgggcctcctgagtgacccagaattaggtccagcagcagctgatggcttctctctgctcatgtctgactgcactgatgtgctgactcgtgctggccatgccgaagtgcggatcatgttccgccagcggttcttcacagataatgtgcctgctttggtccagggcttccatgctgctccccaagatgtgaagccaaactacttgaagggtctttctcatgtacttaacaggctgcccaagcctgtactcttgccagagctgcccacgcttctttccttgctgctggaggccctgtcctgccctgactgtgtggtgcagctctccaccctcagctgccttcagcctcttctactggaagcaccccaagtcatgagtcttcacgtggacaccctcgtcaccaagtttctgaacctcagctctagcccttccatggctgtccggatcgccgcactgcagtgcatgcatgctctcactcgcctgcccacccctgtgctgctgccgtacaaaccacaggtgattcgggccttagccaaacccctggatgacaagaagagactggtgcgcaaggaagcagtgtcagccagaggggagtggtttctgttggggagccctggcagctgagccctcagtcctggcctagactgttctgacaatctaacctgggattactaactgttgagccatcttccccaaagcagggaaaccactggtctctgactgcctttcccacagacacagcacaaatgctaggcctctgttgcatggctgtacaaagaacataagagtccatatttctagtggatttgtaaaataagtgtgtgtgagacacttgcgtttgaagaaagatctagggtcctgggtctcttgcatttatatgtcagaaaaggggcgatatgctgctgaggggtgagtgcatatgagtgtggccctgaggaccagggctggcagatgttgtctacctgctgaagaataaagatttcttttggtaa

SEQ ID NO: 108126 - DNA, 3093 bp, Artificial Sequence
  derived and/or modified sequence
atggccgcagctgccgctgtcgaagctgccgcacccatgggtgcactctggggattagtgcatgatttcgttgtgggccaacaggaaggcccagccgaccaggtggccgctgatgtgaaatccggcaattacacagtgctgcaggtagtagaggccctcggctcttccctggagaacccagagccaagaacacgcgcaagggctatccagcttttgtcccaggtgctcctgcattgccataccttgttgctcgaaaaggaggtcgtgcaccttattctgttctatgagaacagacttaaagatcatcacttggtaatcccaagcgtgttacagggactgaaggcactctccctctgcgtggctctgccaccgggactggcagtaagcgttctcaaggccatcttccaggaagtccacgtgcagtctcttccgcaagtagacagacacacagtctacaacattatcaccaactttatgagaacaagggaagaggagcttaagtcattgggagccgacttcacattcgggtttatacaggtgatggacggtgaaaaagatccacgcaatctgctagtcgccttccgcatagtacacgatttaatttctcgagattacagcctgggaccgttcgtggaagagctgttcgaggtcactagctgctatttccctattgacttcacaccacctcctaacgatccccatggcattcagagagaggacctaatactgtcactcagagccgtgctggcttctactccgagattcgccgagtttctcctgccgctgcttatcgaaaaagtggattctgaagtcctgagtgccaaacttgacagcctgcagaccctcaacgcatgttgcgccgtctatgggcagaaagaactgaaggattttctccccagcttatgggcctcaattcgcagggaggtttttcagactgcctccgagcgagttgaagccgaaggcttagccgcactacactccttgaccgcatgcctgagccgttccgtgctgagggccgacgcagaggacctgcttgattctttcctctccaatatcctccaggactgccggcaccatctatgcgaacccgacatgaaacttgtgtggccttccgcgaagctgctccaggccgcagcgggagctagtgctcgggcatgcgactccgtcactagcaatgtcttacctttgctccttgagcagttccacaaacacagtcagagttcacagaggcgcacgatcctggagatgttactggggtttttgaaactgcagcagaaatggtcctacgaagataaagaccagaggcctcttaacggattcaaggaccagttgtgtagtctcgtgtttatggctctcaccgatccaagcactcaattacagttggtaggaatccgaaccctcactgtgcttggcgctcagccagatctacttagctacgaggaccttgaacttgcagtcggacacttataccgtttgagtttcctgaaggaagactcgcagagttgccgcgtggctgctctagaggccagcgggactcttgccgctctttatccggtagctttttcttcccatctggtgccaaagctggctgaagagctccgagtgggtgaatccaacctgacgaacggcgacgaacccacccagtgctccaggcacctgtgttgcttgcaggccctcagcgcagtaagtactcatccttcaattgtaaaggagactcttccattgctccttcagcatctgtggcaggtgaaccggggtaacatggttgctcaatcttctgatgtgattgcagtgtgccagagcctcagacagatggccgaaaagtgtcagcaggaccccgaatcctgctggtacttccatcagacagctatcccttgtttactcgccctcgccgtgcaagcctccatgcctgagaaggaaccttctgttttgcggaaagttcttctagaggatgaggtattagccgcaatggtgtctgtgatcgggaccgctaccactcatctcagcccagagctcgccgctcaaagtgtgactcacatcgttccgctgttcttggatgggaacgtgtcctttttacccgagaattctttcccctcccgctttcagccttttcaagatgggtcatctggacaaagaaggctgattgctctgctgatggcatttgtgtgttcgctcccccgtaatgtggaaatcccacagttgaatcaactgatgagagaactgctagagctcagctgctgccacagctgccccttcagttcaactgccgctgccaagtgtttcgcaggcctgttgaacaaacatcctgccggacaacagttagacgaatttttacagttagccgtggataaggtggaggcaggcttgggctccgggccttgccgttctcaggcgtttacactactcttgtgggtgaccaaggccctggtgctgaggtatcatcctttgtccagttgcctcaccgcccgtttaatgggccttctctccgatccggaactggggccagccgcagctgacggcttctctctgctgatgtccgattgtaccgacgtgctcactcgtgcaggccatgctgaagttcgcataatgttcagacagcggttcttcacagataatgtcccggcactggtgcaagggtttcatgcggctccacaggatgtgaaaccaaactatctaaagggactttcacacgtgctaaaccgcctgcccaagcctgttcttctccctgagctcccaacccttctgagtctccttctggaggcactgagttgtcctgattgcgtggttcaactgtcaaccctgtcatgtttgcagccactcctgctggaggcccctcaggtgatgagcctccacgtggacactctggtcaccaagtttctgaacctctcctcttcgccgagcatggcagttcgaatcgcagcgctgcaatgtatgcacgcgctgacgaggctccccacgcccgtgcttctgccgtacaagccacaggtgatacgagcccttgcaaaaccactcgacgataagaaacggctggtacgtaaggaggctgtctccgcacgaggggagtggttccttctagggagcccgggttcttag

SEQ ID NO: 108127 - DNA, 3030 bp, Artificial Sequence
  derived and/or modified sequence
atggccgcagctgcagctgtggaggccgcagccccaatgggggcattgtgggggctggtgcacgacttcgtggtgggccagcaggaagggcctgccgatcaggtggctgcgtctagcctggaaaaccccgaaccccgaaccagagcacgggcaatacagctgctgtcacaggtgctactgcactgtcataccctcttgcttgagaaagaagtagtgcacctgattctgttctatgagaaccgacttaaggaccatcatctggtcattccaagtgtgttgcaggggctcaaagccctgtctctgtgtgtggctctccccccaggtctggccgttagcgttctgaaagctatcttccaggaggtccacgtgcaggtggaccggcacacagtgtacaacatcattacaaactttatgcgcactcgggaagaagaactcaaatctctgggagccgatttcacgtttggattcattcaggtaatggacggggagaaggacccaaggaaccttctggttgcctttagaattgtgcacgaccttatttccagggactactccctgggcccattcgtcgaagagctcttcgaagtgacctcctgttatttccccatagattttactcccccacccaacgacccacacggtatacagcgagaggaccttatactcagtttgcgggctgtgctggcatctaccccacgctttgccgaatttctactgccattgctgatcgaaaaagtggatagtgaggttctgagtgctaagctggactctctgcagacacttaacgcttgctgcgcggtctatggacagaaggagctgaaggattttttaccctccttgtgggctagtatcaggagggaagtgtttcaaaccgcctcagaaagggtggaagccgaagggttggcagcccttcactccctgaccgcctgcctttcaagatctgtgctcagagcagacgcagaggacctcctggatagcttcttaagtaatatattgcaggattgccgccaccacctttgcgagcccgacatgaagctagtgtggccctcggccaagttgcttcaggcagcagcaggcgcatccgcacgcgcatgcgatagcgtgacttccaatgtcctcccgcttttgctcgagcaattccacaagcacagccagagtagccagcggaggaccatcctggaaatgctacttggttttctcaaactccagcagaagtggtcatatgaagacaaggatcagcgacctctgaacggatttaaggaccaactgtgttccctcgtcttcatggcactaactgaccccagcacccagctgcagctagtaggaattcgaaccttgaccgttctgggggcacagccagatctgctgtcctacgaggaccttgaactggccgtaggccacctctatcgcctgtctttcctgaaagaagactcccaatcttgcagagttgcagccctcgaggcttccggaactctggccgctttgtaccccgttgccttttcttctcatctggtgcctaaactggccgaagagcttcgcgtgggcgagagtaatctgaccaacggcgatgaacccacccaatgttcccggcatctgtgctgtctgcaggctctttccgcggtctcaacacaccctagcattgttaaggaaacactacctctgctcctgcagcacctgtggcaagtgaatcgtggcaatatggtggctcaaagcagcgacgtgatcgccgtttgccagtccctgcgacaaatggccgaaaaatgtcagcaagacccagagtcttgctggtatttccaccagaccgctatcccctgtttgctagcacttgccgtgcaagcctccatgcccgagaaggaacctagcgtcttaaggaaagtgctgctggaggacgaggtcctcgctgctatggtgtctgtgattggtacagccaccacgcatctctcacctgaacttgctgctcaaagcgtgactcacattgtccccttgttcctggacggtaacgtgagttttttgcctgaaaatagcttccccagtcggtttcaaccatttcaagacgggagctccggacagcgacgacttattgctttgcttatggccttcgtgtgtagtttgccacggaatgttgagattccccagctgaatcagcttatgagagaacttctcgaactttcctgctgccactcatgccccttctcatctactgctgcagccaagtgttttgccggactcctcaacaagcacccagccggacagcagctggatgaatttctgcagttagccgttgataaggtggaagcaggtctcggctccggcccatgcagaagccaggcatttactttgttactctgggtcaccaaggccctggtcctgaggtatcaccccttgtctagctgtctgaccgcacggctgatggggctgctgtccgaccccgaacttggccctgccgcagcagatgggttttccctcttaatgtccgattgcaccgacgtcctgacgagggcaggacacgcagaggtgcggataatgttccgccagagattctttaccgataacgtgcctgctctggtgcagggctttcatgctgcccctcaggacgtcaagcctaattatcttaagggactatcccatgtgctgaatcgcctgccaaagcctgtgctgctgcccgaactgccaacactactgtctctgctcttagaggctctgtcctgccccgattgcgtggttcaattaagtactttaagttgccttcagccgcttttgctggaggctccacaagtgatgtctctccatgtggacacccttgtcacaaaatttctgaacctgagctcctccccctcaatggctgtgaggattgcagcccttcaatgcatgcatgctctcactaggctgcccaccccagtcctcctcccatacaagccgcaggttatccgcgcattggctaagcctctcgatgataaaaagagactggtacggaaagaagcggtgtccgcccgaggcgaatggttcttactcgggagccccggaagctag

SEQ ID NO: 108128 - DNA, 3093 bp, Artificial Sequence
  derived and/or modified sequence
atggctgctgcagcagctgtcgaagccgctgctcctatgggcgctctttggggactcgtccacgatttcgtagtgggacaacaagagggacctgcagatcaggtggccgctgacgtgaagagtgggaattacaccgtactgcaggtggtcgaggcactgggctcctcacttgaaaatcctgagccgagaactcgtgccagggccattcaattactcagccaagtgctcctgcattgccatactctgttattagagaaggaggtggtacatctgatcctgttctacgagaaccggctgaaagatcaccatttagtcatcccaagtgtgctgcagggtctgaaagcactgagcctgtgcgtagcccttcctccaggacttgcagtgtctgtgctcaaggctattttccaggaggtgcatgttcagagtcttccccaggtggatcgccacacagtgtataacattattactaacttcatgcggacaagagaagaggaacttaaaagtctgggggcagacttcacttttggtttcattcaggtcatggatggcgagaaagatcccaggaaccttctcgtggcttttcgcattgtgcatgacctgatctctagggactacagtctcggacccttcgtcgaggagctgtttgaagtgaccagctgctacttccctatagatttcacccctccccctaacgatccacacggaattcaacgtgaggatctaatacttagccttagggctgtattggccagcacaccacgcttcgccgaatttctgctaccccttctgatcgagaaggtggacagcgaagtgctttcagccaaactggacagtttgcagacattaaacgcctgctgcgcagtctacggccaaaaagaactgaaggatttcttgccatccttatgggcctccatacgtagagaggtgttccaaacagcaagtgagcgcgtcgaggccgaagggctggccgcattacatagtctgactgcatgtctcagtagatccgttcttagagccgatgctgaggatctgctcgattccttcctgtccaacattctgcaagattgcagacatcacctgtgcgaacctgacatgaagctggtgtggccctccgccaagttgttgcaggcagctgcaggagcttctgccagggcctgtgactccgtgacgtcaaatgtcttgccactcctccttgaacaatttcacaagcattcacagtcctcacagcgcaggacgatcttggagatgctactaggatttctgaagctgcaacaaaaatggtcctacgaggataaggaccagcgaccactgaatggtttcaaggaccagctttgttctctcgtctttatggccctgacagaccccagcacccagctccagctggttggcatccgtactcttaccgtgctgggcgcacaacccgacctgctctcatacgaagatctcgagctagcggttggccatctttaccggctgagcttcctcaaagaggatagtcagagttgccgcgtggctgcactggaagccagtggcacactggccgcactgtatcccgtggccttctcgtcccatctggtgccaaagctggccgaggaactcagggttggagaaagcaacttgaccaacggagacgagccgacccagtgttcacggcatctgtgttgccttcaggccctgagtgcggtttctacccacccctcgattgtcaaggaaactctcccgctgctgctgcagcatctgtggcaggtgaacagaggcaatatggtggcccagtcatctgatgtgatcgccgtgtgccagtcattgcgccagatggctgagaaatgccaacaagacccagagtcatgctggtacttccaccagactgcgattccctgcttgctggccctcgctgtccaggcttcaatgcccgagaaagagccatccgtccttcggaaagtactgttggaagacgaagtcctggcagcaatggtgtccgtaattggcaccgcaacaactcacctttccccagaactggcagcccagagtgttacgcacattgtgccgttgttcctcgatgggaatgtgagttttctaccagaaaacagcttcccgagcagatttcagccatttcaagatgggtcctccggccagcgcaggctgatcgcactgttgatggcttttgtgtgctcgctcccacgaaatgtggaaataccacagctcaaccagctgatgcgggaactcctggaattgtcttgctgtcactcgtgccctttcagttcaaccgctgctgctaagtgtttcgccggtcttctgaacaaacatcccgcaggccagcagctcgatgaatttctacagctcgctgtggacaaagtcgaggcagggctaggctccggtccgtgcaggtcacaagcctttactctcctgttgtgggtaactaaggccctggtcctcagataccaccccctgagttcctgcctcacagcaagacttatgggtctccttagcgatcccgaactgggccctgcagctgcggacggctttagtctcctcatgagcgactgcaccgatgtcctgactagggccggacacgcagaagtaaggattatgtttagacaaaggtttttcacagacaacgtgccggctttggtgcagggtttccacgcagctcctcaggatgttaaaccaaattacctgaagggtttatctcatgtactgaaccgactgccgaagcccgtgctgctacctgagttacctacactgctcagcctgcttctagaggctctgtcatgtccagattgcgtggtgcagctgagtactctcagctgcctgcagccattattgctcgaagctcctcaggtgatgtcccttcacgtcgacaccctggttacgaagttcctgaacttgtccagttcgccatctatggccgtgcgaattgctgctctgcaatgtatgcatgctctgacccggctgccaactccagtgcttttaccctacaagccgcaggtcataagggcgctggcaaaacctctggatgataagaaacgcctggtaaggaaagaggctgtgtccgccagaggggagtggttccttctgggtagtcccggaagttag

SEQ ID NO: 108129 - DNA, 1710 bp, Artificial Sequence
  derived and/or modified sequence
atgagcttcggcatcctgaagcccgacctgagaatcgtgttcgtgcacaacaaggccgtgatctggcagaagagcagagtgagcgaccacaagatggccctgatgagcgtgctgggcaccgccgtgatgaacaacatggagagcttccagtaccacagcgaggagagccagatctacctgagcggcttcctgcccaagtgcgacgccgaccacagcttcaccagcctgagcacccccgagagaagcttcatcttcatcaacagcagacccgtgcaccagaaggacatcctgaagctgatcagacaccactacaacctgaagtgcctgaaggagagcaccagactgtaccccgtgttcttcctgaagatcgacgtgcccaccgccgacgtggacgtgaacctgacccccgacaagagccaggtgctgctgcagaacaaggagagcgtgctgatcgccctggagaacctgatgaccacctgctacggccccctgcccagcaccaacagctacgagaacaacaagaccgacgtgagcgccgccgacatcgtgctgagcaagaccgccgagaccgacgtgctgttcaacaaggtggagagcagcggcaagaactacagcaacgtggacaccagcgtgatccccttccagaacgacatgcacaacgacgagagcggcaagaacaccgacgactgcctgaaccaccagatcagcatcggcgacttcggctacggccactgcagcagcgagatcagcaacatcgacaagaacaccaagaacgccttccaggacatcagcatgagcaacgtgagctgggagaacagccagaccgagtacagcaagacctgcttcatcagcagcgtgaagcacacccagagcgagaacggcaacaaggaccacatcgacgagagcggcgagaacgaggaggaggccggcctggagaacagcagcgagatcagcgccgacgagtggagcagaggcaacatcctgaagaacagcgtgggcgagaacatcgagcccgtgaagatcctggtgcccgagaagagcctgccctgcaaggtgagcaacaacaactaccccatccccgagcagatgaacctgaacgaggacagctgcaacaagaagagcaacgtgatcgacaacaagagcggcaaggtgaccgcctacgacctgctgagcaacagagtgatcaagaagcccatgagcgccagcgccctgttcgtgcaggaccacagaccccagttcctgatcgagaaccccaagaccagcctggaggacgccaccctgcagatcgaggagctgtggaagaccctgagcgaggaggagaagctgaagtacgaggagaaggccaccaaggacctggagagatacaacagccagatgaagagagccatcgagcaggagagccagatgagcctgaaggacggcagaaagaagatcaagcccaccagcgcctggaacctggcccagaagcacaagctgaagaccagcctgagcaaccagcccaagctggacgagctgctgcagagccagatcgagaagagaagaagccagaacatcaagatggtgcagatccccttcagcatgaagaacctgaagatcaacttcaagaagcagaacaaggtggacctggaggagaaggacgagccctgcctgatccacaacctgagattccccgacgcctggctgatgaccagcaagaccgagagcttctag

SEQ ID NO: 108130 - DNA, 2271 bp, Artificial Sequence
  derived and/or modified sequence
atgagcttcggcatcctgaagcccgacctgagaatcgtgttcgtgcacaacaaggccgtgatctggcagaagagcagagtgagcgaccacaagatggccctgatgagcgtgctgggcaccgccgtgatgaacaacatggagagcttccagtaccacagcgaggagagccagatctacctgagcggcttcctgcccaagtgcgacgccgaccacagcttcaccagcctgagcacccccgagagaagcttcatcttcatcaacagcagacccgtgcaccagaaggacatcctgaagctgatcagacaccactacaacctgaagtgcctgaaggagagcaccagactgtaccccgtgttcttcctgaagatcgacgtgcccaccgccgacgtggacgtgaacctgacccccgacaagagccaggtgctgctgcagaacaaggagagcgtgctgatcgccctggagaacctgatgaccacctgctacggccccctgcccagcaccaacagctacgagaacaacaagaccgacgtgagcgccgccgacatcgtgctgagcaagaccgccgagaccgacgtgctgttcaacaaggtggagagcagcggcaagaactacagcaacgtggacaccagcgtgatccccttccagaacgacatgcacaacgacgagagcggcaagaacaccgacgactgcctgaaccaccagatcagcatcggcgacttcggctacggccactgcagcagcgagatcagcaacatcgacaagaacaccaagaacgccttccaggacatcagcatgagcaacgtgagctgggagaacagccagaccgagtacagcaagacctgcttcatcagcagcgtgaagcacacccagagcgagaacggcaacaaggaccacatcgacgagagcggcgagaacgaggaggaggccggcctggagaacagcagcgagatcagcgccgacgagtggagcagaggcaacatcctgaagaacagcgtgggcgagaacatcgagcccgtgaagatcctggtgcccgagaagagcctgccctgcaaggtgagcaacaacaactaccccatccccgagcagatgaacctgaacgaggacagctgcaacaagaagagcaacgtgatcgacaacaagagcggcaaggtgaccgcctacgacctgctgagcaacagagtgatcaagaagcccatgagcgccagcgccctgttcgtgcaggaccacagaccccagttcctgatcgagaaccccaagaccagcctggaggacgccaccctgcagatcgaggagctgtggaagaccctgagcgaggaggagaagctgaagtacgaggagaaggccaccaaggacctggagagatacaacagccagatgaagagagccatcgagcaggagagccagatgagcctgaaggacggcagaaagaagatcaagcccaccagcgcctggaacctggcccagaagcacaagctgaagaccagcctgagcaaccagcccaagctggacgagctgctgcagagccagatcgagaagagaagaagccagaacatcaagatggtgcagatccccttcagcatgaagaacctgaagatcaacttcaagaagcagaacaaggtggacctggaggagaaggacgagccctgcctgatccacaacctgagattccccgacgcctggctgatgaccagcaagaccgaggtgatgctgctgaacccctacagagtggaggaggccctgctgttcaagagactgctggagaaccacaagctgcccgccgagcccctggagaagcccatcatgctgaccgagagcctgttcaacggcagccactacctggacgtgctgtacaagatgaccgccgacgaccagagatacagcggcagcacctacctgagcgaccccagactgaccgccaacggcttcaagatcaagctgatccccggcgtgagcatcaccgagaactacctggagatcgagggcatggccaactgcctgcccttctacggcgtggccgacctgaaggagatcctgaacgccatcctgaacagaaacgccaaggaggtgtacgagtgcagacccagaaaggtgatcagctacctggagggcgaggccgtgagactgagcagacagctgcccatgtacctgagcaaggaggacatccaggacatcatctacagaatgaagcaccagttcggcaacgagatcaaggagtgcgtgcacggcagacccttcttccaccacctgacctacctgcccgagaccacctag

SEQ ID NO: 108131 - DNA, 1710 bp, Artificial Sequence
  derived and/or modified sequence
atgtcgttcggaatcctcaagcccgacctgcgcattgtgttcgtccacaataaggcggtcatttggcaaaagtcccgggtgtctgatcacaaaatggctctcatgtccgttctgggcaccgccgttatgaacaatatggaaagtttccagtaccactctgaagagagccaaatctatctgagcggctttctgccaaaatgtgacgcagaccacagctttaccagtctgtccaccccagagcgcagctttatctttattaatagtaggcccgtgcaccagaaggacattctcaaactcattcgccaccactacaatcttaagtgcttaaaggaatcaactcggctctaccccgtgttcttcctgaagatcgatgtgcccaccgcagacgtggacgtaaatctgacgcccgataagagtcaagtgctgttgcaaaacaaggaatctgtcctcattgctctggagaatctgatgactacctgctacggacccctgcctagcacaaattcttacgaaaataataagaccgacgtgagtgctgcggatattgtcctgtccaagactgccgaaaccgatgtgttgttcaacaaagtggagtcttcgggaaagaattattctaatgtagacacttctgtgataccttttcaaaacgacatgcacaacgacgagagtgggaagaacacggacgactgtctgaaccaccaaatttccattggcgatttcggctacggccactgctccagtgagatttctaacattgacaaaaataccaaaaatgcatttcaggacataagcatgagcaatgtctcttgggaaaattcccagaccgagtacagcaagacctgtttcatctcctccgttaagcatacccagtccgagaacggaaataaggaccacatcgacgagagcggggaaaatgaagaagaagccgggctggaaaacagctctgagattagcgccgatgaatggtcgagagggaatattctcaaaaattcagtgggagaaaacattgaacccgttaagatcctggtgcccgagaaatcccttccctgcaaagtcagcaacaataattatccgatccccgagcagatgaatctaaacgaggacagttgtaacaagaagagcaatgtgatcgataacaagtccggcaaggtgaccgcctacgacttgctgagcaatcgtgtgatcaagaagcccatgagcgcttctgcactctttgtgcaagaccacagaccacagttcctgattgagaacccaaaaacctccctggaagatgccacccttcagattgaggagctatggaagacgctctccgaagaggagaaactgaaatatgaggaaaaggccaccaaagacttggaaagatacaattcacagatgaagagggcaatcgaacaggagtctcagatgagtctaaaagacggccgcaaaaaaattaaaccgacatcagcttggaatctggcgcagaaacataaattgaaaacctcactgtcaaatcagcccaaattggatgagctcctacagtcccagatcgaaaaacgcaggagtcagaatatcaagatggttcagattccattttctatgaaaaatctcaagattaacttcaagaagcagaataaggtggacttagaagaaaaagacgagccatgcctaattcacaacttgaggtttcccgatgcttggttaatgacctcaaagacagaatctttttag

SEQ ID NO: 108132 - DNA, 2271 bp, Artificial Sequence
  derived and/or modified sequence
atgtcctttggcattttgaaacccgatttacggatcgtctttgtacacaataaagccgtgatctggcagaaatctcgcgtgtctgaccataagatggctttaatgagtgtgctcggtactgccgtgatgaacaacatggaaagcttccagtatcacagtgaagaatcacagatctacttaagtggattcctgcctaagtgtgacgcggaccattcctttaccagcctctctacccctgagcgaagctttattttcattaactcacggcctgtgcaccagaaggatatactcaagctaatacgccaccattataaccttaagtgccttaaagaaagcacccgcctgtatcccgtgttcttcctgaagatcgacgtacctaccgctgacgtggatgtcaatctgactcctgacaaatcacaagtgttgctgcagaacaaagaatcagtgctgattgccctcgagaatctgatgacaacctgctacggtccattaccgtccactaatagctacgagaacaacaagacggatgtgtccgccgccgatattgtgctgagcaaaactgccgaaactgatgttctattcaataaagtggagagctcagggaaaaattactccaacgtggatacctctgtcatcccattccagaacgatatgcacaatgatgaatcagggaaaaacactgacgactgcctgaaccatcagatatcgatcggagatttcggttatggccattgctcaagtgaaatctctaatatcgacaaaaacaccaagaacgccttccaggatatttccatgagcaacgtctcctgggaaaacagccaaacagagtactccaagacctgttttatctcatccgtgaaacatacacagtcagagaacggtaacaaagaccacattgacgaatctggcgagaacgaagaagaagccggactggaaaacagcagcgagattagcgcggacgaatggagtaggggcaacattctaaagaactcagtgggggagaatatcgaacctgtgaagatactggtgcccgaaaaatccctgccctgcaaggtgtccaataacaattacccaatcccggagcagatgaacctcaacgaagatagttgtaacaaaaaatccaatgtcattgataataaaagtgggaaggtgactgcttacgatttgctgtccaacagagtgatcaagaagccaatgagtgcaagtgccctgtttgtgcaggaccacagaccccagttccttattgaaaatcccaagacttcactcgaggacgcaacattgcagattgaagaactgtggaagacactgagcgaagaggaaaagctcaaatatgaggagaaagcaactaaggacctcgagcgttacaacagccaaatgaaaagggcaatcgagcaagagtcacagatgtcgctgaaagatggccgaaagaagattaagcctacctcggcttggaatctcgcccagaaacacaagctgaagactagcctaagtaatcagccaaaattggatgaactgctacagtcccagatagagaagaggcgatctcagaatattaaaatggtgcagattcctttctctatgaagaaccttaagatcaattttaaaaaacagaataaggtcgacttggaggagaaagacgaaccgtgtcttattcataacttgcgcttcccagatgcatggcttatgacctccaaaacagaggtgatgctgttaaacccctatcgcgtcgaagaagccctattgtttaagcggctgctggaaaaccacaagttgcccgcggagccactggagaaaccgataatgctcactgagtccttatttaatggctcccattacctagatgtgctgtataaaatgacagctgatgatcagcggtatagcggcagcacgtacctgagtgacccaaggcttactgcaaacggattcaaaataaaactcatccccggcgtatcaataaccgaaaactacctggagatcgaaggcatggcaaattgcctccctttctacggagtggccgacctcaaggagatcctgaatgccatactcaacagaaatgccaaggaggtctatgaatgtagaccacgcaaggtcatcagctatctcgaaggggaagctgtacgcctgagccggcagctgcccatgtacctgtccaaggaggacattcaggacataatctaccgaatgaagcatcagtttggcaatgagattaaggagtgtgtccatggtcgccccttcttccaccatctcacgtatttgcctgaaacgacatag

SEQ ID NO: 108133 - DNA, 2271 bp, Artificial Sequence
  derived and/or modified sequence
atgtctttcggcatcctgaagcccgacttgcgcatcgtcttcgtccacaacaaagccgtgatttggcagaaatcacgtgtcagcgaccacaagatggcgttgatgagtgtgctgggcaccgccgtcatgaataatatggaatccttccaataccattctgaggaatcgcagatttacttgtctggctttttaccaaagtgtgacgcagaccacagctttacatctctgtccaccccagagcgatccttcattttcattaactctcgccccgttcatcagaaagatatcctgaagctgattcgccatcactataatctaaagtgtttaaaagagtcgactcgactgtacccggtgttcttcctgaagatcgatgttccgactgccgacgtggatgtaaacttaacccccgataaatcacaggtgcttctacagaacaaagagtccgtcctgatcgccctggaaaacttgatgaccacatgctacggacctcttcctagcactaattcttatgagaataataaaacagacgtttccgcggccgacatagtgttgtcaaagactgcagagactgatgtcttattcaacaaagttgaaagtagtggaaaaaactattccaatgtggatacaagcgtgattccatttcagaacgacatgcataatgacgagagtggtaagaataccgacgactgcctgaatcatcagatttcaatcggtgacttcggctatggccactgttcatcagagatcagcaacatcgacaagaacacaaaaaacgccttccaagatatttctatgtcaaatgtgagctgggagaactcgcagacagaatactccaagacctgcttcatttcaagtgtgaaacacacccagagcgagaatggcaataaggatcatatcgacgagtctggcgagaacgaggaagaagctggcctggaaaatagtagcgaaattagtgcagatgaatggtccaggggaaacatcctgaaaaatagcgtgggggagaacatcgaacctgtaaaaatcctggtacccgaaaaatcactcccatgcaaagtgagtaataacaactaccctatccctgagcagatgaacctaaatgaagactcttgcaataagaagtctaatgtcattgacaacaagagcggtaaggtgactgcttatgatctgctgagcaacagagtgataaagaagcctatgtcagcaagtgctctgttcgtccaggatcacaggcctcagttcctgattgagaacccgaaaacaagtttggaagatgctaccttgcaaatcgaagagttatggaaaaccctttcagaggaagagaagttgaaatacgaagaaaaggcaacaaaggacctggagaggtacaattcccagatgaagcgcgcaatcgaacaggagtctcagatgagtctcaaagatggcaggaaaaaaataaaacccacctcggcctggaacctcgcccaaaagcacaagctcaagacctctttgagtaaccagcccaagttagatgaacttctgcagtcgcagatagagaagaggcgcagccaaaatattaaaatggtacagattcccttttctatgaagaatttgaagatcaactttaagaagcaaaataaagtggatcttgaggaaaaggacgagccttgcctgattcataatttgagatttccagatgcttggttgatgacatcgaaaacagaagtcatgcttcttaacccatacagggtggaggaagctctgctgtttaaaaggctgttggagaatcacaagctgcctgccgagccactggagaaacccatcatgcttacagagtccttatttaatggatcccactatctcgatgtgctatacaagatgaccgcggacgaccaacgatatagcggttccacatacttgtccgatccccgcctgaccgcaaatggcttcaagatcaagctcatcccgggcgtctccatcactgagaactacctcgaaatcgaagggatggcaaactgtctgcctttttacggagtggccgacctgaaagagattctgaatgccatactgaatcgaaatgcgaaggaggtatatgagtgtcgcccacgaaaggttattagctacctggagggggaagccgtcagactgtccagacagttgcccatgtatctgagcaaggaggatatccaggacatcatttatagaatgaagcatcagttcgggaatgagattaaagaatgcgtacatgggcgtcccttctttcaccacctcacctacctgccagaaaccacgtag

SEQ ID NO: 108134 - DNA, 1710 bp, Artificial Sequence
  derived and/or modified sequence
atgagctttggcatcctgaagccagacctgcgcatcgtgtttgtgcacaacaaggctgtgatctggcagaagagccgggtgtctgaccacaagatggccctgatgtctgtgctgggcacagctgtgatgaacaacatggagagcttccagtaccacagcgaggagagccagatctacctgagcggcttcctgcccaagtgtgatgctgaccacagcttcaccagcctgagcaccccagagaggagcttcatcttcatcaacagcaggcctgtgcaccagaaggacatcctgaagctgatccgccaccactacaacctgaagtgcctgaaggagagcacccggctgtaccctgtgttcttcctgaagattgatgtgcccacagcagatgtggatgtgaacctgaccccagacaagagccaggtgctgctgcagaacaaggagagcgtgctgattgccctggagaacctgatgaccacctgctacggccccctgcccagcaccaacagctatgagaacaacaagacagatgtgtctgctgctgacatcgtgctgagcaagacagctgagacagatgtgctcttcaacaaggtggagagcagcggcaagaactacagcaatgtggacaccagcgtcatccccttccagaatgacatgcacaatgatgaaagtggcaagaacacagatgactgcctgaaccaccagatcagcattggagactttggctacggccactgcagcagcgagatcagcaacatcgacaagaacaccaagaatgccttccaggacatctccatgagcaatgtgtcctgggagaacagccagacagagtacagcaagacctgcttcatcagctctgtgaagcacacccagagtgaaaatggaaacaaggaccacattgatgagagcggggagaatgaggaggaggccggcctggagaacagcagcgagatctctgcagatgagtggagccggggcaacatcctgaagaacagcgtgggggagaacatcgagcctgtgaagatcctggtgcctgagaagagcctgccctgcaaggtgagcaacaacaactaccccatccctgagcagatgaacctgaatgaagacagctgcaacaagaagagcaatgtgattgacaacaagagcggcaaggtgacagcctatgacctgctgagcaacagagtcatcaagaagcccatgtctgccagcgccctgtttgtgcaggaccaccggccccagttcctgattgagaaccccaagaccagcctggaggatgccaccctgcagatcgaggagctgtggaagaccctgtctgaggaggagaagctgaagtatgaggagaaggccaccaaggacctggagcgctacaacagccagatgaagagggccatcgagcaggagagccagatgagcctgaaggatggcaggaagaagatcaagcccaccagcgcctggaacctggcccagaagcacaagctgaagaccagcctgagcaaccagcccaagctggatgagctgctgcagagccagatcgagaagagaagaagccagaacatcaagatggtgcagatccccttctccatgaagaacctgaagatcaacttcaagaagcagaacaaggtggacctggaggagaaggatgagccctgcctgatccacaacctgcgcttcccagatgcctggctgatgaccagcaagacagagagcttctag

SEQ ID NO: 108135 - DNA, 2271 bp, Artificial Sequence
  derived and/or modified sequence
atgagctttggcatcctgaagccagacctgcgcatcgtgtttgtgcacaacaaggctgtgatctggcagaagagccgggtgtctgaccacaagatggccctgatgtctgtgctgggcacagctgtgatgaacaacatggagagcttccagtaccacagcgaggagagccagatctacctgagcggcttcctgcccaagtgtgatgctgaccacagcttcaccagcctgagcaccccagagaggagcttcatcttcatcaacagcaggcctgtgcaccagaaggacatcctgaagctgatccgccaccactacaacctgaagtgcctgaaggagagcacccggctgtaccctgtgttcttcctgaagattgatgtgcccacagcagatgtggatgtgaacctgaccccagacaagagccaggtgctgctgcagaacaaggagagcgtgctgattgccctggagaacctgatgaccacctgctacggccccctgcccagcaccaacagctatgagaacaacaagacagatgtgtctgctgctgacatcgtgctgagcaagacagctgagacagatgtgctcttcaacaaggtggagagcagcggcaagaactacagcaatgtggacaccagcgtcatccccttccagaatgacatgcacaatgatgaaagtggcaagaacacagatgactgcctgaaccaccagatcagcattggagactttggctacggccactgcagcagcgagatcagcaacatcgacaagaacaccaagaatgccttccaggacatctccatgagcaatgtgtcctgggagaacagccagacagagtacagcaagacctgcttcatcagctctgtgaagcacacccagagtgaaaatggaaacaaggaccacattgatgagagcggggagaatgaggaggaggccggcctggagaacagcagcgagatctctgcagatgagtggagccggggcaacatcctgaagaacagcgtgggggagaacatcgagcctgtgaagatcctggtgcctgagaagagcctgccctgcaaggtgagcaacaacaactaccccatccctgagcagatgaacctgaatgaagacagctgcaacaagaagagcaatgtgattgacaacaagagcggcaaggtgacagcctatgacctgctgagcaacagagtcatcaagaagcccatgtctgccagcgccctgtttgtgcaggaccaccggccccagttcctgattgagaaccccaagaccagcctggaggatgccaccctgcagatcgaggagctgtggaagaccctgtctgaggaggagaagctgaagtatgaggagaaggccaccaaggacctggagcgctacaacagccagatgaagagggccatcgagcaggagagccagatgagcctgaaggatggcaggaagaagatcaagcccaccagcgcctggaacctggcccagaagcacaagctgaagaccagcctgagcaaccagcccaagctggatgagctgctgcagagccagatcgagaagagaagaagccagaacatcaagatggtgcagatccccttctccatgaagaacctgaagatcaacttcaagaagcagaacaaggtggacctggaggagaaggatgagccctgcctgatccacaacctgcgcttcccagatgcctggctgatgaccagcaagacagaggtgatgctgctgaacccctacagagtggaggaggccctgctcttcaagaggctgctggagaaccacaagctgcctgctgagcccctggagaagcccatcatgctgacagagagcctcttcaacggcagccactacctggatgtgctgtacaagatgacagcagatgaccagcgctacagcggcagcacctacctgagtgacccccggctgacagccaacggcttcaagatcaagctgatccctggggtgtccatcacagagaactacctggagattgagggcatggccaactgcctgcccttctatggagtggccgacctgaaggagatcctgaatgccatcctgaacagaaatgccaaggaggtgtatgaatgtcggcccaggaaggtgatctcctacctggagggggaggccgtgcggctgagccggcagctgcccatgtacctgagcaaagaagacatccaggacatcatctacaggatgaagcaccagtttggaaatgagatcaaggaatgtgtgcacggccggcccttcttccaccacctgacctacctgcctgagaccacctag

SEQ ID NO: 108136 - DNA, 1710 bp, Artificial Sequence
  derived and/or modified sequence
atgagcttcggcatcctgaagcccgacctgcggatcgtgttcgtgcacaacaaggcagtgatttggcagaaaagccgtgtctctgatcacaagatggcgcttatgagcgtgttgggaactgcagtgatgaacaatatggagtccttccagtatcactctgaagaatcacagatttacctttccggttttctcccaaagtgcgacgcagaccactcatttacctcacttagtacccctgaaaggtcctttatcttcattaatagtagaccggttcatcagaaagacattctgaagcttattcggcaccattataacctgaagtgtcttaaagagtccacaaggctgtatccagtgttcttcctcaagattgatgtgcccaccgctgatgtggacgtgaatctcacacccgataaatcccaggtgctgctgcaaaataaggagtctgtcctgattgccttagaaaacttgatgacaacatgttacggaccgttgccctcgacaaacagctacgaaaataataagaccgatgtctcggccgccgatattgtgctgagtaaaaccgcagaaaccgacgtgctgtttaataaggttgagagtagcggcaaaaactactcaaacgttgatacctctgttataccttttcagaacgacatgcataatgacgaaagtggtaaaaacacagatgactgccttaaccatcagatctctattggagacttcgggtacgggcactgctcctcagagattagcaacatagataagaacacgaagaatgcatttcaggacatatccatgtccaacgtttcatgggagaactcccagactgaatactccaagacatgctttattagctccgtcaagcacacgcagtccgagaatggaaataaggatcacatcgatgaatccggcgagaatgaagaggaagccggactcgagaatagttcagaaatcagtgcagatgaatggtcgcgtggaaacatcttgaagaattccgtcggtgagaacattgagccagtgaaaattctggtgcccgaaaagtcactgccctgtaaagtcagcaataacaactaccctatccccgagcagatgaacctgaacgaggatagctgcaataagaaatctaacgtaatagataataaatcgggtaaagtgaccgcctatgaccttctgtccaatagggtgatcaaaaagccaatgtccgcaagtgcactgttcgtgcaggaccatagaccacagtttctgatcgaaaaccctaaaacatccctggaagatgccactttgcagatcgaggagctgtggaagacactcagtgaggaggagaaactcaagtacgaggaaaaggctacaaaagatctggagcgatacaattctcaaatgaaaagggctatcgagcaagagagtcaaatgtcactgaaggacggaaggaaaaagatcaagcccacctcagcttggaacctcgcccaaaaacacaagcttaaaacctccttaagcaatcagcctaagctagacgagctgctgcagtctcagatcgaaaagaggaggagccagaatattaagatggtgcagattccgttctccatgaagaatctgaagatcaatttcaaaaagcaaaataaagttgatctagaggagaaggatgaaccttgcttgatccataaccttcgcttcccagatgcctggctgatgacctctaagaccgaaagcttctag

SEQ ID NO: 108137 - DNA, 2271 bp, Artificial Sequence
  derived and/or modified sequence
atgagcttcggcatcctgaagcccgacctgcggatcgtgttcgtgcacaacaaagcagtgatttggcaaaagtcacgagtgtccgaccataaaatggctctgatgagtgtcttaggaacggccgtgatgaataacatggagtcttttcaatatcatagcgaagaaagccagatctacctcagcgggtttttgcctaagtgcgacgccgaccacagcttcaccagcctgagcacgcctgaacgtagcttcatatttatcaattcaagacccgtgcaccagaaggatatccttaagctgattcgccaccattacaatctgaagtgcctgaaggaaagcactagactttaccctgtcttctttcttaaaatcgacgtcccaacagctgatgtagatgtgaacttgacaccggataaaagtcaagtgctactccagaacaaagagagtgtgcttatcgctctagaaaatctgatgacaacgtgctatggccccctcccaagtacaaatagctacgaaaacaataagaccgacgtatctgcagcggacatagtgctgagtaagaccgccgaaactgacgtgctgtttaataaggtggaatcatctggcaaaaactattcaaacgtcgatacaagtgtgattcctttccagaatgacatgcataacgatgagagcgggaagaacactgatgattgcttgaatcaccagataagtattggcgattttggctacggtcattgcagctctgaaatctcaaacattgataagaataccaagaacgcatttcaagatatcagtatgtcaaacgtgtcgtgggaaaacagccagaccgaatattccaagacatgtttcatcagtagcgtcaagcatacccagtccgagaatggtaacaaagaccacatcgatgaaagtggagagaacgaggaagaagctggcctggagaactcctctgagatcagcgccgacgaatggtctcggggtaacatcctgaaaaatagcgttggcgaaaacatcgaacccgtaaagattttggtaccggaaaaatccttgccttgtaaagtgagtaacaacaactaccctattcctgaacagatgaatcttaatgaggattcctgtaacaagaagtcaaacgtgatagataacaaatccggaaaggtaacggcctatgatctgctctccaatcgcgttataaaaaagcccatgtcagcgtccgctctgtttgtgcaggaccatcgtcctcaatttctgattgagaacccgaagacttctttagaggatgccactcttcagatagaagagttgtggaagactttgagtgaggaggagaaactgaaatatgaggagaaggccacaaaggatcttgaaaggtataacagccagatgaagagagcaatcgaacaggaaagtcagatgagccttaaggacggacggaagaagattaagccaacgagcgcatggaacttggcccaaaagcacaaactgaagacaagcctgagtaatcagccaaaactcgacgaattgctgcagagtcagattgaaaagcgaaggtctcagaatattaaaatggtgcagatccccttttctatgaaaaatttaaaaattaactttaagaagcagaataaagtggacctcgaagagaaggatgagccgtgtctgatacacaacctgagattccctgatgcgtggctgatgacatcgaagaccgaagtgatgcttctgaatccttatcgtgttgaggaagctctcttgttcaaaaggctgctcgagaatcacaagctccccgctgaaccactggagaagcccattatgctgaccgagtcccttttcaacggctcccattatctggatgtactttacaagatgacggccgacgaccagcgatatagtggtagtacgtacttgtcagatccacggttaaccgctaatggattcaagattaaattaattcctggggtgtccataacggaaaattaccttgagatcgaaggcatggcgaactgtcttcccttttacggggtggctgacttgaaggagatcctgaatgccatcctgaatagaaacgcgaaagaggtgtatgagtgtcgtcctcgtaaggtcataagctatctggagggcgaggctgtgaggctcagcaggcaactccccatgtacctctccaaggaagatatccaggatatcatttatagaatgaagcaccaatttggcaacgagattaaggaatgcgtgcatggcaggcctttcttccatcatttgacatacctgcccgagactacatag

SEQ ID NO: 108138 - DNA, 2271 bp, Artificial Sequence
  derived and/or modified sequence
atgagcttcggcatcctgaagcccgacctgcggatcgtgttcgtgcataataaggccgtgatctggcagaaaagcagagtgtccgatcacaagatggccctgatgtctgttctgggcacggccgtcatgaacaatatggagagctttcagtaccactctgaggagagccagatatatctgtctggtttcttgcctaagtgtgatgccgatcacagctttacctccttatcgactcctgagaggtcttttatattcataaattccaggccagtgcaccagaaggacattcttaagcttatccgtcaccactataatctgaagtgtctgaaagagtccacacgtctgtaccccgttttcttcctgaagatcgatgtgccgactgcagatgtagatgtgaatctgacccccgacaaatctcaggtgttgttacaaaataaagagagtgtgctcatcgctttggagaacttgatgacaacctgctacgggcctctgccatcaaccaactcgtatgagaataacaagaccgacgtgagcgccgctgatatagtcctgagtaagaccgctgagacagacgtcctgttcaacaaagtagagtcgagcggcaagaattactcaaatgtggatacgtcagttatcccgtttcagaacgacatgcacaatgatgaatctggaaagaatactgatgattgcctgaaccatcagattagcataggagactttggatacggtcattgttcatctgaaatcagcaatatcgacaagaataccaagaacgcctttcaagatatttccatgtctaatgtcagctgggagaactcacaaaccgagtattccaaaacatgtttcatttcatctgtaaagcacacccagtccgaaaatggaaataaagatcacattgacgaatccggagagaatgaggaagaggccggactggagaatagctcggaaatatccgccgacgaatggtcccgaggtaatatcctcaaaaacagcgtgggtgagaatattgaacccgtgaagatcctggtccccgaaaagtcactcccatgtaaagtttctaataataactacccaatccccgagcagatgaacctgaacgaagattcctgcaacaaaaagagtaatgttatcgataataaaagcggaaaagttaccgcttacgatctcctgtccaatagagtaataaagaagcctatgtccgcctccgccctttttgtgcaggatcatcgcccgcagttcctgattgaaaaccccaagacttcccttgaggacgccactctgcaaattgaagaactttggaaaacactgtcagaggaggagaagcttaagtatgaggaaaaggctactaaggacctcgaaagatataattcccagatgaagcgggcaatagagcaggagagccagatgtctttaaaagacggccgaaagaagattaagcctacaagcgcgtggaatcttgcccagaaacataagctgaagacttcgctgagtaatcaacctaagctggacgagctcctgcagtcacagattgagaaaagacggagccagaacatcaaaatggtccaaatcccattcagcatgaaaaacctgaagattaacttcaagaaacagaacaaggtggacctcgaagagaaggatgagccttgtctgatccacaacctgcgcttcccagatgcgtggttgatgacatctaagacagaagtaatgctcctgaatccttatcgggtcgaggaagcactactgttcaaaaggctgttggagaaccataagcttcccgccgagccccttgaaaaaccaatcatgttgacggaatctttgtttaatggaagtcactacctagatgtcctttacaaaatgactgctgatgaccagagatatagtggcagtacatatctttccgacccccgcctaaccgctaatgggtttaaaattaaactgatccctggcgttagtatcacagagaattatttggaaattgagggaatggccaactgcttaccattttacggagttgcagatctaaaagaaattctaaacgcaattcttaatcgcaatgctaaggaggtttacgagtgccgtcctcgtaaagtcatttcctacctggagggagaggccgtgcggctctctagacagttacctatgtacctttctaaggaagacatccaagacattatttaccgaatgaagcaccagttcggcaacgagataaaagagtgtgtacacggacgccccttctttcaccacctcacttacctgcccgagacaacttag

SEQ ID NO: 108139 - DNA, 1710 bp, Artificial Sequence
  derived and/or modified sequence
atgtctttcggcatccttaaaccagacttgcgtattgtgttcgttcacaacaaagcggtcatttggcagaagtcccgggtctcagatcataaaatggctctgatgtccgtcctgggcaccgcagtgatgaacaatatggagagcttccaatatcactctgaggagagtcagatctacctgagtggttttttgcctaaatgtgatgcggaccactcctttacgtctctgtctactcccgagagaagtttcatattcatcaattctagacctgtacaccagaaggatatactcaaactgatacgccatcactacaacctgaaatgcttaaaagaaagcacccgcctgtacccggtgttcttccttaagattgacgttcctaccgcagatgtggatgtgaacctcacgccagataagtctcaggttctgctgcagaacaaagaatcggtgctcatcgctctcgagaacttaatgaccacatgctacgggcctctgccctcaactaactcatatgaaaataacaaaaccgacgtaagcgcggcagatatagtgctgagtaaaaccgcggagaccgatgtgttgttcaataaagtggagtccagtggcaagaactactccaatgtggacacctcggtaatcccatttcagaatgacatgcataatgacgagtcagggaagaacacagatgactgtctcaaccatcagatatccatcggagacttcgggtatgggcattgcagtagcgagattagcaacattgacaaaaacaccaagaacgcctttcaagacatttccatgtctaacgtgagttgggaaaatagccagacagagtattctaagacttgtttcatttcttccgttaagcacacccagtctgagaatgggaacaaggaccacattgacgagtccggtgaaaacgaggaggaggctgggcttgagaattcatcagagataagtgcagatgaatggtcaagggggaacatcctcaaaaactctgttggcgagaacatcgaacccgtaaaaatcctcgtcccagagaagtcactgccttgcaaggtgagtaacaataattacccaattcccgagcagatgaacttaaatgaagacagttgcaacaaaaagtccaatgtgattgataataaatccggcaaagtcaccgcttatgatttgttgtccaatagggttattaagaagcccatgtctgcgtcagcactgttcgtgcaagatcataggcctcaatttctgattgagaaccctaagacttcactggaagatgccacactgcagatagaggagctgtggaagacgctcagtgaagaggaaaagctcaagtacgaagaaaaggccacaaaggatctcgagcgttataattctcagatgaagcgcgctatcgagcaggaaagtcaaatgagccttaaagatggtaggaaaaagatcaaaccaacttcagcgtggaacttagcacaaaaacacaagctgaagacttctctttctaaccagcctaagttggacgagctgcttcagagtcagatcgagaaaaggcgttcccagaacatcaagatggtgcagatacctttcagcatgaagaacttgaaaattaacttcaaaaagcagaacaaagttgatttggaggaaaaggacgagccctgtctcatccacaacctcagatttccagatgcttggctgatgacttccaagaccgagagcttctag

SEQ ID NO: 108140 - DNA, 2271 bp, Artificial Sequence
  derived and/or modified sequence
atgtcctttgggatactcaagcctgatctgcggatcgtatttgtccacaataaagccgtgatatggcaaaaatcaagggtgagtgaccataagatggccctcatgtctgttcttggcaccgccgtgatgaataatatggagtcctttcaatatcacagcgaggagagccagatttacctctcgggcttcctgcccaaatgcgatgccgaccacagttttactagcctgagtacacctgagcgctccttcattttcatcaattcccgcccagtgcaccaaaaagacatattgaagttgattaggcatcattataacctcaaatgtctgaaggagtccactaggctctatcccgtgtttttcctcaaaattgacgtgcctacagccgacgttgatgttaacctcacgcctgacaagtctcaggtgctgctacaaaacaaagagtctgttctcattgccctggaaaatcttatgacaacctgctacggccctctgcccagcacaaacagttacgaaaataataaaacggatgtgagtgccgctgatatcgtgctctcaaagactgcggaaacggacgtgctctttaataaagtggagtcttccggcaaaaactattcaaacgtggataccagtgttatcccattccagaatgatatgcataacgacgagagcggcaagaacacggatgactgcctgaaccaccagataagcattggggatttcggctatggccattgctccagcgagatcagtaatatcgataaaaatactaaaaatgcttttcaggacatctcgatgagcaatgtgtcatgggaaaatagccagacggagtactcaaagacatgctttatctcctccgttaaacacacacagtctgagaatgggaataaagaccacatcgacgagagcggggagaacgaggaagaggcgggattggaaaattccagtgaaatttccgccgatgaatggagcagaggaaacatactcaagaacagcgtaggagaaaatatagagccggtgaagattctggtgcctgagaagtccctgccctgcaaggtttctaacaacaactaccccatccccgagcaaatgaatctgaacgaagatagttgtaataagaagtctaacgtgattgataacaagtctggaaaagtcacggcctatgacctgctttccaacagagtgattaaaaaaccaatgtctgctagtgcgttgtttgttcaggatcaccgtcctcagtttctgattgagaatcccaaaacctctctggaagatgccactctgcagattgaggagctatggaagaccctaagcgaggaggagaagctcaagtatgaggagaaagctacgaaagatctggagagatataatagccagatgaagagggccattgagcaggagtcacagatgtccttaaaggatggccgaaagaaaatcaagcctaccagcgcctggaacctggcccagaaacacaagctgaaaacttcacttagcaaccagcccaaactcgacgagctgctccaatctcagatcgaaaaacgacggtcccagaatattaagatggtccaaataccttttagcatgaagaatctaaagatcaacttcaagaaacagaataaagtggatttggaggagaaagatgagccttgccttatccacaatctccggttcccagacgcctggttgatgacatccaagaccgaagttatgctgctgaatccgtaccgcgttgaggaggcgctgctcttcaagcgcctgcttgagaaccacaagttgccggctgaacctctggaaaaaccaatcatgctgaccgaatcacttttcaatggctcccactacttagacgtcctgtataagatgaccgccgatgaccaaaggtatagcgggtcaacttatcttagcgatccgcgattgacggctaatgggtttaagataaagctgatccccggagtgagtatcaccgagaattatctggagattgaagggatggcgaattgcttacctttttatggagttgccgacctgaaggagatcctgaacgcaatcctgaacaggaatgctaaggaggtgtacgagtgcagacccaggaaagttatatcctatcttgaaggagaggctgtgaggctgagtcggcagctgcccatgtacttgtctaaagaggatatccaggacattatttataggatgaaacaccagtttggcaatgagatcaaagaatgcgtccacggcaggcccttctttcaccacctgacctacctgccagaaaccacctag

SEQ ID NO: 108141 - DNA, 2271 bp, Artificial Sequence
  derived and/or modified sequence
atgagttttggaatcctcaagcccgatcttcggatcgtcttcgtgcacaacaaggcagtgatctggcagaaaagtagagtgtccgatcacaagatggcactcatgagcgtgctgggaacagcagtgatgaataatatggaatctttccagtaccacagtgaggagagccagatatacttgtcaggttttctcccgaagtgcgacgcggatcattcatttacgtctctgtctaccccagaaaggtccttcattttcatcaacagccgcccagtgcaccagaaggatatcctgaagctgatcagacatcactacaatctaaagtgcctgaaagaatcaactcggctctatcccgttttcttcctgaaaatagacgtccccacggccgacgtggatgtgaaccttacccccgataagagccaggttttgctccagaataaagaaagtgttctgatagcacttgaaaatctgatgacgacctgctacggtccattaccatccacaaattcgtacgagaacaacaagactgatgtctcagccgctgatatcgtattgagcaaaaccgccgagacagatgtgctgtttaacaaggtcgagtcgtccgggaagaactactccaatgtggatacgtctgtcattcccttccaaaatgatatgcataacgatgagagcggcaagaacacggatgactgcctgaaccaccaaatctccataggcgatttcggctatggtcattgtagttctgaaatcagcaacatagacaagaacactaaaaacgccttccaggacatttccatgtctaacgtctcttgggagaatagccagacagaatacagcaaaacgtgcttcatcagctctgtcaaacatacccagagtgagaatggcaacaaagaccatattgacgagtctggagagaacgaggaggaagccggactggaaaacagtagcgagatctccgccgatgagtggagcagggggaatatcctgaaaaattccgttggcgaaaacatcgagcctgtgaaaatcctggttcctgaaaagagtttgccgtgcaaggtctctaacaacaattatccaattcctgagcagatgaatctcaacgaggactcttgcaacaagaagtctaacgtgattgataacaaaagtggaaaggttaccgcttacgatctgctgtcaaatcgcgtgatcaaaaaacccatgagcgcatcagccctgttcgtccaagatcataggcctcagtttctgatcgagaatcccaaaaccagtctcgaggacgccaccctgcaaatcgaggagctgtggaagaccctgagcgaagaggagaagctgaaatacgaagaaaaggcaactaaagatctcgagagatataatagtcagatgaagagggcaatcgagcaggagagccagatgtctctgaaggacgggaggaagaagatcaaacctacaagcgcatggaacttggcccagaagcacaagctgaagacctcactttctaaccagcctaagctggatgagctgctgcagtcacagattgaaaagagacggagtcagaatatcaaaatggtgcagatccccttctctatgaagaacctgaagatcaatttcaaaaagcagaacaaggtggacttggaagaaaaggacgagccttgtctgattcacaacttgcgattcccagatgcttggcttatgacatcgaaaactgaagtgatgctccttaatccttaccgggtggaggaagcacttctttttaagcggctgctggagaaccacaaactccccgcagaaccgctggaaaagccaattatgctgaccgaatcactgttcaatggatcccactacctggatgtgctgtacaagatgaccgccgacgaccagcgctattccggctcaacttatctgagcgaccctcgccttaccgccaatggtttcaaaataaagcttattcctggcgtgtcaataaccgaaaattatctcgaaatcgaaggcatggcgaattgcttgcccttctacggcgttgccgaccttaaggaaatcctgaacgcaatcctcaaccggaatgctaaggaggtgtatgaatgtcgccctaggaaggtgatcagctaccttgaaggagaggctgttaggctcagtcggcagctccctatgtacctgagtaaggaggacatccaggacatcatatatagaatgaaacatcagttcggaaacgaaatcaaggaatgcgtgcacggtagaccctttttccatcatctgacctatctgcctgaaactacctag

SEQ ID NO: 108142 - protein, 1233 aa, Artificial Sequence
  derived and/or modified sequence
MRGLPRGRGLMRARGRGRAAPPGSRGRGRGGPHRGRGRPRSLLSLPRAQASWTPQLSTGLTSPPVPCLPSQGEAPAEMGALLLEKETRGATERVHGSLGDTPRSEETLPKATPDSLEPAGPSSPASVTVTVGDEGADTPVGATPLIGDESENLEGDGDLRGGRILLGHATKSFPSSPSKGGSCPSRAKMSMTGAGKSPPSVQSLAMRLLSMPGAQGAAAAGSEPPPATTSPEGQPKVHRARKTMSKPGNGQPPVPEKRPPEIQHFRMSDDVHSLGKVTSDLAKRRKLNSGGGLSEELGSARRSGEVTLTKGDPGSLEEWETVVGDDFSLYYDSYSVDERVDSDSKSEVEALTEQLSEEEEEEEEEEEEEEEEEEEEEEEEDEESGNQSDRSGSSGRRKAKKKWRKDSPWVKPSRKRRKREPPRAKEPRGVSNDTSSLETERGFEELPLCSCRMEAPKIDRISERAGHKCMATESVDGELSGCNAAILKRETMRPSSRVALMVLCETHRARMVKHHCCPGCGYFCTAGTFLECHPDFRVAHRFHKACVSQLNGMVFCPHCGEDASEAQEVTIPRGDGVTPPAGTAAPAPPPLSQDVPGRADTSQPSARMRGHGEPRRPPCDPLADTIDSSGPSLTLPNGGCLSAVGLPLGPGREALEKALVIQESERRKKLRFHPRQLYLSVKQGELQKVILMLLDNLDPNFQSDQQSKRTPLHAAAQKGSVEICHVLLQAGANINAVDKQQRTPLMEAVVNNHLEVARYMVQRGGCVYSKEEDGSTCLHHAAKIGNLEMVSLLLSTGQVDVNAQDSGGWTPIIWAAEHKHIEVIRMLLTRGADVTLTDNEENICLHWASFTGSAAIAEVLLNARCDLHAVNYHGDTPLHIAARESYHDCVLLFLSRGANPELRNKEGDTAWDLTPERSDVWFALQLNRKLRLGVGNRAIRTEKIICRDVARGYENVPIPCVNGVDGEPCPEDYKYISENCETSTMNIDRNITHLQHCTCVDDCSSSNCLCGQLSIRCWYDKDGRLLQEFNKIEPPLIFECNQACSCWRNCKNRVVQSGIKVRLQLYRTAKMGWGVRALQTIPQGTFICEYVGELISDAEADVREDDSYLFDLDNKDGEVYCIDARYYGNISRFINHLCDPNIIPVRVFMLHQDLRFPRIAFFSSRDIRTGEELGFDYGDRFWDIKSKYFTCQCGSEKCKHSAEAIALEQSRLARLDPHPELLPELGSLPPVNT

SEQ ID NO: 108143 - protein, 1233 aa, Artificial Sequence
  derived and/or modified sequence
MRGLPRGRGLMRARGRGRAAPPGSRGRGRGGPHRGRGRPRSLLSLPRAQASWTPQLSTGLTSPPVPCLPSQGEAPAEMGALLLEKETRGATERVHGSLGDTPRSEETLPKANPDSLEPAGPSSPASVTVTVGDEGADTPVGATPLIGDESENLEGDGDLRGGRILLGHATKSFPSSPSKGGSCPSRAKMSMTGAGKSPPSVQSLAMRLLSMPGAQGAAAAGSEPPPATTSPEGQPKVHRARKTMSKPGNGQPPVPEKRPPEIQHFRMSDDVHSLGKVTSDLAKRRKLNSGGGLSEELGSARRSGEVTLTKGDPGSLEEWETVVGDDFSLYYDSYSVDERVDSDSKSEVEALTEQLSEEEEEEEEEEEEEEEEEEEEEEEEDEESGNQSDRSGSSGRRKAKKKWRKDSPWVKPSRKRRKREPPRAKEPRGVSNDTSSLETERGFEELPLCSCRMEAPKIDRISERAGHKCMATESVDGELSGCNAAILKRETMRPSSRVALMVLCETHRARMVKHHCCPGCGYFCTAGTFLECHPDFRVAHRFHKACVSQLNGMVFCPHCGEDASEAQEVTIPRGDGVTPPAGTAAPAPPPLSQDVPGRADTSQPSARMRGHGEPRRPPCDPLADTIDSSGPSLTLPNGGCLSAVGLPLGPGREALEKALVIQESERRKKLRFHPRQLYLSVKQGELQKVILMLLDNLDPNFQSDQQSKRTPLHAAAQKGSVEICHVLLQAGANINAVDKQQRTPLMEAVVNNHLEVARYMVQRGGCVYSKEEDGSTCLHHAAKIGNLEMVSLLLSTGQVDVNAQDSGGWTPIIWAAEHKHIEVIRMLLTRGADVTLTDNEENICLHWASFTGSAAIAEVLLNARCDLHAVNYHGDTPLHIAARESYHDCVLLFLSRGANPELRNKEGDTAWDLTPERSDVWFALQLNRKLRLGVGNRAIRTEKIICRDVARGYENVPIPCVNGVDGEPCPEDYKYISENCETSTMNIDRNITHLQHCTCVDDCSSSNCLCGQLSIRCWYDKDGRLLQEFNKIEPPLIFECNQACSCWRNCKNRVVQSGIKVRLQLYRTAKMGWGVRALQTIPQGTFICEYVGELISDAEADVREDDSYLFDLDNKDGEVYCIDARYYGNISRFINHLCDPNIIPVRVFMLHQDLRFPRIAFFSSRDIRTGEELGFDYGDRFWDIKSKYFTCQCGSEKCKHSAEAIALEQSRLARLDPHPELLPELGSLPPVNT

SEQ ID NO: 108144 - DNA, 3702 bp, Artificial Sequence
  derived and/or modified sequence
atgcgcgggcttcctcgaggacgcggtctcatgcgggcccgggggaggggacgagctgcgccacccggttcaagagggcgtggtagaggaggacctcaccgggggcgagggcgcccccgatctctgctgtcattgcctcgcgcccaggcctcttggacaccccaattgtctacaggcctcactagcccccctgtgccttgtctgccttcacagggagaggcacccgccgaaatgggagcactgctgctggaaaaggaaaccaggggggctaccgagagggttcatggaagcctaggagacacacctcggagcgaggaaactctgcctaaggcaactcccgattcgctcgaaccagccggcccttcaagtccggctagtgtgactgttacagttggtgacgaaggagccgacacccccgtcggagccacccctctcattggcgacgaaagtgaaaatctcgagggagatggtgaccttagaggaggccgcattctgctcgggcatgcaacaaagagtttcccatcgtccccatcaaaaggcgggtcttgtccttcccgagccaagatgagcatgacaggcgccggcaaatctccccccagcgtgcagtccctggcaatgaggttgctctctatgcctggagctcagggagctgctgccgccggttccgaaccacctccggcaacaacttcacccgagggacaacccaaagtccatagagcaaggaaaacaatgtcaaaaccggggaatggccagccgcctgtacctgagaagagaccacctgaaatccagcattttagaatgtccgacgacgtgcacagcctcggtaaagtgacaagtgacctcgccaagcggcggaagctaaattctggcggcggtctgtcagaagagctaggatcggctcgtagatcaggagaagtcacacttaccaaaggagatcctggatccctggaggagtgggagacagtcgtcggagatgatttctccctatattatgacagctactccgttgatgagcgcgttgactcagactctaagagcgaagtggaagcgcttactgagcaactgtccgaggaagaggaggaagaggaggaggaagaggaagaagaggaagaagaggaggaggaggaggaagaggaggaagacgaggaatcggggaaccagtccgatagatccgggagctcaggacgtcggaaggccaagaagaaatggaggaaagattccccctgggtaaaaccgagccggaagcgaagaaaacgggaaccaccaagagccaaagagccccggggagttagcaacgacacatcctcccttgaaactgagcgcgggtttgaggaactgcccctgtgtagttgcagaatggaggcccctaaaattgatcggatttctgagcgagccggccataaatgtatggccacggagtcagtggacggggagttgagcgggtgtaatgctgcaattctcaaacgtgagactatgaggccgtccagtcgagtggccctcatggttctctgcgagacacatcgcgctcggatggttaaacatcactgctgtcccggctgcggttatttttgtaccgcaggcacttttctcgagtgtcatcctgatttccgagtggcgcaccgtttccacaaagcatgtgtatctcagctgaatggtatggtattctgcccgcattgcggagaggatgcctctgaggctcaggaggtgacaattcctagaggagacggtgtcactccgccagcaggaaccgccgcacccgctcccccgccgctgtcccaggatgtgccgggaagggccgacacatcccagcccagcgctaggatgaggggccacggcgaaccccgacggcctccttgtgaccccctagccgatacgatcgactctagtggtccgtctcttacgctgccaaatggcggttgcctgtccgccgttgggttgccactaggccccggcagagaggcactcgaaaaagccctggttatacaggaatccgagcgcaggaagaagctaagattccatccccggcaactctacctctctgttaagcagggagaactccaaaaggtgattctaatgcttctggacaacctagaccccaacttccaatctgatcagcagagcaagagaacacccctgcatgccgccgcacaaaagggttctgttgaaatttgtcacgttttgctacaggccggagccaacattaacgctgtcgacaaacaacagcgcaccccccttatggaggctgtggtcaataaccacctggaagttgcgaggtacatggtgcaacgaggaggatgtgtgtattccaaagaagaagacggctcgacgtgtctgcatcacgcagccaagatcggcaatctggaaatggtatccctgctactgtcaacaggccaggtagatgtcaacgctcaggattctggaggatggaccccaattatttgggcagccgaacacaagcatatcgaagtaattcggatgctgctaacacgcggagccgatgtcacactgactgataatgaggaaaacatctgtcttcattgggctagctttacgggttctgcagccatcgccgaggtgctgctcaatgctcggtgcgacctccacgctgtcaattatcacggcgatacaccgctccacatagccgcaagagagtcataccacgactgtgttcttctgttcctgagccgcggggccaacccagaactgagaaataaggagggcgacacagcatgggatctgacaccagaacggtcggatgtgtggttcgccctgcaactgaaccgcaaactaaggttaggtgtaggcaaccgcgccatccggaccgagaaaattatctgtcgcgatgtggcccgggggtatgagaatgtaccaatcccgtgtgtgaatggcgtggatggggaaccatgtcccgaggactataagtacatttccgaaaactgtgagactagcactatgaacattgacaggaatataacccatttgcaacactgcacttgtgtggacgattgctcctcctctaattgtctgtgtggacagcttagtatcagatgctggtacgacaaggacggtcggcttttacaggaatttaacaaaatcgagcctccattgattttcgagtgcaatcaggcttgctcttgctggcggaattgcaagaacagggtggttcagagtggcatcaaagtgcggctgcagttgtatcgcacggccaaaatgggatggggcgttcgcgcattgcaaacaatcccacaggggactttcatttgcgagtatgtgggagagctgatctccgacgccgaggccgatgttagagaggatgattcttacctcttcgatctggacaataaagatggggaggtgtattgcattgatgcccgatattatggcaacatttcccgattcattaatcacctgtgcgatccaaatattatcccggtgcgggtgttcatgctgcatcaagacctcagatttccaagaattgccttctttagttctcgggacattaggactggagaagagcttggttttgactatggcgacaggttctgggacataaagagcaaatacttcacgtgccagtgcggatccgaaaagtgtaaacactctgcagaggccattgccctggaacaatcgaggttagcacggctggatcctcacccagaactattaccagaattaggcagtctgccacccgtcaacacatag

SEQ ID NO: 108145 - DNA, 3531 bp, Artificial Sequence
  derived and/or modified sequence
atggcagccgctgcaggtgcagcagcagctgcggctgcggagggagaggcacccgcggaaatgggcgctctattgctggaaaaagagacacgtggcgctaccgagcgcgtacacggatctctaggcgacactcctagatctgaggagacccttcccaaggctaccccagacagccttgagcctgccggcccttcttccccagcctctgttaccgtgaccgtgggcgacgagggcgctgacacccctgttggcgcaactccactgatcggagacgaaagcgagaatctggaaggagacggggatctaagaggcggtaggattctactgggccatgccacaaagtctttccccagctctccatctaagggggggtcttgccccagtagagctaaaatgagtatgactggagctggaaaatcgccccccagcgtacaaagcctggcaatgaggcttctatcaatgccgggcgctcagggcgcggccgccgccggatccgaacccccgccggcaaccacctcgcctgagggccaaccgaaggtgcaccgtgcccgcaagaccatgagtaagccaggcaacggacagccacccgtgcccgaaaaacgtccgcccgagatacagcattttagaatgtcggacgacgtccatagtttagggaaagtcacgtcagacctagcaaagcgaaggaaactcaactcaggcggaggcctctcagaggaattggggagcgccagaagatccggagaagtgaccctgacaaaaggagaccccggatctctggaagagtgggaaacagtcgtgggcgacgatttttccctgtactacgattcttattccgtggatgagcgcgtggattccgactccaagtccgaggtggaagccctaacagaacagttatctgaggaagaagaagaggaagaagaagaagaagaagaggaagaggaagaagaagaagaagaggaagaagaggaagatgaggagagcggcaaccagagtgatcggtccggatccagcggtcggaggaaagccaaaaaaaaatggcgaaaagactccccatgggtgaagccctcaagaaagagaagaaagcgggagcctcccagagcaaaagagcctcgaggagtgtccaatgatacgtcctctctagagacagaaagaggcttcgaggagctaccgctgtgcagctgtcgcatggaagcacccaagattgaccgaatctccgaaagagcgggccataagtgcatggccacggaatctgtggacggggaattaagcggctgcaatgcagctattcttaaacgggagactatgagaccaagttcgcgggtggctctgatggttctgtgcgaaactcacagagcacgtatggtgaaacaccattgctgcccagggtgtgggtatttctgtacagctggcacgtttctcgagtgtcacccggatttccgcgtagcacaccggtttcataaagcctgtgtaagccaattgaacggaatggtgttttgcccccactgcggtgaggacgcgtctgaggcccaggaggtaaccatccctcgtggagacggcgtgactccaccggcgggaacagccgcccctgcgcccccaccactctctcaggacgtccccggccgtgccgatacctcccaaccatccgcacgcatgcgaggacatggggagcctcgccggcctccatgcgatccattggccgataccatcgacagctcaggcccgagtctgactttaccaaacggtggctgcctgtctgcagttggtcttccactaggtcctggccgagaggctctggagaaggctcttgtcatccaggagtcagagcggagaaaaaagcttcgattccacccacgtcaactgtacctgagcgtgaaacaaggagaactgcagaaggtcattctgatgctgctggataatctcgatcctaacttccagagcgatcagcagtccaaacgaaccccattgcatgccgccgcccagaaggggagcgtggaaatctgccatgttctgctgcaagccggcgctaatatcaatgccgtggacaagcagcagcgaacccctctgatggaggcagttgtcaataatcacctcgaagttgcccgatatatggtgcagagaggcggctgtgtgtattcaaaggaggaggatggctccacgtgtctgcaccacgctgccaagatcggaaacctggagatggtatcgcttttgctgtcaacgggccaagtagacgtcaatgctcaagattcaggtgggtggactccaattatatgggcagctgagcataagcacattgaggtgattagaatgcttctgacccgtggtgcagacgtcactctgacagataatgaggagaatatatgcctccactgggcctcattcaccggcagcgctgctattgccgaagtcctcctgaacgctcgctgtgaccttcatgccgtaaattatcacggggacactcccctgcatatagccgcaagagagagttatcatgattgtgtgctgctgtttcttagccgcggcgccaaccctgagcttcgcaataaggaaggggacacggcttgggatctgactcctgaacgctctgacgtctggttcgcgctgcaactgaatcgcaagctgcgcctgggcgtgggcaaccgggctatccgaactgagaaaatcatctgtagggacgttgcccggggctacgagaacgtgcctattccttgcgtgaatggagtggatggtgagccttgccccgaggattacaagtatatatctgagaattgcgaaacatccacaatgaatatcgatcgcaatatcacacacctgcaacactgtacatgtgttgacgactgtagctccagcaattgcctgtgtggacagttatccatccgttgctggtacgataaggacggccgcctcctgcaggagttcaataaaattgagccacccttaatttttgagtgtaaccaggcttgtagctgctggaggaactgtaagaaccgggtcgtgcagtcaggtattaaggtccgactgcagctctaccgtaccgccaaaatgggctggggcgtgagggcgctccagacgataccgcaggggacgttcatctgcgagtatgtaggagagctaatcagcgacgctgaagctgacgtacgggaggacgattcttacctgtttgacctggataataaagatggtgaagtatactgcattgatgcgcgctattatggcaatattagcagattcatcaaccatctgtgtgacccaaacataattccagttcgagtgttcatgctgcaccaagatctgcgcttcccgcggattgccttcttttcatcacgcgacatccgaactggggaagaactaggcttcgattatggcgatcgattctgggacatcaagtccaaatatttcacttgtcagtgcggaagtgagaagtgtaagcactccgccgaggcaattgcgcttgagcagtccagactcgcccgtctggatccgcaccccgagttgcttccagagttgggctcattaccacctgtgaacacgtag

SEQ ID NO: 108146 - DNA, 3531 bp, Artificial Sequence
  derived and/or modified sequence
atggcagctgccgcaggcgctgccgccgctgctgcagcagaaggggaagcccctgcagagatgggagcccttcttcttgaaaaggagactcggggggctacagaacgggtccacgggagcctgggagatacccccagaagcgaagagaccctgccgaaggccacacccgactcccttgaacccgccggacctagtagccctgctagcgtgaccgtcactgtgggcgatgaaggcgccgatacccctgtgggagcaactcccctgataggggacgagagcgagaacttggagggtgacggggatcttaggggcggacgcatacttttgggacacgccaccaaaagttttcctagttcacctagcaaaggaggaagctgtccatcacgtgcaaagatgtcaatgactggggctgggaagagccccccatccgtccagtcgctggccatgagactcctcagtatgcccggggctcagggcgcggctgcggccgggagtgagccaccacctgccaccacaagccccgagggccaacccaaagtacatagggcgcggaaaactatgtccaaaccgggcaatgggcagcccccagtgccggagaagcgccccccagagattcagcacttcaggatgtctgacgacgttcactccctcggaaaagtgacgtcagacctggccaagcgtcggaagctcaattcgggggggggcctgagcgaggagctggggagtgccagacgttccggagaagtaactctcactaagggcgaccccgggtcactggaggaatgggaaacagtggttggtgacgacttctcgttgtactacgatagctactccgtggatgagcgggtggactcagatagtaaaagcgaggttgaggcattaactgagcagctgagtgaagaggaggaagaggaagaggaggaggaggaggaagaggaggaggaggaagaagaggaggaggaagaagaggacgaggagtccggcaatcagagtgatagatcggggagctcaggcagacgcaaggccaagaaaaaatggcgaaaggactcaccttgggtgaagccaagccgcaagcgaaggaagagggagccccctagggctaaagaaccgcgtggtgtgtccaatgatactagctcactcgagacggagcgcggcttcgaagaactgcccctctgttcatgccgcatggaggcgcctaagatcgataggatcagcgaaagggctggtcacaagtgtatggctactgaatccgtggatggcgagctgagcggctgcaacgcagcaatcctcaaaagggaaaccatgagaccttcttcacgcgtcgcacttatggtcctgtgcgagactcaccgcgccagaatggtgaaacaccattgttgccctgggtgcgggtacttttgtactgccggtacttttctggaatgccatccagacttccgggtggctcaccggtttcataaagcctgcgtgtcacagttgaatggtatggtgttctgcccgcactgcggagaagatgctagcgaggcccaggaggtcaccatcccaaggggtgatggcgtgacaccaccagcaggcaccgccgccccagcccctcctcctctgagtcaagatgtacccggacgagctgacacctctcagccttccgcccgtatgcgcggccatggagaacctagaaggcccccctgcgaccccctcgctgacactatcgactctagcggacctagtcttacgttgcctaacggtgggtgcttgagtgctgtgggtttgccgcttggacccggacgtgaggcactcgaaaaagcattagtcatccaggaatctgagcgacggaagaagttgaggtttcacccacgccagctgtatttgagtgtgaagcaaggcgaactccaaaaagttattctgatgttactcgataatctggaccccaactttcagtctgatcagcagagcaagagaaccccactccatgcagcagcacagaaaggcagcgtcgagatttgtcacgtgctgctccaggccggtgctaacatcaatgcagtggacaaacagcaaagaactcccctcatggaggctgtggtcaacaatcacctcgaagtggcccgatacatggtccaacgtgggggctgtgtctatagcaaagaagaggatggttcgacctgccttcatcacgctgccaagatcggcaatctggagatggtgtcccttctcctgagcacagggcaggtggatgtgaatgcgcaggatagcggcgggtggacgcccattatctgggccgctgaacacaagcacatagaggtgatccgcatgcttctgacaaggggcgcggacgtgacactgactgataatgaagagaacatctgccttcactgggccagtttcaccggttcagcagcaattgcagaggtgctcctaaatgcccgatgcgatttacatgccgtgaactaccacggggacactccactgcatatcgccgcccgtgagtcttaccatgattgcgtccttctgttcttgtcccggggggccaatcctgagctgaggaacaaagaaggggatacagcttgggacctaactcctgagagaagcgacgtatggtttgcactgcagctgaaccggaagttgcgcctcggagttgggaaccgggcaatccggaccgaaaaaataatatgcagggacgtagcccgtggctatgagaacgtgccaatcccgtgtgtaaacggcgtggatggcgagccctgtcccgaggattacaaatacatttctgaaaactgcgagacgagtaccatgaatattgatcgtaacataacccacctgcagcactgtacttgtgtggatgattgtagttcatccaactgtctatgcggtcaattgtccatacgatgttggtatgacaaggatggccgcctcttgcaagaattcaacaagatcgagccccccctcatatttgaatgcaatcaagcctgtagctgttggcgtaattgcaagaatcgggtggtgcagtccggaatcaaggtgcgcctgcagttatatcggacagcaaagatgggctggggggtgagggcactgcagacgatcccccagggcaccttcatctgcgaatatgtgggggaacttatatccgatgccgaggcagacgtgcgcgaggatgatagctacctcttcgacctggacaacaaagacggagaggtatactgcatcgacgctagatactacggaaatatctcccggtttattaatcatttgtgcgaccctaacattattcctgtcagggtgttcatgctgcatcaagatttacgtttccccaggatcgcctttttctcgagtagggatatcaggactggtgaggagctcggctttgactacggcgatcgcttctgggatattaaaagcaagtattttacatgtcagtgtgggtctgaaaagtgcaagcactcagcggaggccatcgccttggagcagtctcgactcgcacggctagacccacaccctgaactactgcccgagctgggctccctgcctccagtcaatacatag

SEQ ID NO: 108147 - DNA, 3702 bp, Artificial Sequence
  derived and/or modified sequence
atgcggggactaccgcgtggacggggattaatgagggctcgtggcagagggcgcgcagcgccaccagggtctcgaggtcgaggccgcggcggaccgcacagaggccgtggccgcccacggagcctgttaagccttccgcgtgcccaggcctcgtggactccacagctgagcacaggcctcacatcgcctccagtcccctgtctgcccagccagggggaagccccggctgaaatgggcgcattgttgctggaaaaggagacacgaggcgcaacagagcgtgtgcacgggtcccttggggatacacctcggtccgaggagaccctgccgaaggcaaccccggacagcttggagcctgccggtcccagctcacctgcatctgtgacggtgactgtgggcgatgaaggggcggatacaccagtcggtgcaacaccattgatcggtgacgaatccgaaaacctagagggcgacggagaccttcgcggaggcagaattttactcggccacgcgacaaaatccttcccatcatcaccttctaagggcggatcatgtccttcacgggctaagatgagcatgaccggcgccggtaagtccccaccctcagtgcaaagtctcgctatgcgcctcctcagcatgcccggagcacaaggtgccgcggcagcaggctccgaaccacccccagctacaacatccccagaaggccagccaaaggtacatcgagcccgcaagactatgtcgaaaccgggcaacggccagcctcccgtgcctgagaaacgaccacctgaaattcaacacttcaggatgtccgatgacgtccattcactggggaaggtgacatcagacctggcaaaaagaagaaaactgaattctggaggcggcctgagtgaagaactgggctccgcccggagaagcggggaagtcactctgaccaagggggaccctggatccttggaggagtgggagactgtggtaggggatgatttttccttgtactatgactcgtattccgtggatgagcgtgttgattcagacagtaagagcgaggtcgaagccctcacggaacagctgagcgaggaggaagaagaggaggaggaggaggaagaagaagaagaagaagaagaggaggaggaggaggaggaggaagacgaggaaagcggcaatcaatctgacagaagtgggtccagcgggcgtagaaaggccaagaagaagtggcgcaaagacagtccctgggtgaagccgtccaggaagcggcgtaaaagagagcctcctcgcgcgaaagagcctagaggggtgtccaatgatacatctagtttggaaaccgaacgcggcttcgaagagctgccgctgtgtagctgccgcatggaagctccaaaaattgacagaatatcagaacgagctggacacaagtgcatggcaacggagtccgtggacggtgaattgagcgggtgcaacgctgctattctgaagagggaaaccatgagaccttcctctcgcgttgcactaatggtgttgtgcgagacccacagggcccgcatggtgaagcaccactgctgccctggttgcggttacttctgcaccgctggcactttcctggagtgtcaccctgactttagagtcgctcacagatttcacaaagcctgcgtcagccagttgaacggcatggtgttttgcccgcactgtggggaagatgcctctgaggcacaagaagtcactatccctcggggggatggtgttacccctcccgccggaacagcagcgcccgcgccccccccactgagtcaggacgtgcccggcagggctgataccagtcaacctagcgccaggatgcgggggcacggagaaccacggcggcccccctgtgatcccctggctgatactatagactccagcggtcctagcctcactctgccaaatgggggctgcctgtctgccgttggacttccactggggccaggaagagaggctttggaaaaggcgctggtgatccaggaatcagagcgccggaagaagttacggttccatcctaggcaactgtatctgtcagttaaacaaggcgaactgcagaaagtgatcctgatgctcttggataatttggacccaaacttccaaagcgatcagcaaagcaagaggacaccactgcacgctgccgctcaaaaaggtagcgtagaaatctgccatgtgctgctgcaggcaggggcaaacataaatgccgttgacaaacaacagcggacccctcttatggaagctgtggtgaataatcatctggaggtggcgcgctatatggtgcagaggggcggctgtgtctactcaaaagaggaagacggcagcacatgcctccatcacgccgccaagatcgggaatctcgagatggtctcgttgctcctttctaccgggcaggtggacgtcaatgctcaggatagcgggggatggacacctatcatctgggctgccgaacataaacacattgaggttattagaatgctgctcactcgtggtgctgatgtcacacttacagataacgaagagaacatttgtctgcactgggcgtctttcacaggatccgcagccatagccgaggtgttgctgaatgcgcgctgcgatctccacgcagtaaactatcacggcgacacccctctccatatagcagcaagagaaagttatcacgattgcgtgttgctcttcctaagcagaggtgccaacccagagctgcggaataaggaaggggacaccgcatgggacctgactcccgagcgctcagatgtgtggttcgcactgcaactcaatcggaagctgcggctcggagtcggcaaccgagccattaggaccgaaaaaataatctgcagagatgtagcacgggggtacgaaaatgtccctatcccatgcgtaaacggtgtcgacggtgaaccttgcccggaggattacaaatatatttctgagaactgtgagactagcactatgaacatagatcggaacattactcatctgcagcattgtacctgcgtcgatgactgtagcagctccaactgtctgtgcggccaactgtctattcggtgctggtacgacaaggacggaaggcttctgcaggagttcaataagatcgaacctcctctcatctttgaatgtaatcaggcctgcagctgctggcgcaattgcaagaacagggtagtgcagtcaggcattaaggtccgtctccagctgtacaggacagcaaaaatgggatggggcgtgcgggcgctgcaaacgattccccaaggcacttttatctgcgagtacgttggggaactgatcagcgatgccgaggcggacgtccgcgaggatgatagttatttgtttgatctggataacaaagatggggaggtctattgcattgatgccagatattatggcaatatctcgagattcatcaaccacctgtgcgaccccaacataatcccagttcgggtgttcatgttgcaccaagatcttaggtttccacggatagcttttttctcgagtcgggacatccgtacgggagaagaattaggattcgactatggagatcgcttctgggacattaagtctaaatacttcacttgccagtgcggctccgaaaagtgcaagcattcagcggaggccattgccctcgaacagtcccggctggccaggcttgatcctcatccagagctactgcctgagttagggagcctgccacccgtcaacacctag

SEQ ID NO: 108148 - DNA, 3531 bp, Artificial Sequence
  derived and/or modified sequence
atggccgctgctgcaggagcagccgctgcagccgcagccgagggagaggcgccagccgagatgggggccttgctgcttgaaaaagaaacacggggggcaaccgaaagggtgcacggaagcctgggcgacaccccaagatctgaagaaactttaccaaaagccacacctgacagtctggaaccagccggcccctccagtcccgcttccgtgacagtaactgttggcgacgaaggagccgatacacctgtgggggccacccctctgataggagatgagtccgagaacctcgagggggacggcgacctgagaggcgggaggatcctgcttggccacgccacaaagtcattcccttcctcccccagtaaggggggcagttgtccaagcagagccaaaatgagtatgacaggggccggcaaaagccctccaagtgtgcagtcactggctatgaggctcctatccatgcctggtgcccaaggcgccgcggctgctgggagtgagcctcctcctgctaccacttcacccgaggggcagccaaaagtccaccgtgccaggaaaaccatgtccaaaccaggtaacggacagccgccagtacctgagaagcgaccacccgagatccaacactttcgaatgagcgacgacgttcacagtctgggaaaggtcactagcgacttggcaaaaaggcggaagttaaactccggggggggattgtctgaggagctagggtctgcacgcagaagcggcgaggttacactaactaagggggatcctggcagtctggaggagtgggagaccgtggtgggtgacgacttctctctgtattatgatagctacagtgtggatgaaagagtcgatagtgactcaaaatccgaagtggaagctctaaccgaacaactgagtgaggaggaagaagaggaggaagaggaagaagaagaagaggaggaagaagaggaggaagaagaagaagaggaggacgaggaaagcggcaaccagtcagacaggtctggatcttctggccgcaggaaggcgaagaagaagtggcggaaagattctccatgggtaaagccaagtcgcaagaggagaaagcgcgaaccgccacgcgcaaaagaacctagaggtgtttctaacgacactagctcactagagacagaacgagggttcgaagagttgccactgtgcagttgccggatggaggcccccaagatcgatcgaatctctgagagggccggacataaatgcatggccaccgagtccgtagacggggaattatccggatgcaacgcagcaatactgaagcgtgagactatgagaccatcctctagagtcgctctgatggtgttgtgtgaaacacatcgcgccagaatggtgaaacatcactgttgtcctggctgtggctacttctgcaccgcagggacgtttctggaatgccatccagatttcagggtggctcacaggttccataaggcttgcgtttctcagctcaacggcatggtgttttgcccccactgcggagaggacgcttccgaggcgcaggaagtcactattccaagaggagatggagtcacccccccagctggcacagccgctcctgcccctcctcccctgtcccaggatgtgccaggccgggcagatacctctcagccaagcgctcggatgaggggccatggggagcctaggcggcccccttgtgacccgcttgcggacaccatagacagttctgggccttcgctgactctcccaaatgggggttgcctgtctgcggtgggtttaccgctggggcccggcagggaggccctcgagaaagctctggttatccaggagtcagaacgtagaaaaaaactgagatttcacccaaggcaattatacctgagcgtcaaacagggcgagctgcaaaaggtcattttgatgctgttggacaacctcgatcccaatttccagtcagatcagcagtctaaaagaaccccactgcacgccgccgctcagaaggggagtgtagaaatctgtcatgtgctccttcaagctggggcaaatattaacgccgtggacaagcagcaaaggacccccttgatggaggctgtggtgaataatcatctggaggtggccaggtacatggtgcaacgcgggggctgtgtctactctaaagaagaggatggtagtacatgcttgcaccatgccgccaagattggtaacctggaaatggtgagcttactgttatctacaggacaggtggatgttaacgcccaggattccggaggttggactcccattatctgggctgccgaacataagcatatcgaggtcatccgcatgctgctgacgcgcggggccgatgtcacactgactgataatgaggagaacatttgcctgcattgggctagctttacaggatctgcagcaattgcagaggtattattgaacgccaggtgtgacctgcatgcagtcaactaccacggcgacacgccactgcatatagccgccagagagtcctatcacgactgtgtcctactgtttcttagcaggggggccaacccagaactgcgcaataaagagggagacactgcatgggatttaactcccgaaaggtctgatgtgtggttcgctctgcaacttaaccgaaagctgcgcctgggggttggaaatcgggcgatccggacagagaagatcatctgccgggatgtggcccgtggctacgagaatgtcccaattccatgtgtcaacggcgttgacggggagccttgccctgaggattacaagtacatatcggagaactgtgagactagtaccatgaacattgatcggaacatcacccaccttcagcattgtacttgcgtcgacgattgctcctcctctaattgtctctgcggacaactatcaattagatgctggtacgacaaggatggccgacttctgcaggagtttaataaaatcgagccaccattaattttcgaatgtaatcaggcttgctcctgttggcggaactgcaagaaccgggtggtccagagtggaatcaaggtgcgactgcagttataccgaaccgctaagatgggatggggggtgcgggccctgcagacgattcctcaagggacgtttatctgcgaatatgtgggcgaactgatcagtgatgctgaagcggacgtgcgggaggatgactcttatttgttcgacctggacaataaagacggggaggtgtattgcattgacgcccgttactacggcaacattagtaggtttattaaccacctgtgtgatcctaacatcatccccgtaagagttttcatgctgcatcaagatctcagatttccaaggatcgcctttttcagcagcagggacatccgaaccggtgaagaactgggcttcgattacggagatcgcttttgggatattaagagcaagtattttacgtgtcagtgcgggtccgaaaaatgcaagcactcagctgaggctatcgcccttgaacaaagcaggcttgctcgactggacccacacccagaactgctgcctgaactggggagcctcccacccgtgaatacctag

SEQ ID NO: 108149 - DNA, 3702 bp, Artificial Sequence
  derived and/or modified sequence
atgcgggggctgcctcgtgggaggggtcttatgagagcaagaggcagaggccgtgccgctccaccaggaagccgcggcagagggcggggaggaccccatagagggcgtggtcgcccgcggtctttgctcagccttcctagggcccaagcaagctggaccccccagctctctacgggcttaacctctccacccgtgccctgcttacccagccaaggagaagcccccgccgaaatgggggcactcctgcttgagaaagagactaggggggctacagaacgagtacatgggtctcttggggacacccccaggtccgaagagactttgcctaaggcaaatcccgacagcctggaaccagctggccccagtagcccagcctccgtgaccgttactgttggagacgagggtgccgatactcctgtgggggctacacccctgattggtgatgaatcagaaaacctggaaggagacggggaccttaggggaggacggatcctactgggccatgctacaaagtcgttcccatcaagtcctagtaaaggcggctcatgcccctcccgcgcgaagatgagcatgacaggcgccggaaaaagccctcctagtgttcaatctctggccatgcgtctgcttagcatgccaggcgcccaaggcgccgctgcggcaggctccgagccaccccctgcgacaaccagcccagagggccaacctaaggtccacagggccaggaagactatgagtaagcccggtaacgggcagcctcccgtgccagagaaaagacccccagaaattcaacatttcaggatgagcgacgatgtccattccttaggcaaggtgactagtgacctcgctaaaagacgcaagctcaactccggcggaggcctgtcagaggagcttggcagtgcacgcagaagtggggaggtgactttgactaaaggtgacccaggctctctcgaagagtgggagaccgtggttggcgacgatttttcactttactatgactcctatagcgtggatgagcgcgtcgactccgactcaaaaagcgaggtggaggccttaaccgagcaactatctgaagaggaggaggaagaagaagaagaggaagaggaagaggaagaggaggaagaagaagaagaagaagaggaagatgaggaatcaggcaatcaatcagaccgatctggttccagtgggcgtaggaaagcaaagaagaaatggcgcaaggattcaccatgggttaagccttcccgaaaaaggcgcaagcgcgagcctccacgggcgaaggagccacggggagtgagcaatgataccagcagtctggagacagagcggggcttcgaagagctcccattatgttcttgtcgtatggaggctcccaaaattgatagaataagcgagcgcgccggtcacaaatgcatggctaccgaaagcgtggatggggagctttccggatgtaacgccgctatcctcaagcgcgaaacgatgcgcccctcctccagagttgcattaatggtcctgtgtgagactcatagggccagaatggttaagcatcattgctgtccaggctgcggatatttttgtactgctgggacctttctcgaatgtcacccagattttcgggtggctcataggtttcataaagcctgtgtgagtcagctcaacggcatggtcttctgtcctcattgtggcgaggacgcatcagaagcccaggaggtcaccattcctaggggggatggcgtgacaccacctgctggcactgccgcacctgcccccccaccactgtctcaggacgtgcccggaagggctgatacttcccagccatcagccaggatgagaggacatggagaacctaggagaccaccctgcgaccccctagcagataccatcgattcgtctggaccttccctgaccctccccaatggaggatgcctatccgccgtgggactgccactaggccctgggcgggaggcactcgagaaagccctagtaatacaggaatctgagaggaggaaaaaactgaggtttcatccaaggcagctgtatctgagcgtcaaacagggcgaactccagaaagtcatcctgatgctcctcgataatctggatcctaactttcaaagcgatcagcaatctaaacgcactcctttgcacgctgctgcgcaaaagggatccgtggagatctgtcatgtcctgctgcaggcgggagcgaatatcaacgccgtggataagcagcaaaggacccctctgatggaagctgtcgttaacaaccatctggaggtggcaagatacatggtgcagagaggaggctgtgtgtatagtaaagaagaagatggctccacttgcttacaccacgccgctaagatcggaaaccttgagatggtgagtttgctcctatcaaccggtcaagtagacgtgaacgcgcaagacagtggcggttggacacctattatctgggcagccgaacacaaacatatcgaagtcatccggatgctgctcacccgaggagctgacgttactctgaccgacaatgaggagaatatctgtcttcattgggctagctttactggaagtgctgccatcgcggaggtgttgctgaacgcaagatgcgacctgcacgccgtaaactatcacggcgacactcccctccacatagccgcacgggaatcctaccacgactgcgtccttctattcctttctagaggcgccaatcctgaactgcgaaacaaagagggtgacactgcctgggacctaacaccagagcgatctgatgtttggtttgccctccagctgaacagaaaactgcggttaggcgtgggcaaccgggccattcggactgaaaaaatcatttgtagggatgtggcacgtggctatgaaaatgtgcccattccatgcgtgaatggggttgatggggagccctgcccagaggactataagtacatctcagagaattgcgaaacttcgaccatgaacattgatagaaatattactcaccttcagcactgcacttgcgtcgatgactgcagcagctcaaactgtttatgtggacagctaagtatccgctgttggtatgataaagatgggcgcctgctacaagaatttaataaaatcgagccccctctgatcttcgaatgcaaccaggcgtgtagctgctggcgcaactgtaaaaacagagtggtccagagtggcatcaaagtccgattacagttgtacagaaccgcaaaaatgggttggggagtgagggcactacagactattccccaggggacctttatctgcgagtacgtcggcgaacttatttcagatgccgaggccgacgtgcgagaggatgacagctatctgtttgatcttgataacaaagacggggaagtgtattgtatcgatgctcgctactacggcaatatatcacgatttataaatcacctgtgcgacccaaacattatcccagtcagggtctttatgctccaccaagatctgcgatttcctcgtatagcttttttcagttccagggacatacgtactggagaagagttgggtttcgattatggggatcgtttctgggatattaagagtaagtacttcacttgtcagtgcggttctgagaagtgtaaacatagcgccgaggccatcgccttggagcagtcacgtctggccagactggatccccatccggaactgctgccagaactgggttctctgccacccgtgaatacttag

SEQ ID NO: 108150 - DNA, 3702 bp, Artificial Sequence
  derived and/or modified sequence
atgcggggcttgccacgaggcaggggcctcatgcgggcccgaggacgaggcagggccgctcctcccggatccagaggcagaggacggggggggcctcaccgcgggcgcggccgccccagatccctactgagtttgccccgggcacaggcgtcatggacaccgcagctctcgaccgggctgaccagtccgcctgtaccgtgtttaccgtcccagggagaagctcccgccgagatgggtgccttattattagagaaggaaacacgtggtgctacggagagagtacacggatccctgggagacacacccagaagcgaggagaccctaccaaaggccaccccggactcactggaacctgctgggccttccagtcccgcaagcgttacagtcactgttggtgatgaaggggctgacactcccgttggggctacaccacttattggcgacgagtctgaaaacctggaaggggacggggacctgagaggcgggagaatcctgctgggacatgccaccaagagctttccctctagcccgtctaaaggcggatcttgtcctagtagggccaaaatgtcaatgacaggtgcagggaagtctccaccctcagttcaatctttggctatgcggctcctgagtatgccgggtgcacagggcgcggcagcggcaggatctgagcccccgcctgccactacttccccagaaggacagcctaaagtgcacagagcaaggaaaaccatgtctaaaccaggcaacggccagcctcccgtcccagaaaaacgtccccccgagatacaacatttcaggatgagcgacgatgttcattcccttggaaaggtgacctcagacctcgccaaacggagaaagctaaacagcgggggcggcctgtcagaggagctgggaagcgcgcgacggtcaggtgaggttacgctgactaagggcgacccgggcagtctggaggagtgggaaacagttgtgggcgatgacttttcattgtattatgactcctactcagtcgatgagagagttgacagcgattcaaaatcagaggtcgaagcactaacagagcagctctctgaagaagaagaagaggaggaggaagaggaggaagaagaagaggaagaagaagaggaagaggaagaagaggaggacgaggaaagtggcaatcagtctgatcggtccgggagctctggtcgtcgcaaggccaagaaaaagtggcgaaaggatagcccctgggttaaaccttcccgcaagcgtagaaagagggagccgccaagagcaaaagaacctagaggagttagtaacgatacgtctagtctggaaaccgaaaggggattcgaagaactgccgctctgttcatgtcggatggaggctccaaaaatcgaccgtatctcggaaagggcaggacacaagtgcatggccacggagtcagtagatggcgaactgagcggatgtaacgccgccatcctgaagagagagaccatgcggcccagctcccgggtggccctcatggtcctgtgtgagacacacagagcaagaatggtgaagcaccactgctgtcccggatgtggatatttctgtactgccggtaccttcctggagtgtcaccccgattttagagtagcacatcggtttcacaaggcttgcgtctcacagctgaacgggatggtgttctgtcctcattgtggcgaagacgcttctgaggctcaggaagtcacaattcctcggggagatggcgttaccccaccagcgggaacggcggctccggcacctccccccctctctcaggacgtgcctggccgtgctgacacgtcgcagccttccgccagaatgagagggcatggagagccccgcaggcctccctgtgaccccctggcagacactatcgatagctcagggccttccctgaccctgcccaacggcgggtgtctctccgccgtgggtctgcctcttggcccaggccgggaggcactcgaaaaagccctggttattcaggagagcgaacgtaggaaaaaactaaggttccatccccggcaactttatctgagcgttaaacaaggcgagctgcagaaagttatcttaatgctgctcgataatctggacccaaatttccaatctgatcagcagtcaaaaagaacccccttacacgccgctgctcagaaagggagtgtcgagatctgccacgtcttgctccaggctggggccaatattaacgcggtggataaacagcagcgaacacctctaatggaggcggtggtgaataaccatctagaggtggcacgctacatggtgcagaggggtgggtgtgtctattcaaaagaggaagacggtagcacttgccttcaccacgcggctaagatcggcaacttggaaatggtctcgctgctgttgtcgactggtcaggtcgacgtcaatgcacaggacagtggagggtggacgcctattatctgggctgctgaacataagcatatcgaagtgatacgtatgttgctgactcggggcgccgatgtgacactcactgataatgaagagaacatttgccttcactgggcaagtttcacgggttctgctgccatcgcagaagtgctcctgaatgcaagatgcgatctccatgctgtcaactaccatggcgacacacctcttcacatagcggctcgcgaatcgtaccacgattgcgtactgctgttcctcagcaggggcgctaatcccgaacttcgcaacaaggagggcgataccgcgtgggatctgaccccagagcgatctgatgtgtggttcgccctccaactcaaccggaaactgcggcttggcgtcggaaaccgggccatcagaactgaaaagatcatctgcagagacgtggctcgcggctacgagaacgttccaattccgtgtgtgaatggggtcgatggggaaccttgcccagaggactataagtacatctcagagaattgcgagactagcactatgaacatcgaccggaacatcactcacctgcaacattgcacgtgcgttgacgactgtagcagcagcaattgtctatgtggccagctttcaattcggtgttggtacgataaggacgggcgactactccaggagttcaacaagatcgaacctccactaattttcgaatgcaatcaggcctgtagctgttggaggaactgcaaaaaccgtgtggtgcaatcgggcatcaaggttaggctacaattgtaccgcactgctaaaatgggatggggagtgcgcgctcttcagactatccctcaagggaccttcatctgcgaatatgtcggagaattgatctcagacgccgaggcagacgtaagggaagatgattcatatctttttgacttagataataaggacggtgaggtatactgtattgatgcccggtactatggtaacatatcgcggtttattaatcatctgtgtgatccaaatatcattcctgtccgcgtgtttatgttgcaccaagaccttcggttcccaagaatcgctttcttttccagcagggatatacggacaggagaggagctgggtttcgattatggggaccgcttctgggatatcaagtctaagtacttcacttgccagtgtggttctgaaaagtgtaagcacagcgctgaagcaattgctcttgagcaaagtagactggcccggctcgacccacatcccgaattgctgccagagctcggcagccttccacctgtgaacacctag

SEQ ID NO: 108151 - DNA, 2667 bp, Artificial Sequence
  derived and/or modified sequence
tcagaggtggaggcactaacagaacagttgagcgaggaggaggaggaggaggaggaggaagaagaagaagaggaagaggaagaggaggaggaagaagaggaggaagatgaagagtcgggtaatcagtctgacagatctggatcttcgggtagaagaaaagccaagaaaaaatggagaaaagactctccttgggttaagcctagccgaaaacgcaggaagagagagcctcccagggccaaggaacctaggggggtgtcaaatgacacatcgagtctcgagactgagagggggttcgaagagctgcccctctgttcttgtcggatggaagcacctaaaatcgataggatctcagagagagcagggcacaaatgcatggcgaccgaaagcgtggacggggaattatccggatgtaacgcagcaatcttgaagcgtgaaaccatgagaccctcttccagagtcgctctgatggtcctgtgcgagacccaccgagctcgaatggtgaagcatcattgttgtccaggctgcggatacttctgcactgctggcacattcctcgagtgtcaccctgattttagagtagctcatcgcttccataaggcttgcgtgtcccagcttaacggaatggtgttctgtcctcattgcggtgaggatgcatctgaggcccaggaagttactatccctcgcggggatggcgtgactcctcctgcgggaactgccgctcccgcccccccgccccttagtcaggacgtgcctggccgagcagataccagtcaacccagcgctcgtatgaggggacatggggaacctaggcgccctccctgtgaccctctcgccgacacaatcgatagctccggcccgtcacttaccctgcccaacggaggctgtctaagcgccgtgggcctgcccctggggccaggtcgggaggccctggaaaaagcattagtgatacaggaatccgaaagacggaagaagcttagatttcaccccagacagctctatcttagcgtgaaacagggagagctgcagaaggtgattttaatgctactagacaacctggaccccaacttccaatcagaccagcaatccaagcgcacaccactgcacgcagccgcccagaaggggtccgtggagatatgccacgtgctgctgcaagctggcgccaatattaacgctgtcgacaaacagcaacggaccccgctcatggaggcagtcgttaataatcacctagaggtagcccgttacatggtccaaaggggggggtgcgtgtattctaaagaagaagacgggtctacgtgtcttcatcatgcggcaaagattggtaatctggaaatggtgagcctgctcttgtccactgggcaggtcgacgtgaacgcccaggacagtggtggttggacccccatcatttgggccgccgagcataagcacatcgaggtaatccgcatgcttctaacaagaggcgcagatgtgactttaaccgacaacgaggaaaatatctgcttacactgggccagtttcactggctccgctgccattgcagaagtattattaaatgcgagatgcgatctgcatgccgtgaactatcacggcgatacacccctgcatatcgcagctagggagtcttaccacgactgtgtcctcttgtttctgtctaggggcgctaaccccgagttgcgcaacaaagagggagataccgcttgggacttgacacctgaacgctcagacgtttggttcgctctgcagttaaatcggaagcttcgtctcggtgttgggaatagggcaattcgtacagaaaaaattatctgccgggacgttgccagggggtacgagaatgttcctattccctgtgtcaatggtgtggacggcgagccctgtccagaggactacaaatatatatcagagaactgcgaaacgtctacgatgaatatcgacaggaacattacacacctacagcattgtacttgtgtcgacgactgttcaagtagcaactgtctgtgtggccagctgtccatccggtgctggtatgataaagacggtaggcttcttcaggagtttaataaaatcgagccacctctaatcttcgagtgcaaccaagcctgcagctgctggagaaactgtaagaatagagtcgtgcagagtggcatcaaagtccgcctccagctgtaccgcacagccaaaatgggctggggcgtgcgggctctgcaaacaattccccaggggacattcatctgcgaatatgtgggagaactgatctcagacgccgaggctgacgtgcgggaggatgactcttacttgtttgatctcgataacaaagatggcgaggtctactgcattgacgcccgatattatggaaacatctcaagattcattaaccacttatgtgatcccaacatcatccctgtccgagtttttatgctccatcaggacctgaggtttcctcgcatcgctttctttagctccagagacatacggaccggagaagagctggggtttgactacggagatcgcttctgggacatcaaatctaaatattttacctgccaatgtggcagcgaaaaatgtaaacacagtgctgaagccatagccctggagcagtccagattagcccgactcgatcctcaccccgagctcctgccggaactagggtcattgcctcccgtgaatacctag

SEQ ID NO: 108152 - DNA, 3531 bp, Artificial Sequence
  derived and/or modified sequence
atggcagccgccgcgggagcagccgcggcagctgctgccgaaggtgaggccccggcggagatgggggctctgttactggaaaaagaaactcggggtgccacagagcgggtgcatggctccttgggcgacactccacgcagtgaggagacactaccgaaagctaacccagacagcctggaaccggccggtccctcaagcccagccagcgtgacagtgactgtgggtgacgagggcgcagacactccagtgggggccactccactcatcggggacgagagcgagaacctggagggcgacggagatctaagaggaggccgcattctcctgggacatgcaacaaagagcttcccttccagcccatccaagggaggctcctgcccttccagggctaaaatgagcatgactggggctggtaaatcccccccttccgtccagagcctcgcgatgaggctgctgtccatgcccggcgcacaaggggcagcagccgctggcagcgagcctccaccagccactacctcccctgagggccagcctaaagtgcaccgagcgaggaaaaccatgtctaaaccgggcaacggccaaccccccgtgcccgaaaagcgccctcctgagatccaacactttcggatgtccgatgatgtgcattccttgggcaaggtgacatctgacctggcgaagcgccgtaagttaaactctggaggtggcttaagtgaagagctcggctcagcgagacgaagcggggaggtgacactcaccaagggagaccccggatcactggaggagtgggagacagtggtgggggatgacttcagcctgtattatgacagttacagcgtagatgagagagttgactcagatagtaaaagtgaagtggaagctctcacagagcagctgagtgaagaggaagaagaagaagaggaggaagaagaagaggaggaagaggaggaggaggaagaggaagaggaagaggatgaggagtcggggaaccagagcgaccgctcgggctcttctgggcgccggaaagccaaaaagaagtggagaaaggattcaccctgggtgaaaccctctcggaagaggcgaaagcgagaacctcccagagcaaaggagccaaggggcgtgtcaaacgacaccagttctctcgagaccgagcgcggctttgaggagctccccctgtgcagctgccgaatggaagctccaaagatagatagaatatctgagagagccggccataagtgtatggcaaccgaatctgttgacggggaactgtctggttgcaatgcagccattctcaagcgtgaaacaatgcgtccatcttctcgcgtagccctcatggtcctctgtgagacgcacagagccagaatggtgaagcaccactgttgccccggatgcgggtacttctgtacagccggaacattcttggagtgtcatcccgatttcagggtggctcacaggtttcataaagcttgtgttagccagctgaacggtatggtgttctgcccccattgtggcgaggatgcgtccgaggcacaggaggtgacaatccccagaggcgacggcgtgaccccgcccgctggcaccgcagctccagcgccgccccctctctctcaggacgttccaggaagagcagacaccagtcagccatcagctcgcatgaggggacatggcgaacccaggcgtccaccctgcgatcccctcgcagatacgatcgactcttccggccctagcctgactctccctaacggtggctgcctgtctgctgttgggttgcccttaggacccgggcgagaagcgctcgaaaaagcactagtgattcaggaatccgagcgaaggaagaaattgagatttcacccccgccagctgtatcttagcgtcaaacagggcgaactccaaaaagtcatcctgatgctgctggacaatctcgacccaaactttcagagcgatcagcagagcaaaagaacacctttacatgcagcggcccaaaaaggctcagtggagatatgccacgtgctgctccaggctggcgctaatattaatgccgtcgacaaacagcagcgaactccactcatggaagcagttgtgaacaaccatctggaagtggcacgatatatggtgcaaagaggcggctgtgtatatagcaaggaagaggacgggagtacgtgtctgcaccatgcagccaagattggaaacctcgagatggtgagcttgcttctgtccactggccaggtggatgtgaacgcccaggacagtggcggctggacacccatcatctgggccgcggagcacaagcatatcgaggtcatccgtatgctgctcactcggggagcagacgtgactctgacagataacgaggaaaatatatgcctgcactgggctagcttcaccggaagtgcagctatcgccgaggttctgttaaatgcgaggtgtgatctacacgcggtaaactaccatggagacacccccctgcacatcgcagcccgcgagtcttaccatgattgcgtgctgcttttcctgagtcgaggtgccaatcccgaactgcgtaacaaggaaggtgacaccgcttgggatctcacacccgagaggagtgatgtctggtttgcactgcagctgaatagaaagttgcgactgggggtgggaaatcgcgcgattagaactgagaaaattatttgtcgtgatgtagcacgcggctatgagaatgtgcccattccctgcgtaaatggggtggatggggaaccgtgccctgaagactataaatacatttcagagaattgtgagacttcaaccatgaatatcgatcgcaatattactcacctgcagcactgcacttgtgtggacgactgttccagttccaactgcctttgcggtcaactgtccattcggtgttggtacgacaaagatggacgattgctgcaggaatttaataagattgaacctccgctgatttttgaatgcaatcaggcctgctcttgttggaggaattgcaaaaatcgggttgtgcagtccggcataaaggtgcgactccagctttacaggactgccaagatgggatggggtgttagagccctacagacgatcccacaggggacgtttatttgcgaatacgttggtgaattgatctctgacgccgaggccgatgtccgagaagatgattcctatctgttcgatctggacaataaggatggtgaggtttattgcattgatgctcgatactatggaaacatctcccgcttcattaaccatctgtgtgaccctaacattatccccgtgcgggtgtttatgttgcaccaggatctgaggttcccacgaatagctttctttagttcccgggacatccgaactggggaggaactgggctttgattacggagacaggttttgggacattaagagcaagtacttcacctgtcagtgtgggagtgagaagtgcaaacacagtgccgaggccatcgcactggaacaaagccgtctggcccgactggacccccacccagagcttctaccggaactggggtcactgccgcctgtgaatacctag

SEQ ID NO: 108153 - DNA, 3702 bp, Artificial Sequence
  derived and/or modified sequence
atgcgaggactgccacgcggccggggattaatgcgcgcacggggtcgcggcagggccgcccctcccggatctagaggcagaggccgtggaggacctcaccggggcaggggtaggcccagatccttgctgtctctgcccagggcgcaggccagctggacccctcaattgagcaccggactcaccagcccccctgtcccttgtctgcccagccaaggggaggctcctgcagagatgggtgcactcctcttggaaaaagaaactaggggcgcgacagagcgagtgcatggcagtctaggtgacactcccagaagcgaggaaacactcccaaaagccacccctgactctttggagcccgccggacctagctcaccggcgtctgtcaccgtaactgtgggcgacgagggagctgacactcccgtcggcgccacccccctgattggagatgaaagcgagaaccttgaaggcgacggcgacctgagaggcggtcggatcttgttaggacatgcaacgaagagttttcctagctctccctcaaaggggggcagctgcccttctcgcgcgaagatgtctatgactggcgccgggaaatccccaccaagcgtgcagagcctggctatgcgcttgctgagtatgccgggggcccagggggcagcagccgccggaagcgaacctcccccggccaccaccagcccagagggtcaaccaaaggtccacagggcaagaaagacaatgtccaagccaggaaatggccagccaccggtgccagagaagcggcctcctgaaatccagcatttccgcatgagcgatgatgtccacagtctggggaaagtaacatcagacttagctaaacggcgcaagctgaattcgggcggtggcctcagtgaggagctgggttcggcaagaaggtctggagaggtcacactgacaaagggcgaccctgggtctcttgaagagtgggagacagtggtgggcgatgacttttctctgtactatgattcgtacagcgtggatgagcgtgtagacagtgacagcaaatcagaagttgaggcactcacagagcagcttagcgaagaggaagaggaggaggaagaagaagaggaagaagaggaagaggaggaagaggaggaagaagaagaggaagacgaagagagtggcaatcagagcgacaggagtggctccagtggacgcaggaaggcaaaaaaaaagtggcgcaaagattcaccgtgggtgaaaccatcccgcaaacgtagaaaaagggagcctccgcgggccaaggaaccccggggcgtgagtaacgacacctccagtctggagacggaaagggggttcgaggaactcccattatgttcctgcagaatggaggctccaaaaatcgacaggatttccgagagggcagggcacaagtgtatggctaccgagagcgtcgatggcgaactgagcgggtgcaatgccgccatcttgaagagagagactatgcgcccttcctctagagtggcgctcatggtcctgtgtgaaacccatagggcccgtatggtgaaacatcactgctgtcccggatgtgggtatttttgcaccgcaggcacatttctcgagtgtcatcccgattttcgagtagcgcacagatttcataaagcctgcgtctctcagctgaacggaatggtgttctgtcctcattgtggcgaggacgcttccgaggctcaggaggtcaccataccacgaggggacggcgtgactccacctgccggcacggctgctccggctcccccgccattgtcacaggatgtgccgggacgagcggatacctcccaaccatcagccagaatgcgcgggcacggcgaacctagaaggcccccatgcgaccctctcgccgacacaatcgacagtagcggtccaagtctgacattaccgaatggaggttgtctgtcagccgtgggcctccccctcggccccggtagagaagcccttgagaaggccctggtgatacaggagtccgagcggcggaagaaactcagattccaccccaggcagctctatctgtccgtcaaacagggggagctgcaaaaagtgattttgatgctgctggacaacctggaccccaattttcaatctgatcagcagagcaaaaggacaccactgcacgcagcagcccaaaaggggtccgtggagatttgtcacgtgttactgcaggccggcgctaatattaatgcagttgacaaacagcagagaactccattgatggaggcagtcgtcaacaatcatctagaggtggctaggtatatggtgcaacgagggggctgtgtctacagcaaggaggaggatgggtctacttgtctccaccatgccgctaaaatcggcaatctggaaatggtcagcctgttgctgtccacaggtcaggtggacgtcaacgcccaggactcaggtgggtggactccgattatttgggccgctgaacataagcacatcgaggtcatccgtatgcttctaactcgtggcgctgatgtaacgctcacggataatgaggagaatatttgcctacattgggcgagctttaccggatctgctgctattgcagaggttctactgaacgcccggtgcgatctccacgcggtcaactatcacggggacacaccgctccatatcgccgccagggagtcctatcacgactgtgtgctgctgttcctgagcaggggagctaatcctgagttacgcaataaggaaggcgacacggcctgggaccttacaccagaaagaagcgacgtgtggttcgccctgcagctgaaccggaaattacgccttggcgttgggaacagggccataaggacggagaagatcatctgccgggatgtggctcgtgggtatgaaaatgtcccgatcccttgcgtaaatggcgttgacggagagccctgccctgaggattataagtatatttccgagaactgcgaaacctccactatgaatattgaccgcaatataactcatcttcagcattgcacctgtgtggatgactgctcctcatcgaactgtctctgtggacagctgagtatccgctgctggtatgacaaggatggtcgcctgctgcaagagttcaacaagattgagccacccctgatattcgaatgcaatcaggcttgttcatgttggcggaattgcaagaacagggtggtgcagtccggaataaaagtcagactgcagctctatcgcacagcaaagatgggatggggcgtccgggctctgcagacaattcctcagggaacattcatctgcgagtatgttggtgagctaatctctgacgccgaggctgacgtgcgcgaggacgattcttacttattcgatcttgataataaagacggcgaggtatactgtatcgatgcacggtattatggcaatatatcgcggttcattaaccacctttgcgatcccaatatcataccagtacgcgtgtttatgctgcaccaggatctccggtttccgagaatcgcgtttttcagctccagagatatccggaccggggaggagcttggattcgattatggcgataggttctgggatatcaagtcaaagtacttcacgtgccagtgcgggtcagagaaatgcaagcattctgccgaggccatcgccctggaacagagtaggctggcccgcctggacccccaccctgaactgcttccagaacttggatccctcccgccagtaaacacatag

SEQ ID NO: 108154 - DNA, 3531 bp, Artificial Sequence
  derived and/or modified sequence
atggccgccgccgctggcgcagcagccgccgccgctgccgaaggcgaggcccctgctgaaatgggggctctcctcctcgaaaaagaaacacggggggctaccgaacgggtgcatggtagtttaggggataccccacgctctgaggagactttaccgaaggccacacctgattctctggaaccagccggtccaagttcaccagcgtcagtcactgtcactgtgggggatgagggagccgacacccccgtcggagctactcccctgattggcgatgaatctgagaaccttgagggcgatggtgacttacgggggggcagaatcctgctgggacacgcaaccaaaagctttccatcttccccgtcgaaaggaggctcttgtccgagtagggccaagatgtcaatgacgggagccggcaaaagccccccttccgtacagtccctggcaatgcgactgctatccatgcccggagcccagggggctgccgcagcaggtagtgagcctccacctgccaccacatcccctgaagggcaacccaaggtccatagagcgagaaaaacgatgagcaaacccggtaacggccagccccccgtgccggagaagcgccctcctgagattcagcatttcagaatgtccgacgatgtccactctctgggtaaggtgacctccgacctggccaaaagaagaaaactaaatagcggcggaggcctctcagaggaacttggctccgccagacgctccggggaggtgaccctgacaaagggcgatcctgggagcctcgaggagtgggaaactgtggtcggagatgattttagtctatactacgacagctactcggtagacgaaagggtggacagcgatagtaagagcgaagtcgaggcattaaccgagcagctgtccgaagaggaggaggaggaggaggaagaggaggaagaagaggaggaagaggaggaggaagaagaagaagaggaagacgaggagtccggcaatcagagtgatagatcaggaagctctggcaggcggaaggcgaagaaaaagtggaggaaagattccccatgggttaaaccttctagaaaaagacgcaagcgcgagccccccagagctaaggagccaaggggagtatccaatgacaccagcagcctggaaactgagagaggctttgaagaattgcccctgtgcagttgtcgcatggaagctcctaagatcgatagaatctccgagcgcgctggccacaagtgcatggcaacagaaagtgtggatggggagttaagtggttgtaacgccgccatcctcaaacgcgaaactatgcgccccagttctcgtgtggctcttatggttttgtgcgagacacaccgggcaagaatggttaaacaccactgttgtccaggttgcggatacttttgcacagcagggacatttcttgaatgtcacccagatttcagagtggctcataggttccataaagcatgcgtgagccagctaaatggtatggtgttttgtccacactgcggcgaggatgcaagcgaggctcaagaggtgaccattccccgcggggacggagtgactccccctgctggtacagccgctcccgcaccccctcccctgagccaggatgtgcctgggagagccgacacctctcagccctccgcaaggatgcgggggcacggagagcctcgaaggcctccctgcgatcctctcgctgacaccatagattccagtggtccgtccctgaccttgccgaatggtggttgcctctccgcagtgggactgccgctgggacctgggcgggaggctttagagaaagcgctggttatccaagaatcagagcgaaggaaaaagctcagattccaccctcggcaactttacctaagcgtgaaacaaggcgaattgcagaaggtgatactaatgctcctggataacctggatcctaattttcaaagtgaccaacagtccaaaagaacaccgctccatgcagctgcacagaaaggatcagtggaaatctgtcacgttctattgcaagctggggccaacatcaatgcagtggataagcaacagcgtactccgctgatggaggcagtcgtgaacaatcatcttgaggtcgcacgatacatggtgcagcgcggaggctgcgtttactccaaagaagaagatgggtccacatgcttacatcacgccgctaaaatcggcaacttggaaatggtgtcactcctcttatctaccgggcaggtcgatgtgaatgctcaggactctggaggatggacacctattatttgggctgccgagcacaagcacattgaagtgattcgcatgttgctgaccaggggcgccgatgttacgctgactgataacgaggagaacatttgtttgcactgggccagctttactggctctgccgccatagctgaagtgctactgaacgcccggtgtgaccttcacgctgtgaattatcatggcgatacccccctgcatatagccgctcgcgagtcctaccatgattgcgtactcctcttcctctctagaggagccaacccggagctgcgaaacaaagagggcgatacagcctgggatctcacccccgagcgcagtgacgtttggttcgctctgcagttaaaccgcaaattgcggctcggtgtgggaaatcgggccattcggactgagaagataatttgccgggatgtggccagaggttacgagaacgtcccaatcccatgtgtgaatggagtggatggcgaaccatgtccagaagattacaaatatatcagcgaaaactgtgaaacatcaacgatgaacatcgatcgtaacattacacatttgcagcactgcacctgtgtcgatgattgcagtagttcaaattgcctatgcggacagctctcaataagatgctggtacgacaaggacgggcgtctgctccaggagtttaataaaatagaaccacctctgattttcgaatgtaaccaagcgtgctcgtgctggaggaactgtaagaacagagtggtccaaagcggcattaaggtgagacttcagctataccgaaccgccaagatggggtggggcgtccgtgccctccaaaccattccccagggcactttcatttgtgagtacgtgggggagcttatttcggacgcggaggccgacgtgagagaggatgactcctaccttttcgatcttgacaacaaggatggcgaggtgtactgtatcgatgccagatactatggtaatatttccaggtttattaatcacctgtgcgatccaaatataatacccgttagagtgttcatgctgcatcaggaccttagattccctcgcatcgcctttttttcgtcccgggatatccgaactggagaagagctgggtttcgactacggcgatcggttttgggacatcaagtctaagtatttcacttgccagtgtggatcggagaagtgtaaacacagtgcagaagcaattgctctggaacagagcagactggcgcgattggacccgcacccggagttgttgcccgagctcgggagcctgccccccgtgaatacatag

SEQ ID NO: 108155 - DNA, 3702 bp, Artificial Sequence
  derived and/or modified sequence
atgcggggtctgcctcgcggccgcggcttgatgagagcaagggggcgagggcgcgcagcaccacctggcagtcgcggcaggggcaggggcggtcctcaccggggcagaggtaggccacggagtctcctgtctttgccacgtgcccaggcctcctggacacctcagttatctacagggttgactagtcccccagtgccctgccttccttcccagggtgaggcacctgcagagatgggagctctcctgctagagaaggagacccgtggtgccactgagcgagtccatgggtccttaggcgataccccaaggagtgaagaaacgctcccaaaggctaatcctgactcactggaacccgctgggccaagctctcccgccagcgtgactgttaccgtaggagatgagggggctgacacacccgtgggagcaacccctcttatcggtgacgagtctgagaatctggagggcgatggcgacctgagagggggcagaattctgctgggccacgcgacgaaatcattcccaagttctcctagcaagggcggaagttgcccatctagggcaaaaatgtctatgacgggggctggaaagagtccacccagcgtccagagcttggcgatgcggttgctttcaatgcctggcgctcagggtgccgcagcggccggatccgagcctcctcccgccacaacatcccccgaagggcagcccaaggtgcatagagcccggaagacaatgtctaagcccgggaatggacaaccgcccgtgcctgaaaaacggcctcctgaaattcaacactttaggatgtctgatgacgtgcacagcctcggcaaggtcacaagtgacctcgctaagagaagaaagctcaatagtggcggaggcctgagcgaagagctgggctccgcacgccggtcaggcgaggttaccctcaccaagggagaccccggcagtctcgaggaatgggagacggttgtgggggatgacttctcactttactacgacagttattccgttgacgagcgcgtggacagcgactctaagagtgaagtggaggctctaaccgagcaattgagtgaggaggaggaagaagaagaagaggaggaggaggaagaggaggaggaagaggaggaagaggaagaggaggaagatgaggagagcggcaaccagtccgaccggtccggatcttccgggcgccgaaaggctaagaagaagtggaggaaggactccccctgggtcaagccatctcgcaagcgccgcaagagagagccacctcgggcgaaagaaccaaggggggtttcaaatgacacgagtagcctcgaaacagaacgagggtttgaggagctgccactttgttcgtgccgcatggaggctcctaagatcgaccgaatctccgaacgggcagggcacaagtgcatggccacagagtctgtggacggggaactgtccgggtgcaacgcagccatcttaaagcgcgagactatgcgtccttcttccagggtcgctctgatggtgctatgtgagacacatcgagcacgcatggtcaagcatcactgctgcccgggatgcgggtatttttgcacagcaggcacttttctggagtgccatcctgattttagagttgcccaccgtttccataaggcgtgtgtctctcagcttaacggcatggtcttctgtccacattgcggtgaggacgcgagcgaggcccaagaagtgaccattccaaggggagacggcgtgacacctcctgctggcacagctgctccagcacctccacccttgtcgcaggatgtgcccgggagagccgacacctcgcaaccctcagcccgcatgcgaggccacggtgagcccaggcggcccccctgcgatccgctggcagacacgatagatagcagcggcccctcgctcaccctgccaaacggaggttgcctctccgccgtcgggctgcccctaggtcctggtagggaagcactagagaaggcgctggttatacaggaatcagagaggcgcaagaaactgcgctttcatccgcgccagctgtacttgtccgttaagcagggagagttgcagaaggtcattctcatgctcctagataacctggatcctaatttccagtcagaccagcagtctaaaaggacccccctgcacgctgctgcacagaaaggctcagtggaaatctgccacgttttgctgcaggctggagccaacatcaatgccgtcgataagcaacagcggacaccgcttatggaagcagtcgtgaacaaccaccttgaagtagcacggtacatggtgcaacgagggggctgtgtgtactctaaggaggaggacggaagtacctgcctgcatcacgcggcgaagatcggcaacctggagatggtgagcctcctcctgtcaaccggacaggtggatgtgaatgcacaggattcaggaggctggactcctatcatatgggcggccgaacacaaacatatagaagtgataagaatgctgctgaccaggggcgctgacgtgaccctgaccgacaatgaagagaacatttgtctccactgggcttcttttaccggttcagccgctatagctgaagtcttgctaaatgcccggtgtgatctgcacgccgtaaattatcacggagatacgcccctgcacattgccgcccgagagagctaccacgattgtgtgttactttttctgtccagaggcgccaacccggagctgaggaacaaggagggtgacacagcatgggatctcacccctgagcgatcagacgtgtggtttgctctccaactgaatcgaaaacttagattgggtgtaggtaaccgtgcaatacgaacggaaaagatcatatgtcgggacgttgcccggggctacgagaatgtgcccattccatgcgtgaatggcgttgatggagagccatgtccagaggattataaatatatcagcgagaattgcgaaaccagcaccatgaacattgatcgtaacattactcacctccagcattgcacgtgtgtcgatgactgcagctctagcaattgtctttgcggacagctaagtattagatgctggtatgataaggacggcaggttgctgcaggaatttaacaagattgagccgcccttaatctttgagtgcaaccaggcctgcagctgctggcgtaactgcaaaaatcgagtggtgcagagcggaatcaaggtgaggctgcagctctaccggactgcaaagatgggatggggtgtccgagccctccagactattccccagggaaccttcatttgcgagtacgtaggggagttaatctcggatgctgaggccgacgtgagagaggacgacagttacctgtttgacctggacaacaaggacggggaggtgtactgcattgatgctcgatactacggcaatatcagccggttcattaatcatctttgtgatcctaatattattcccgtgagagttttcatgctacatcaggacttgcgttttcctcgcatcgcgtttttctcctccagggacattcggaccggggaagaactggggttcgactacggcgataggttctgggatattaagtccaaatactttacctgccagtgtggatccgagaagtgcaagcattccgcggaggcaatcgccctggagcagtctagacttgcaaggctggacccacatccggagctcttacctgaactgggctctttgccaccagttaatacctag

SEQ ID NO: 108156 - DNA, 3531 bp, Artificial Sequence
  derived and/or modified sequence
atggctgctgccgccggagcggccgccgcggcggcagctgaaggcgaagctcccgctgaaatgggagctctgctactggagaaggagactcgcggggcaactgaaagggtgcacggctcccttggcgatacacccaggagtgaagagactttaccaaaagccaaccccgacagtttggagccagcgggcccttccagtcctgcctctgtgaccgtgactgtgggcgatgagggagcagacacgcccgttggagctaccccactaatcggagatgaaagtgaaaatctggagggtgacggggatcttagaggcggcagaatcctcctgggtcacgcaaccaaatcctttccctcgtccccgtctaaaggtggttcctgccctagccgagcgaagatgagcatgaccggggccggcaaaagccctccttccgtccagagcctcgctatgagattattgtcaatgccaggtgcccaaggcgcggcagccgctgggagcgaacctccccctgctaccacctcacctgagggccaaccaaaggtgcatagggctcgcaagactatgtcgaaaccgggcaacggccagccacctgtgcccgagaagagacccccagagatccaacacttccggatgagtgatgatgttcacagtctcggcaaggtaacgtcagacctggccaaaaggagaaagcttaattcaggtggcggactctcggaggagctcggcagtgctaggagatcaggagaagtaaccctgaccaaaggcgatcctggcagcctggaggagtgggagacggtcgtgggggacgatttcagtctctactacgatagctatagtgttgatgagcgcgttgatagcgattccaaaagcgaagtcgaggccctgactgagcagctgtcggaggaggaagaggaagaagaagaagaagaggaagaggaagaagaagaagaagaggaagaagaggaagaggaagatgaggagtctggcaatcagagtgacaggtcgggctccagcggaaggcgaaaagccaaaaaaaagtggagaaaggacagcccctgggtcaagcctagccgaaagaggcggaaacgggaaccccctcgagccaaagaaccccgaggcgtgtctaacgacactagtagccttgagacagagcggggtttcgaagagctcccgctgtgcagttgccgcatggaggcaccgaagattgaccgtataagtgagagagccgggcataagtgcatggcaactgaaagcgtggacggggagctgagcgggtgtaacgctgcgattctgaagcgggagaccatgaggccatctagcagagtggcactgatggtgttatgcgaaactcaccgggctcgtatggttaaacatcattgctgtccgggctgtggatatttttgtaccgccgggacttttctggagtgtcatcctgacttcagagtcgcacaccgtttccataaagcttgcgtgtctcagctgaatggaatggtcttctgtcctcactgtggcgaagacgctagcgaagcacaggaagtcactatccctcgcggcgacggcgtaactccccccgccggcacagcggctcctgccccaccgcccctgagccaggacgttcccgggcgcgcagacacaagccagccttctgcccggatgcgggggcatggggagccccgtcgcccgccttgcgaccccctggctgacacaatcgacagttccggcccgtctctcactctacccaatggtgggtgcctgagcgcagtgggactgcccctggggcctggtagagaggccctggaaaaagcattagttatccaggaatctgagcgtcgtaagaagctgcggtttcatccccgacagctgtatctgtctgtcaaacagggagaactgcagaaagttattctgatgctgcttgataatctggaccctaactttcagagtgatcaacagagtaagagaacccctctgcatgcagccgcccagaaaggttccgtcgaaatatgccacgtgctgctacaggctggagctaacataaatgctgtggacaagcagcagagaacacctctgatggaggcagttgtgaataaccatctagaagttgccagatatatggtgcagcggggaggctgcgtttactccaaagaggaggacggcagcacatgtcttcatcatgccgctaagatcggcaatttagagatggtctctctgctactatccaccggccaggtggatgttaacgcccaggatagcgggggctggacgcctataatttgggctgcggaacataaacacattgaggtgattcgtatgctgcttactcgtggggccgacgtgacgttgactgataacgaggagaacatctgcctgcactgggcatcgttcactggtagtgctgccatcgccgaggtgctcttaaacgctcgctgtgacctgcatgccgtcaactaccacggcgacacccccctccatatagctgcccgagagagttaccatgactgtgttctgctgttcctcagccgcggcgccaacccagaactgcgcaacaaagaaggggatactgcatgggacttaacccccgaacggagtgacgtatggtttgcacttcagttgaacagaaaactgcggctcggtgttggcaaccgggcgatacggaccgaaaagatcatatgccgtgatgtggcgagggggtacgagaacgttcctatcccttgcgtgaacggtgtggacggagagccctgccctgaagactataagtacatctctgagaactgcgaaacgtctacaatgaatatcgacaggaatattacccatttgcagcattgcacttgtgtggacgactgtagcagttccaactgcctgtgtggccaactgagtatccgctgctggtacgataaagatggacgattactgcaggaattcaataagatagaaccacccctgattttcgagtgtaaccaggcttgttcatgctggcgcaactgcaagaaccgggtcgtacaatctgggatcaaagtccgtctgcaactctatcgaactgcaaaaatggggtggggagtgagagccttgcagactattcctcagggaacgtttatttgcgaatacgttggggaactaattagtgatgctgaagctgatgttcgtgaagacgattcttacctctttgatctggacaataaggatggagaggtgtattgcatcgatgcaagatactacggtaacatttctcggttcattaatcacctgtgtgaccccaatatcattccggttcgggtgtttatgctccaccaggaccttagatttccgagaattgcattcttcagctcccgggatatcagaacaggggaggaattgggtttcgactatggcgatcgattctgggatattaagagtaaatattttacatgtcagtgtggtagcgagaagtgcaagcacagcgctgaggcgatcgccctcgagcagagtcgtctcgcccggctggaccctcatccagagctgcttccagaactaggctccctcccacctgtcaacacgtag

SEQ ID NO: 108157 - DNA, 2667 bp, Artificial Sequence
  derived and/or modified sequence
tctgaggtggaagcccttaccgaacagctaagcgaggaggaagaggaggaggaggaggaagaggaggaagaagaggaggaggaagaggaggaagaggaagaggaggacgaggaatctggcaatcagagcgataggagtggatcttcaggccgccgaaaagctaagaagaaatggagaaaggactcaccttgggttaagcctagtcgcaaaaggaggaaacgcgagccacccagagctaaagaaccacgcggtgtcagtaacgatacttcctccctcgaaaccgagcggggattcgaggagctgcctctctgtagctgtagaatggaagccccgaaaattgaccgcatttcagaaagagcaggacataagtgcatggctaccgaatcagtggatggcgaactcagcgggtgcaatgctgcaattttgaagcgtgagactatgaggccctctagtcgggtggctctgatggtgctatgtgagacacacagagctaggatggttaaacatcattgctgtcctgggtgtggatatttctgcaccgcagggacattccttgagtgtcaccccgacttccgggtggctcaccggttccacaaagcatgcgtctcacagctaaacggcatggtgttctgccctcactgcggtgaagatgctagcgaggcccaggaagtcacaattccacgtggggatggcgtgaccccacctgccgggaccgcagcacccgctccaccaccactgtcgcaagacgtgcctggcagagctgatacatctcagccctcagctcggatgcggggccacggggagccgaggcgacccccgtgcgaccctctggcagacacaattgatagttctgggccgtcactaacattgcccaatggtggctgcctgtctgccgttggccttccgctcggccccggtagagaggctctggagaaggctctggtaatccaggaaagcgaaaggcggaaaaagttgcgctttcaccccaggcagctttacctttccgtcaagcaaggcgagctgcaaaaagtgatcctgatgctgctggataatctagacccaaatttccagagcgaccaacagagcaagcgtacaccactgcacgctgctgcccagaaaggttctgtggaaatttgtcacgtcctgttgcaggctggcgccaacataaacgctgtggacaaacaacaacgcacgccactaatggaggcggtggtcaacaaccacttggaagtggctaggtacatggtgcagagaggggggtgcgtttatagtaaagaggaggatggttctacttgtctgcatcacgctgccaaaatcggcaaccttgaaatggtcagccttctgctatcaaccggccaggttgacgttaacgcacaggactccggaggatggactccaataatctgggctgccgaacacaagcacattgaagtgatccggatgttgctgacccgcggcgctgatgtcactcttacagacaatgaggaaaatatctgcctgcactgggccagcttcacgggatccgctgcaatcgcagaggtcctcctgaacgcacggtgtgatctgcacgccgtaaactatcacggagataccccgctgcacatcgcagcgagggagtcttaccacgattgcgtgctgctcttcctttcacggggggccaacccggaactcaggaataaggagggggatactgcctgggacctgacccccgagcggagcgatgtttggtttgcattgcagctcaacaggaagttaagactaggggtggggaaccgcgccatccgcacggagaagattatctgccgggacgttgcgagaggatatgagaatgtcccaatcccctgcgttaacggcgtcgacggtgaaccctgcccagaagattataaatacatctccgaaaattgtgagacctcgaccatgaatatcgaccgaaatattacacacctgcagcattgtacatgcgtcgacgattgtagcagttctaattgcctctgtggccagttgtccatcaggtgctggtatgacaaggacggcagactgttgcaggagtttaataaaatcgaaccgccactcatctttgaatgcaaccaggcctgttcttgctggaggaactgcaagaatagagtagtccagtcaggcattaaagtgcggctgcaactctaccgcaccgccaagatgggatggggggtccgcgctctgcagacaatacctcagggaacgttcatttgcgagtatgttggcgagctcatcagtgacgccgaagctgatgtgagagaggacgattcctacctgtttgacttggataacaaggatggcgaggtgtattgtattgatgctcggtattacggtaatattagccggttcatcaatcacctgtgcgacccaaacatcatcccagtacgtgtgtttatgctgcatcaggacttaagattcccgcgaatcgcatttttttccagccgggacattcgaaccggcgaggaactcggcttcgactacggggataggttttgggatatcaaatcaaagtactttacatgccagtgcggcagcgagaaatgtaagcacagcgctgaggccattgccctggaacagtccagactggcccgcctggacccccacccggaactcctgcctgagctaggcagcctgcctccggtcaatacctag

SEQ ID NO: 108158 - DNA, 3702 bp, Artificial Sequence
  derived and/or modified sequence
atgaggggcctgccccggggccggggcctgatgagggcccggggccggggccgggccgcccctcctggcagccggggccggggccggggcggcccccaccggggccggggccggcccaggagcctgctgagcctgccccgggcccaggcctcctggaccccccagctgagcacaggcctgaccagcccccctgtgccctgcctgcccagccagggcgaggccccagctgagatgggcgccctgctgctggagaaggagaccaggggggccacagagcgggtgcacggcagcctgggggacacccccaggtctgaggagaccctgcccaaggccaccccagacagcctggagcctgctggccccagcagccctgcctctgtgacagtgacagtgggagatgaaggagctgacacccctgtgggcgccacccccctgattggagatgaaagtgagaacctggagggagatggagacctgcggggcggccgcatcctgctgggccacgccaccaagagcttccccagcagccccagcaaaggaggcagctgccccagccgggccaagatgtccatgaccggggccggcaagagcccccccagcgtgcagagcctggccatgaggctgctgtccatgcctggggcccagggcgctgctgctgctggcagcgagcccccaccagccaccaccagccctgagggccagcccaaggtgcaccgggccaggaagaccatgagcaagccaggaaatggccagccccctgtgcctgagaagaggcctcctgagatccagcacttcaggatgtctgatgatgtgcacagcctgggcaaggtgaccagtgacctggccaagaggaggaagctgaacagcggcggcggcctgtctgaggagctgggcagcgccaggagaagtggagaggtgaccctgaccaagggggaccccggcagcctggaggagtgggagaccgtggtgggagatgacttcagcctgtactatgacagctacagcgtggatgagcgggtggacagcgacagcaagtctgaggtggaggccctgacagagcagctgtctgaggaggaggaggaggaggaggaggaggaggaggaggaggaggaggaggaggaggaggaggaggaggaggaggatgaggagagcggcaaccagagcgacagaagtggcagcagcggccgcaggaaggccaagaagaagtggaggaaggacagcccctgggtgaagcccagcaggaagaggaggaagcgggagcccccccgggccaaggagccccggggcgtgtccaatgacaccagcagcctggagacagagcggggctttgaggagctgcccctgtgcagctgcaggatggaggcccccaagattgaccgcatcagcgagagagctggccacaagtgcatggccacagagagcgtggatggagagctgagcggctgcaatgctgccatcctgaagcgggagaccatgaggcccagcagccgggtggccctgatggtgctgtgtgagacccaccgggccaggatggtgaagcaccactgctgccccggctgcggctacttctgcacagctggcaccttcctggagtgccacccagacttccgggtggcccaccgcttccacaaggcctgtgtgtcccagctgaatggcatggtgttctgcccccactgtggagaagatgccagcgaggcccaggaggtgaccatccccagaggagatggagtgaccccacctgctggaacagctgccccagcccccccacccctgagccaggatgtgcccggccgggctgacaccagccagcccagcgccaggatgaggggccatggagagcccaggaggcctccctgtgaccccctggccgacaccatcgacagcagcggccccagcctgaccctgcccaatggaggctgcctgtctgctgtgggcctgcccctgggccctggccgggaggccctggagaaggccctggtgatccaggagagcgagaggaggaagaagctgcgcttccacccccggcagctgtacctgtctgtgaagcagggcgagctgcagaaggtgatcctgatgctgctggacaacctggaccccaacttccagagcgaccagcagagcaagaggacccccctgcacgccgccgcccagaagggctctgtggagatctgccacgtgctgctgcaggccggggccaacatcaatgctgtggacaagcagcagaggacccccctgatggaggccgtggtgaacaaccacctggaggtggcccgctacatggtgcagaggggcggctgtgtgtacagcaaggaggaggatggcagcacctgcctgcaccacgccgccaagattggcaacctggagatggtgtccctgctgctgagcacaggccaggtggatgtgaatgcccaggacagcggcggctggacccccatcatctgggccgctgagcacaagcacattgaagtcatccgcatgctgctgaccagaggagcagatgtgaccctgacagacaatgaggagaacatctgcctgcactgggccagcttcaccggcagcgctgccatcgccgaggtgctgctgaatgcccgctgtgacctgcatgctgtgaactaccatggagacacccccctgcacatcgccgcccgggagagctaccatgactgtgtgctgctcttcctgagcagaggagccaaccctgagctgaggaacaaggagggggacacagcctgggacctgaccccagagaggagtgatgtgtggtttgccctgcagctgaacaggaagctgcggctgggcgtgggcaacagagccatcagaacagagaagatcatctgcagagatgtggcccggggctatgaaaatgtgcccatcccctgtgtgaatggagtggatggagagccctgcccagaggactacaagtacatcagcgagaactgtgagaccagcaccatgaacatcgacaggaacatcacccacctgcagcactgcacctgtgtggatgactgcagcagcagcaactgcctgtgtggccagctgagcatccgctgctggtatgacaaggatggccgcctgctgcaggagttcaacaagattgagcccccactcatctttgagtgcaaccaggcctgcagctgctggaggaactgcaagaacagagtggtgcagagcggcatcaaggtgcggctgcagctgtacagaacagccaagatgggctggggcgtgcgggccctgcagaccatcccccagggcaccttcatctgtgaatatgtgggggagctgatcagtgatgctgaggctgatgtgcgggaggatgacagctacctgtttgacctggacaacaaggatggagaggtgtactgcattgatgcccgctactacggcaacatcagccgcttcatcaaccacctgtgtgaccccaacatcatccctgtgcgggtcttcatgctgcaccaggacctgcgcttccccagaattgccttcttcagcagccgggacatcagaactggagaggagctgggctttgattatggagaccgcttctgggacatcaagagcaagtacttcacctgccagtgtggcagcgagaagtgcaagcacagcgctgaggccatcgccctggagcagagccggctggcccggctggacccccaccctgagctgctgcctgagctgggcagcctgccccctgtgaacacctag

SEQ ID NO: 108159 - DNA, 3531 bp, Artificial Sequence
  derived and/or modified sequence
atggctgctgctgctggagctgctgctgctgctgctgctgagggggaggccccagctgagatgggcgccctgctgctggagaaggagaccaggggggccacagagcgggtgcacggcagcctgggggacacccccaggtctgaggagaccctgcccaaggccaccccagacagcctggagcccgccggccccagcagccctgcctctgtgacagtgacagtgggagatgagggcgctgacacccctgtgggcgccacccccctgattggagatgaaagtgagaacctggagggagatggagacctgcggggcggccgcatcctgctgggccacgccaccaagagcttccccagcagccccagcaagggcggcagctgccccagccgggccaagatgtccatgactggagctgggaagagccccccatctgtgcagagcctggccatgaggctgctgtccatgcctggggcccagggcgctgctgctgctggcagcgagcccccaccagccaccaccagccctgagggccagcccaaggtgcaccgggccaggaagaccatgagcaagccaggaaatggccagccccctgtgcctgagaagaggcctcctgagatccagcacttcaggatgtctgatgatgtgcacagcctgggcaaggtgaccagtgacctggccaagaggaggaagctgaacagcggcggcggcctgtctgaggagctgggcagcgcccggcgcagcggggaggtgaccctgaccaagggggaccccggcagcctggaggagtgggagaccgtggtgggagatgacttcagcctgtactatgacagctacagcgtggatgagcgggtggacagcgacagcaagtctgaggtggaggccctgacagagcagctgtctgaggaggaggaggaggaggaggaggaggaggaggaggaggaggaggaggaggaggaggaggaggaggaggaggatgaggagagcggcaaccagagcgacaggagcggcagcagtggaagaaggaaggccaagaagaagtggaggaaggacagcccctgggtgaagcccagcaggaagaggaggaagcgggagcccccccgggccaaggagccccggggcgtgtccaatgacaccagcagcctggagacagagcggggctttgaggagctgcccctgtgcagctgcaggatggaggcccccaagattgaccgcatcagcgagcgggccggccacaagtgcatggccacagaatctgtggatggagagctgagcggctgcaatgctgccatcctgaagcgggagaccatgaggcccagcagccgggtggccctgatggtgctgtgtgagacccaccgggccaggatggtgaagcaccactgctgccccggctgcggctacttctgcacagctggcaccttcctggagtgccacccagacttccgggtggcccaccgcttccacaaggcctgtgtgtcccagctgaatggcatggtgttctgcccccactgtggggaggatgccagcgaggcccaggaggtgaccatccccagaggagatggagtgaccccacctgctggaacagctgccccagcccccccacccctgagccaggatgtgcccggccgggctgacaccagccagcccagcgccaggatgaggggccacggggagccccggcggcccccctgtgaccccctggccgacaccatcgacagcagcggccccagcctgaccctgcccaacggcggctgcctgtctgctgtgggcctgcccctgggccctggccgggaggccctggagaaggccctggtgatccaggagagcgagaggaggaagaagctgcgcttccacccccggcagctgtacctgtctgtgaagcagggcgagctgcagaaggtgatcctgatgctgctggacaacctggaccccaacttccagagcgaccagcagagcaagaggacccccctgcatgctgctgcccagaagggctctgtggagatctgccacgtgctgctgcaggccggggccaacatcaatgctgtggacaagcagcagaggacccccctgatggaggccgtggtgaacaaccacctggaggtggcccgctacatggtgcagagaggaggctgtgtgtacagcaaggaggaggatggcagcacctgcctgcaccacgccgccaagattggcaacctggagatggtgtccctgctgctgagcacaggccaggtggatgtgaatgcccaggacagcggcggctggacccccatcatctgggccgctgagcacaagcacatcgaggtgatccgcatgctgctgaccagaggagcagatgtgaccctgacagacaatgaggagaacatctgcctgcactgggccagcttcaccggcagcgctgccatcgccgaggtgctgctgaatgcccgctgtgacctgcatgctgtgaactaccacggggacacccccctgcacatcgccgcccgggagagctaccatgactgtgtgctgctcttcctgagcagaggagccaaccctgagctgaggaacaaggagggggacacagcctgggacctgaccccagagaggagtgatgtgtggtttgccctgcagctgaacaggaagctgcggctgggcgtgggcaacagagccatcagaacagagaagatcatctgcagagatgtggcccggggctatgaaaatgtgcccatcccctgtgtgaatggagtggatggagagccctgcccagaggactacaagtacatcagcgagaactgtgagaccagcaccatgaacatcgacaggaacatcacccacctgcagcactgcacctgtgtggatgactgcagcagcagcaactgcctgtgtggccagctgagcatccgctgctggtatgacaaggatggccgcctgctgcaggagttcaacaagattgagcccccactcatctttgagtgcaaccaggcctgcagctgctggaggaactgcaagaacagagtggtgcagagcggcatcaaggtgcggctgcagctgtacagaacagccaagatgggctggggcgtgcgggccctgcagaccatcccccagggcaccttcatctgtgaatatgtgggggagctgatcagtgatgctgaggctgatgtgagagaagatgacagctacctgtttgacctggacaacaaggatggagaggtgtactgcattgatgcccgctactacggcaacatcagccgcttcatcaaccacctgtgtgaccccaacatcatccctgtgcgggtcttcatgctgcaccaggacctgcgcttcccccgcatcgccttcttcagcagccgggacatcagaactggagaggagctgggctttgattatggagaccgcttctgggacatcaagagcaagtacttcacctgccagtgtggcagcgagaagtgcaagcacagcgctgaggccatcgccctggagcagagccggctggcccggctggacccccaccctgagctgctgcctgagctgggcagcctgccccctgtgaacacctag

SEQ ID NO: 108160 - DNA, 3702 bp, Artificial Sequence
  derived and/or modified sequence
atgaggggcctgccccggggccggggcctgatgagggcccggggccggggccgggccgcccctcctggcagccggggccggggccggggcggcccccaccggggccggggccggcccaggagcctgctgagcctgccccgggcccaggcctcctggaccccccagctgagcacaggcctgaccagcccccctgtgccctgcctgcccagccagggcgaggccccagctgagatgggcgccctgctgctggagaaggagaccaggggggccacagagcgggtgcacggcagcctgggggacacccccaggtctgaggagaccctgcccaaggccaacccagacagcctggagcctgctggccccagcagccctgcctctgtgacagtgacagtgggagatgaaggagctgacacccctgtgggcgccacccccctgattggagatgaaagtgagaacctggagggagatggagacctgcggggcggccgcatcctgctgggccacgccaccaagagcttccccagcagccccagcaaaggaggcagctgccccagccgggccaagatgtccatgaccggggccggcaagagcccccccagcgtgcagagcctggccatgaggctgctgtccatgcctggggcccagggcgctgctgctgctggcagcgagcccccaccagccaccaccagccctgagggccagcccaaggtgcaccgggccaggaagaccatgagcaagccaggaaatggccagccccctgtgcctgagaagaggcctcctgagatccagcacttcaggatgtctgatgatgtgcacagcctgggcaaggtgaccagtgacctggccaagaggaggaagctgaacagcggcggcggcctgtctgaggagctgggcagcgccaggagaagtggagaggtgaccctgaccaagggggaccccggcagcctggaggagtgggagaccgtggtgggagatgacttcagcctgtactatgacagctacagcgtggatgagcgggtggacagcgacagcaagtctgaggtggaggccctgacagagcagctgtctgaggaggaggaggaggaggaggaggaggaggaggaggaggaggaggaggaggaggaggaggaggaggaggaggatgaggagagcggcaaccagagcgacagaagtggcagcagcggccgcaggaaggccaagaagaagtggaggaaggacagcccctgggtgaagcccagcaggaagaggaggaagcgggagcccccccgggccaaggagccccggggcgtgtccaatgacaccagcagcctggagacagagcggggctttgaggagctgcccctgtgcagctgcaggatggaggcccccaagattgaccgcatcagcgagagagctggccacaagtgcatggccacagagagcgtggatggagagctgagcggctgcaatgctgccatcctgaagcgggagaccatgaggcccagcagccgggtggccctgatggtgctgtgtgagacccaccgggccaggatggtgaagcaccactgctgccccggctgcggctacttctgcacagctggcaccttcctggagtgccacccagacttccgggtggcccaccgcttccacaaggcctgtgtgtcccagctgaatggcatggtgttctgcccccactgtggagaagatgccagcgaggcccaggaggtgaccatccccagaggagatggagtgaccccacctgctggaacagctgccccagcccccccacccctgagccaggatgtgcccggccgggctgacaccagccagcccagcgccaggatgaggggccatggagagcccaggaggcctccctgtgaccccctggccgacaccatcgacagcagcggccccagcctgaccctgcccaatggaggctgcctgtctgctgtgggcctgcccctgggccctggccgggaggccctggagaaggccctggtgatccaggagagcgagaggaggaagaagctgcgcttccacccccggcagctgtacctgtctgtgaagcagggcgagctgcagaaggtgatcctgatgctgctggacaacctggaccccaacttccagagcgaccagcagagcaagaggacccccctgcacgccgccgcccagaagggctctgtggagatctgccacgtgctgctgcaggccggggccaacatcaatgctgtggacaagcagcagaggacccccctgatggaggccgtggtgaacaaccacctggaggtggcccgctacatggtgcagaggggcggctgtgtgtacagcaaggaggaggatggcagcacctgcctgcaccacgccgccaagattggcaacctggagatggtgtccctgctgctgagcacaggccaggtggatgtgaatgcccaggacagcggcggctggacccccatcatctgggccgctgagcacaagcacattgaagtcatccgcatgctgctgaccagaggagcagatgtgaccctgacagacaatgaggagaacatctgcctgcactgggccagcttcaccggcagcgctgccatcgccgaggtgctgctgaatgcccgctgtgacctgcatgctgtgaactaccatggagacacccccctgcacatcgccgcccgggagagctaccatgactgtgtgctgctcttcctgagcagaggagccaaccctgagctgaggaacaaggagggggacacagcctgggacctgaccccagagaggagtgatgtgtggtttgccctgcagctgaacaggaagctgcggctgggcgtgggcaacagagccatcagaacagagaagatcatctgcagagatgtggcccggggctatgaaaatgtgcccatcccctgtgtgaatggagtggatggagagccctgcccagaggactacaagtacatcagcgagaactgtgagaccagcaccatgaacatcgacaggaacatcacccacctgcagcactgcacctgtgtggatgactgcagcagcagcaactgcctgtgtggccagctgagcatccgctgctggtatgacaaggatggccgcctgctgcaggagttcaacaagattgagcccccactcatctttgagtgcaaccaggcctgcagctgctggaggaactgcaagaacagagtggtgcagagcggcatcaaggtgcggctgcagctgtacagaacagccaagatgggctggggcgtgcgggccctgcagaccatcccccagggcaccttcatctgtgaatatgtgggggagctgatcagtgatgctgaggctgatgtgcgggaggatgacagctacctgtttgacctggacaacaaggatggagaggtgtactgcattgatgcccgctactacggcaacatcagccgcttcatcaaccacctgtgtgaccccaacatcatccctgtgcgggtcttcatgctgcaccaggacctgcgcttccccagaattgccttcttcagcagccgggacatcagaactggagaggagctgggctttgattatggagaccgcttctgggacatcaagagcaagtacttcacctgccagtgtggcagcgagaagtgcaagcacagcgctgaggccatcgccctggagcagagccggctggcccggctggacccccaccctgagctgctgcctgagctgggcagcctgccccctgtgaacacctag

SEQ ID NO: 108161 - DNA, 2667 bp, Artificial Sequence
  derived and/or modified sequence
tctgaggtggaggccctgacagagcagctgtctgaggaggaggaggaggaggaggaggaggaggaggaggaggaggaggaggaggaggaggaggaggaggaggaggatgaggagagcggcaaccagagcgacaggagcggcagcagtggaagaaggaaggccaagaagaagtggaggaaggacagcccctgggtgaagcccagcaggaagaggaggaagcgggagcccccccgggccaaggagccccggggcgtgtccaatgacaccagcagcctggagacagagcggggctttgaggagctgcccctgtgcagctgcaggatggaggcccccaagattgaccgcatcagcgagcgggccggccacaagtgcatggccacagaatctgtggatggagagctgagcggctgcaatgctgccatcctgaagcgggagaccatgaggcccagcagccgggtggccctgatggtgctgtgtgagacccaccgggccaggatggtgaagcaccactgctgccccggctgcggctacttctgcacagctggcaccttcctggagtgccacccagacttccgggtggcccaccgcttccacaaggcctgtgtgtcccagctgaatggcatggtgttctgcccccactgtggggaggatgccagcgaggcccaggaggtgaccatccccagaggagatggagtgaccccacctgctggaacagctgccccagcccccccacccctgagccaggatgtgcccggccgggctgacaccagccagcccagcgccaggatgaggggccacggggagccccggcggcccccctgtgaccccctggccgacaccatcgacagcagcggccccagcctgaccctgcccaacggcggctgcctgtctgctgtgggcctgcccctgggccctggccgggaggccctggagaaggccctggtgatccaggagagcgagaggaggaagaagctgcgcttccacccccggcagctgtacctgtctgtgaagcagggcgagctgcagaaggtgatcctgatgctgctggacaacctggaccccaacttccagagcgaccagcagagcaagaggacccccctgcatgctgctgcccagaagggctctgtggagatctgccacgtgctgctgcaggccggggccaacatcaatgctgtggacaagcagcagaggacccccctgatggaggccgtggtgaacaaccacctggaggtggcccgctacatggtgcagagaggaggctgtgtgtacagcaaggaggaggatggcagcacctgcctgcaccacgccgccaagattggcaacctggagatggtgtccctgctgctgagcacaggccaggtggatgtgaatgcccaggacagcggcggctggacccccatcatctgggccgctgagcacaagcacatcgaggtgatccgcatgctgctgaccagaggagcagatgtgaccctgacagacaatgaggagaacatctgcctgcactgggccagcttcaccggcagcgctgccatcgccgaggtgctgctgaatgcccgctgtgacctgcatgctgtgaactaccacggggacacccccctgcacatcgccgcccgggagagctaccatgactgtgtgctgctcttcctgagcagaggagccaaccctgagctgaggaacaaggagggggacacagcctgggacctgaccccagagaggagtgatgtgtggtttgccctgcagctgaacaggaagctgcggctgggcgtgggcaacagagccatcagaacagagaagatcatctgcagagatgtggcccggggctatgaaaatgtgcccatcccctgtgtgaatggagtggatggagagccctgcccagaggactacaagtacatcagcgagaactgtgagaccagcaccatgaacatcgacaggaacatcacccacctgcagcactgcacctgtgtggatgactgcagcagcagcaactgcctgtgtggccagctgagcatccgctgctggtatgacaaggatggccgcctgctgcaggagttcaacaagattgagcccccactcatctttgagtgcaaccaggcctgcagctgctggaggaactgcaagaacagagtggtgcagagcggcatcaaggtgcggctgcagctgtacagaacagccaagatgggctggggcgtgcgggccctgcagaccatcccccagggcaccttcatctgtgaatatgtgggggagctgatcagtgatgctgaggctgatgtgagagaagatgacagctacctgtttgacctggacaacaaggatggagaggtgtactgcattgatgcccgctactacggcaacatcagccgcttcatcaaccacctgtgtgaccccaacatcatccctgtgcgggtcttcatgctgcaccaggacctgcgcttcccccgcatcgccttcttcagcagccgggacatcagaactggagaggagctgggctttgattatggagaccgcttctgggacatcaagagcaagtacttcacctgccagtgtggcagcgagaagtgcaagcacagcgctgaggccatcgccctggagcagagccggctggcccggctggacccccaccctgagctgctgcctgagctgggcagcctgccccctgtgaacacctag

SEQ ID NO: 108162 - DNA, 3531 bp, Artificial Sequence
  derived and/or modified sequence
atggctgctgctgctggagctgctgctgctgctgctgctgagggggaggccccagctgagatgggcgccctgctgctggagaaggagaccaggggggccacagagcgggtgcacggcagcctgggggacacccccaggtctgaggagaccctgcccaaggccaacccagacagcctggagcccgccggccccagcagccctgcctctgtgacagtgacagtgggagatgagggcgctgacacccctgtgggcgccacccccctgattggagatgaaagtgagaacctggagggagatggagacctgcggggcggccgcatcctgctgggccacgccaccaagagcttccccagcagccccagcaagggcggcagctgccccagccgggccaagatgtccatgactggagctgggaagagccccccatctgtgcagagcctggccatgaggctgctgtccatgcctggggcccagggcgctgctgctgctggcagcgagcccccaccagccaccaccagccctgagggccagcccaaggtgcaccgggccaggaagaccatgagcaagccaggaaatggccagccccctgtgcctgagaagaggcctcctgagatccagcacttcaggatgtctgatgatgtgcacagcctgggcaaggtgaccagtgacctggccaagaggaggaagctgaacagcggcggcggcctgtctgaggagctgggcagcgcccggcgcagcggggaggtgaccctgaccaagggggaccccggcagcctggaggagtgggagaccgtggtgggagatgacttcagcctgtactatgacagctacagcgtggatgagcgggtggacagcgacagcaagtctgaggtggaggccctgacagagcagctgtctgaggaggaggaggaggaggaggaggaggaggaggaggaggaggaggaggaggaggaggaggaggaggaggaggatgaggagagcggcaaccagagcgacaggagcggcagcagtggaagaaggaaggccaagaagaagtggaggaaggacagcccctgggtgaagcccagcaggaagaggaggaagcgggagcccccccgggccaaggagccccggggcgtgtccaatgacaccagcagcctggagacagagcggggctttgaggagctgcccctgtgcagctgcaggatggaggcccccaagattgaccgcatcagcgagcgggccggccacaagtgcatggccacagaatctgtggatggagagctgagcggctgcaatgctgccatcctgaagcgggagaccatgaggcccagcagccgggtggccctgatggtgctgtgtgagacccaccgggccaggatggtgaagcaccactgctgccccggctgcggctacttctgcacagctggcaccttcctggagtgccacccagacttccgggtggcccaccgcttccacaaggcctgtgtgtcccagctgaatggcatggtgttctgcccccactgtggggaggatgccagcgaggcccaggaggtgaccatccccagaggagatggagtgaccccacctgctggaacagctgccccagcccccccacccctgagccaggatgtgcccggccgggctgacaccagccagcccagcgccaggatgaggggccacggggagccccggcggcccccctgtgaccccctggccgacaccatcgacagcagcggccccagcctgaccctgcccaacggcggctgcctgtctgctgtgggcctgcccctgggccctggccgggaggccctggagaaggccctggtgatccaggagagcgagaggaggaagaagctgcgcttccacccccggcagctgtacctgtctgtgaagcagggcgagctgcagaaggtgatcctgatgctgctggacaacctggaccccaacttccagagcgaccagcagagcaagaggacccccctgcatgctgctgcccagaagggctctgtggagatctgccacgtgctgctgcaggccggggccaacatcaatgctgtggacaagcagcagaggacccccctgatggaggccgtggtgaacaaccacctggaggtggcccgctacatggtgcagagaggaggctgtgtgtacagcaaggaggaggatggcagcacctgcctgcaccacgccgccaagattggcaacctggagatggtgtccctgctgctgagcacaggccaggtggatgtgaatgcccaggacagcggcggctggacccccatcatctgggccgctgagcacaagcacatcgaggtgatccgcatgctgctgaccagaggagcagatgtgaccctgacagacaatgaggagaacatctgcctgcactgggccagcttcaccggcagcgctgccatcgccgaggtgctgctgaatgcccgctgtgacctgcatgctgtgaactaccacggggacacccccctgcacatcgccgcccgggagagctaccatgactgtgtgctgctcttcctgagcagaggagccaaccctgagctgaggaacaaggagggggacacagcctgggacctgaccccagagaggagtgatgtgtggtttgccctgcagctgaacaggaagctgcggctgggcgtgggcaacagagccatcagaacagagaagatcatctgcagagatgtggcccggggctatgaaaatgtgcccatcccctgtgtgaatggagtggatggagagccctgcccagaggactacaagtacatcagcgagaactgtgagaccagcaccatgaacatcgacaggaacatcacccacctgcagcactgcacctgtgtggatgactgcagcagcagcaactgcctgtgtggccagctgagcatccgctgctggtatgacaaggatggccgcctgctgcaggagttcaacaagattgagcccccactcatctttgagtgcaaccaggcctgcagctgctggaggaactgcaagaacagagtggtgcagagcggcatcaaggtgcggctgcagctgtacagaacagccaagatgggctggggcgtgcgggccctgcagaccatcccccagggcaccttcatctgtgaatatgtgggggagctgatcagtgatgctgaggctgatgtgagagaagatgacagctacctgtttgacctggacaacaaggatggagaggtgtactgcattgatgcccgctactacggcaacatcagccgcttcatcaaccacctgtgtgaccccaacatcatccctgtgcgggtcttcatgctgcaccaggacctgcgcttcccccgcatcgccttcttcagcagccgggacatcagaactggagaggagctgggctttgattatggagaccgcttctgggacatcaagagcaagtacttcacctgccagtgtggcagcgagaagtgcaagcacagcgctgaggccatcgccctggagcagagccggctggcccggctggacccccaccctgagctgctgcctgagctgggcagcctgccccctgtgaacacctag

SEQ ID NO: 108163 - DNA, 3702 bp, Artificial Sequence
  derived and/or modified sequence
atgcggggcctgccccggggccggggcctgatgcgggcccggggccggggaagggccgccccaccagggagtcgaggacggggaagggggggcccacaccggggtcgcggtcggccaagatctctgctttccttgcccagggctcaagcatcatggacgccgcagctatccaccggccttactagtccccctgtaccttgcttgccctcccagggcgaagccccggcggagatgggggccctactgttggaaaaggagactcgtggggccaccgaacgggtccatggatcattaggcgacactccccgatcagaggagacgctccccaaggcaacccctgacagcctggaacctgcaggtcccagtagccccgcctcagtgacggtgacagtgggagatgaaggcgccgacaccccagtgggcgccactccattaatcggcgacgagtcagaaaacttggaaggagacggggatttaagaggggggcggatcctgctcggacacgccacgaagtcctttcccagctccccctctaagggcggcagttgtccaagcagagccaaaatgtccatgactggcgcaggcaaatcaccaccctctgtgcagagccttgctatgaggttattaagcatgcctggtgcacagggtgcggctgccgcggggtctgagcctcctccagccacaaccagccccgaaggccagccaaaagtgcatagagcacggaaaacaatgtctaagccagggaatgggcagccacccgtgcctgagaagagaccccccgagatacagcatttcaggatgtccgatgatgtgcattccttgggaaaagtaactagtgacctggctaaaaggcgcaaactgaacagcggaggcgggctgtcagaagaacttggctccgctagacggtctggagaggtcacactcacaaagggggatcccggttcactcgaggagtgggaaacggtggtcggcgacgatttctctctgtactacgacagctactcagtcgacgagcgggtggacagcgattctaaatctgaggtagaagcactgaccgaacagctcagcgaggaagaggaggaggaagaagaagaagaggaagaagaggaggaggaggaagaggaggaagaggaagaagaagacgaagaaagcggtaatcagtcggataggtccggatccagtgggcgacgtaaagctaaaaaaaagtggcggaaagactctccctgggtgaagccctcacggaaaagacggaagagagagcccccacgagcaaaagagccgaggggggtatctaatgatacttcatcactggagacagaaagaggcttcgaggaattaccactgtgttcttgtcgaatggaagcacccaaaatcgacaggatctcggaacgggccgggcataagtgtatggccactgaaagcgtagacggcgagctcagtggctgtaatgccgccatcctgaagcgcgagacaatgagaccaagctcccgagttgcgctgatggtcttgtgcgagacccaccgggcaagaatggtgaagcaccactgctgtccggggtgtgggtacttctgcaccgccgggaccttcctcgagtgccacccagacttccgcgttgcacatcggttccataaggcgtgtgtttcacaattaaatggcatggtgttctgccctcattgcggagaggatgcttcagaggctcaggaggttaccatccccagaggcgatggggtcacaccaccggccgggacagccgcccctgccccccctcccttgagtcaggatgtgcctggaagagctgatactagccagccatccgccagaatgcggggccacggcgagcccagaaggccaccttgcgaccccttagccgacaccattgactccagcgggccttctttgaccctgccaaacggcgggtgtctgagtgcagtgggcttgccgctcgggcctggtagagaggcccttgagaaagcgctagtgattcaagagtctgaacggcggaagaagctgcggtttcaccctaggcagctgtacctatccgtcaaacagggcgagctgcagaaggtgatcctgatgctcctggacaacttagaccccaatttccaatctgatcagcaaagtaagcgaacccctctccatgcagctgcacagaagggcagcgtcgaaatatgccatgtgctactgcaagctggcgctaatatcaatgctgtcgacaaacagcagcgcactccattaatggaagcggttgtgaacaatcatcttgaggtggctcggtacatggtccagagaggcggttgcgtgtatagcaaggaggaagacggcagcacatgcctgcaccacgcggccaaaatcggcaatttggaaatggttagcctgctgctgtccaccgggcaggtcgatgttaatgcccaagattctggggggtggaccccaatcatatgggccgctgaacataagcacatcgaggtaatccgtatgctcctaacacgcggagccgatgttacactgacagacaacgaggaaaatatatgcctgcactgggcctcctttacaggatctgccgccattgccgaagtactccttaacgcgcgctgcgacttgcacgccgtgaactaccatggcgacactccactgcatattgccgcccgcgagtcgtatcacgattgcgtcctactgttcctgtcacgaggtgccaatcctgagttgagaaacaaggagggggacaccgcctgggacctgaccccagaacgttccgacgtgtggtttgcacttcagcttaatagaaagctgcggctcggggtaggaaaccgggccatcagaactgaaaagattatttgtcgggatgtagcgcgtgggtacgaaaatgttccgattccttgtgtcaacggggtggacggggaaccgtgtcccgaagactataaatatatttccgagaactgtgaaacatctaccatgaatattgacaggaatatcacacacctccagcactgcacgtgcgttgatgactgcagtagctcaaattgcctctgcggacagctatcgatccgatgttggtatgataaggatggccggctgctccaggagtttaacaaaattgagccccctctgatattcgagtgtaaccaggcatgctcctgctggcggaactgcaagaaccgggtggtacagtccggaattaaggtgaggttgcagctgtatcggacggcaaaaatgggttggggtgtccgtgctctgcagactatccctcagggcacttttatttgcgagtacgtaggggaactaatctctgacgccgaagcagacgtgcgcgaggacgactcttatctgtttgacctggataataaggacggcgaggtgtattgcatcgacgcacgttattacgggaatattagccggtttatcaaccatctgtgcgatcccaacatcatccccgtgcgggtgttcatgctgcatcaggacctgcggtttccacgaattgccttctttagctcaagggatattaggacaggcgaagagctgggctttgattatggtgatagattctgggatattaaatcgaagtattttacttgccagtgcggcagcgaaaagtgcaagcactctgctgaggccatcgcgctggagcagagtcgtcttgcccgactcgaccctcatccggagctcctgccggaactcggatcattgcctcccgtcaatacatag

SEQ ID NO: 108164 - DNA, 3531 bp, Artificial Sequence
  derived and/or modified sequence
atggccgccgccgccggcgccgccgccgccgccgccgccgagggcgaggcacctgctgagatgggcgctctacttttagagaaagaaaccaggggagcgacggagcgagtgcacggctcactgggagacaccccgcggtcagaggaaacactcccgaaggcaacccccgacagcctggaaccggcaggcccatcttctccagcatctgtcaccgttaccgtgggtgatgaaggagctgacacccctgtaggtgctactcccctgatcggagatgagagtgagaatctagagggagatggggacctcagaggtggccgcatcctcttggggcacgcgacaaagtccttcccatcctcccccagtaaaggggggtcgtgtccttcgagagcaaaaatgagcatgacaggcgcaggtaagagcccaccaagtgttcagagcttagccatgcggctactgtctatgcccggggcacagggcgcggccgccgccggaagtgaaccacctccagctactacatcgcccgaggggcagccaaaagtccatagagccagaaagacaatgagcaagccaggtaacggtcaacctcccgtgcccgaaaagaggcctcctgagattcaacatttcaggatgtcagatgatgtgcacagcttgggcaaagtgacaagcgatctagctaaacggagaaaacttaattccggcggaggactgtccgaggaattgggctccgcacgcaggtccggcgaagtgacgctgactaagggtgatccaggaagtttagaggagtgggaaactgtggtgggtgacgatttcagcctgtattatgactcttatagcgtggatgagagggtggactcggattctaaaagtgaagtggaagctttgaccgagcagctctctgaagaagaggaagaggaggaggaggaagaggaagaggaggaggaggaggaggaggaagaggaagaggaggaggacgaagagtctggaaaccagtctgatcggtctggctcaagcggaagacggaaggccaagaaaaagtggcgtaaagatagcccctgggttaaaccaagccgcaagagaagaaaaagagagccacctcgagcaaaagagccccggggggtgagtaatgatacttcctcccttgagactgagcggggcttcgaggagctcccattatgtagttgcagaatggaggcccctaagattgaccgcataagcgaacgcgccggtcataaatgtatggctactgaaagtgttgacggggagctctctggttgcaacgcggcaatcctaaaaagggagacaatgaggccatctagtcgggtagctctgatggtgttgtgcgaaacacacagagctagaatggttaagcatcactgttgccctggatgtggctacttctgcactgctggcacattcctggaatgtcacccggactttagggttgctcatcgatttcacaaggcctgtgtttctcagttgaatgggatggtgttctgccctcactgcggcgaggacgctagcgaagcacaagaggttactatcccccggggtgatggggtgacccctccagctgggacagcggcgcctgcaccccctccactgtcgcaggatgtgcccggccgggccgacacatcacaacccagtgcgcgtatgcgcggccacggagagccaaggaggccaccctgcgatcccctcgctgatacaattgatagtagcgggccatctcttaccctccctaacggcggttgtctgtctgccgtgggtctcccactgggtcccggaagagaagctctggaaaaagcccttgtgattcaggagtccgagcgcaggaagaagctccgcttccatcctcggcaactgtacctgagcgtgaaacaaggggagctccagaaagttattttgatgctgctagataacctcgaccccaactttcaatcagatcagcagtccaaacgcacaccgctgcacgctgccgcacaaaagggatctgtggaaatttgtcatgtgttactgcaggcgggggcaaacatcaatgccgtcgataagcagcagaggacacccctcatggaagctgtggtgaataatcatctggaagttgctcgctacatggtgcaacgcggaggatgcgtgtatagcaaggaagaggatgggtctacatgtctacatcacgctgcaaagatcggcaacctggaaatggtaagccttctgctatcgaccggccaggttgacgtgaacgcccaggatagcggggggtggactccaattatctgggcggcggaacacaaacacatcgaggtcatcagaatgttattgaccagaggggccgacgtaaccctgactgacaacgaagaaaatatctgtctgcattgggcctctttcactggatctgctgcaatcgcggaagtcctgttgaatgctcgctgcgatctccacgctgtgaactatcatggagatactccgctacacattgctgcccgggagtcataccacgattgtgtgctgctctttctcagtagaggtgccaaccctgagctgaggaacaaggagggcgataccgcctgggacctcacaccggagagatccgacgtctggttcgccttgcaactgaatcgcaaattgcgccttggagttggcaacagagcaatccggactgaaaaaatcatctgcagagatgtggctagggggtatgagaacgttccaattccatgtgtgaacggggtggatggggagccatgcccagaagactacaagtacatctctgaaaactgtgagacgagcaccatgaacatcgaccggaacataactcacttgcaacattgcacatgcgtagacgattgttcctcatccaactgcctgtgcggccaactgagcatcaggtgctggtacgacaaagatggccgactgctgcaggagttcaacaagatagaacccccactgatctttgaatgcaaccaggcatgctcttgttggcgcaattgtaagaaccgggtcgtccagtcgggcatcaaggtgcggctgcagctgtaccggacagccaagatgggatggggagtcagggccctgcaaacaattcctcaaggaaccttcatctgcgaatacgtgggggaacttatcagtgacgcggaggctgatgttcgcgaggacgactcttacctttttgaccttgataacaaggacggtgaagtttactgcatcgatgctagatactacggcaacatctcaaggttcatcaaccacctgtgcgatcctaacataatccccgtgagggtgtttatgctccatcaagacctgaggtttccgcgtatcgcctttttcagctcacgagatatacggactggcgaggagctcggcttcgattatggggatcggttttgggacattaagtcgaaatacttcacatgccaatgcggctccgagaagtgtaagcatagcgcagaggctattgcactggaacagagtcggctagcacggctggacccacaccctgagctgctgcctgagctggggtccttgcctcctgttaatacttag

SEQ ID NO: 108165 - DNA, 3531 bp, Artificial Sequence
  derived and/or modified sequence
atggccgccgccgccggcgccgccgccgccgccgccgccgagggcgaggccccagcggaaatgggcgccttactgctcgaaaaggagacgcggggtgccaccgagagggtgcatggaagccttggcgacactcctcgttcagaagaaaccctgcctaaagctacgcccgactcgctggaacctgcagggccaagcagtcccgcatcagtgaccgttactgtaggtgatgagggggcggacacaccagttggcgccactcccctcatcggcgatgagtccgaaaacctagaaggggacggcgatcttcgcggtgggagaatattgttaggacacgctacgaagagtttcccaagcagcccgtctaaaggtggctcctgcccaagccgggccaaaatgagtatgaccggagccggcaagagccccccgtcggttcagtcgttggcgatgcggttactctcaatgcctggggctcagggtgcagcggccgccggaagcgagccaccacccgccacaacatctcctgagggccagcccaaagtacaccgtgctcgaaagaccatgagcaagcctggcaatggacagccccccgtgcctgagaaaagaccaccggaaatccagcacttccgcatgagtgacgatgtgcatagcttgggaaaagtgacaagcgatctggccaaaaggcgaaaactgaattccgggggcggtttgagcgaagagctgggttcggcacggcgcagtggtgaggtgacactcaccaaaggggacccaggctctctggaggaatgggagacggtcgtgggagatgatttctctctctactatgattcatactctgtggatgagagggttgattctgacagcaagagcgaggttgaggccctaaccgagcaactctcagaagaagaagaagaagaagaggaggaggaagaagaagaagaagaagaggaggaagaagaggaggaggaggaggatgaagagtcaggtaaccaatccgatcggtcaggctccagcggccgcaggaaagcaaagaaaaaatggcgcaaagattcaccatgggttaagccttccaggaaacggcgcaagagggagcccccccgggccaaagagcccaggggtgtctctaatgacacttcttctctggagactgagaggggatttgaggagctccccctctgctcctgtcgcatggaggccccgaaaatcgatcgaatctcagagagagctgggcataagtgcatggcaaccgagagcgtggacggtgagctctccgggtgtaatgcagcaattttaaagagggaaactatgagacctagttctcgcgtggccctgatggtgctctgtgagactcacagagctcgtatggtgaagcaccattgctgcccaggctgcggttatttttgtactgctggcacatttcttgagtgccaccccgacttccgggtagcgcatagattccacaaggcctgcgtttctcaactcaatggcatggtgttttgtccccactgcggagaggacgcctccgaggcccaggaagtcaccatccccaggggggacggagttactccccccgcaggaacggcagcacccgcaccaccccccctctcacaagacgtccctggacgggccgatacatcccagccttccgcgaggatgcgcggccacggcgaacctcggaggcccccgtgtgatcccctcgccgacacgatagattccagcggccccagtctcacgctccccaatgggggttgtctctccgcagtaggtctccctcttggccccggaagagaagcactggaaaaggccctggtcattcaggaatctgagcgtcggaagaagttgcgttttcaccccaggcagctgtacctgtcagtcaaacaaggcgagctgcagaaggtcattctgatgctcctggacaatctggaccccaattttcagagcgatcagcagtcgaagagaactcccctgcatgcggcagcgcagaaaggcagtgtggaaatttgccatgtgctcctacaggcaggcgctaacatcaacgctgtggacaagcaacagagaactccacttatggaagctgtggtaaataatcacctagaggtggccagatatatggtgcagaggggaggctgcgtctatagcaaggaagaagacggcagcacatgcctccatcacgccgctaagataggcaacctcgagatggtgagtttactattgtccaccggccaggtggacgttaacgcccaggattctggcggatggactcccattatttgggctgccgaacacaaacatatcgaagtgatccgaatgctgctcacgagaggggccgacgtcaccttgaccgacaatgaggagaatatatgccttcactgggcctctttcaccgggagcgcagctatagcagaagtgctcctgaacgcacgatgcgacttgcatgctgttaattatcacggcgacacccccctgcatatagcagctagggaatcttaccatgattgcgtcttactgtttctgagtaggggcgctaatccagaactgaggaacaaggagggtgacactgcatgggacctaacccctgagagaagcgatgtgtggtttgcgcttcaactcaatcggaagttacgactaggggtcggcaatcgagccattcgcacagagaagatcatctgcagggatgtcgctcgaggatatgagaacgtcccgattccttgcgttaacggcgtagacggagaaccatgtcccgaagattataaatatatctccgaaaattgtgaaacttccaccatgaacatcgaccgcaatattacacacctccagcactgcacctgtgtcgatgactgttcatcctccaactgtctgtgcggtcaactctctatccggtgctggtatgataaagatggccggctgctccaggaatttaataagattgagcctcccctaatttttgaatgcaaccaggcttgctcctgctggcgcaattgcaaaaatcgcgtggtgcagagcggcatcaaggtcagacttcaactctatcgaactgccaaaatgggctggggagtccgagccctgcagacgatcccacagggaacatttatctgcgagtacgtcggtgaactaatcagcgacgctgaggcggacgtgagagaggatgacagctatctgtttgaccttgataacaaagatggggaggtttattgtatcgatgctcgttattacgggaacattagccgtttcattaaccatctctgcgatcctaatataattcccgtgcgcgtgttcatgctgcatcaggatctacggtttcctcggattgcattctttagcagccgtgacattcggaccggcgaggagctggggttcgactatggagatcgtttctgggatattaaaagcaagtatttcacatgccagtgtggcagcgagaagtgtaaacatagcgccgaagctattgccctggagcaaagtcgcctggcccggctcgatccgcaccctgagcttcttcccgaacttggcagcctcccccctgtgaacacatag

SEQ ID NO: 108166 - DNA, 3702 bp, Artificial Sequence
  derived and/or modified sequence
atgcggggcctgccccggggccggggcctgatgcgggcccggggccggggacgagccgcgccaccaggctcaaggggacggggaaggggtgggcctcacagaggacgaggcagacctaggagcttactgtccctgcccagagcccaggccagctggacaccacaactgtctactggccttacctctccccctgttccgtgcctaccctctcaaggtgaggccccagcggagatgggcgcgttactgctggagaaggaaaccaggggggcaaccgagagggttcatggatcccttggcgacacacccagatctgaggagaccctgccaaaagcgactccagactccctggagccagctggccctagctctcccgcctccgtcactgtgaccgtgggggacgaaggagccgacacccctgtcggggccaccccccttatcggggatgagtccgaaaatctggaaggcgatggagacctgagaggcggccggatcctgctgggccacgctactaaaagctttccatcgagtccatccaagggcgggtcgtgcccaagtagagccaagatgtccatgacaggcgcaggcaaatcacctccatctgtgcagtctctggcaatgaggttgctgtctatgcctggagctcagggggccgccgccgccggctccgagccgcctcctgccaccactagcccggaagggcagccaaaagtgcaccgggctaggaaaacgatgtcaaaaccgggtaacggtcagccccctgtgcctgaaaagcgtcccccagaaatccagcacttccgcatgtctgatgacgtccactctctcggaaaagtgacttctgatctggccaagcggcggaagctgaatagcggtggcggcttatctgaggagcttggatcagctaggagaagtggcgaggtgactctgactaaaggcgatcctggcagtctcgaggaatgggaaacagtcgttggggacgacttctctctatattatgacagctatagcgttgacgagcgtgtagactccgattccaaatcggaagtggaggccctaacagaacaattgtccgaggaggaagaagaagaagaggaggaggaagaggaggaggaagaggaggaagaagaggaggaagaagaagaggacgaggagagcggaaaccagagcgatagaagcggtagtagcgggcgccggaaagctaagaagaaatggcgcaaggactcgccgtgggtcaaaccatcccgcaagcgacgtaagcgagagcctccaagagccaaagaaccgaggggcgtgtctaacgataccagttcgctggaaactgaacgcggtttcgaggagcttccactctgctcatgccggatggaagcccctaagatcgacagaatctctgaacgcgccggccacaaatgcatggctaccgaatccgtggacggcgaactgtccggctgtaacgccgccatactcaagcgggaaacaatgaggcctagctctcgggtggctcttatggtactttgtgagactcatcgagctcgtatggtcaagcatcactgttgtccgggttgtggatacttttgtacagcaggtacctttcttgaatgccacccagatttcagagtggcgcaccggttccacaaggcctgtgtctctcagctgaacggtatggtattttgccctcactgcggagaggacgctagcgaggcgcaggaggtgacgattccaagaggagatggggtgaccccccctgctggcacagccgccccggcccctcctcctctgtcccaggacgtcccggggcgtgctgatacaagtcagccaagcgcccggatgagagggcacggggagccgagaagacctccctgtgaccccctggcagatacaatagacagttccggcccgtctctaaccctgcccaatggcggatgcctctcagccgtaggcttgccactgggacccgggcgcgaggccctagagaaggctctggtcatacaggaaagtgaacgacggaaaaagctccgttttcatccccgccaattataccttagtgtgaaacagggggagctgcagaaagtgattctgatgctcttggacaatctggaccctaacttccagagtgaccagcagtctaaaagaactccactacatgccgcggcccaaaaaggcagcgtggagatctgccacgtgttgctccaggccggtgccaacatcaatgccgtcgataaacagcagcggacgcctcttatggaggccgtcgttaacaaccacctggaagtcgcaaggtacatggtccagcggggagggtgtgtgtatagcaaggaagaggatggcagcacctgtcttcaccacgcggccaagatcggtaacttagaaatggtgagtctcttgctgtccacaggccaggttgatgtgaatgcacaagacagcggcgggtggactccgatcatctgggccgccgaacataagcacatcgaagtgattcggatgctgctgacgaggggcgcagatgttacactgacagataatgaggagaacatttgtctgcattgggcctccttcaccggaagcgccgctatcgccgaagtgctgctcaacgccaggtgtgacctgcatgccgtaaattatcacggtgatacacctcttcacatcgctgcacgcgagtcgtatcacgattgcgtactcctgtttctcagcaggggcgcgaaccctgagctgaggaacaaagagggtgatacagcctgggacctgacgcctgagcggtctgatgtatggttcgcactccagcttaatcggaaactacggcttggggtcgggaatcgggcgatccgaactgaaaagattatttgtcgcgacgtagctagagggtatgaaaacgtgccgattccgtgcgtcaatggcgtggatggggaaccttgtccagaagactataagtatatctctgaaaactgtgagacctccaccatgaacatcgatcggaacatcactcacctacaacactgcacttgcgttgacgactgctctagctctaattgcttgtgcggccagctctccatccgatgctggtatgacaaggatggacggttgctccaagagtttaataagatcgaaccacctctgatttttgagtgcaatcaggcctgctcttgttggcggaactgcaagaatagagtggtgcaaagtggaattaaggtaaggctccaactgtatcggactgctaagatgggttggggggttcgggctctgcagacgattccccagggaacatttatctgcgaatacgttggggagctgatctcagatgcggaagcagatgtgagagaagacgactcatatttattcgatctagataacaaggatggggaggtttattgtatcgatgctcgttattacggtaacatttcccgcttcatcaaccacttatgcgacccaaatattatccccgttcgcgtgttcatgctgcaccaggacctccggtttcccaggatcgctttctttagctcccgggatatcagaactggcgaagaactggggttcgactacggagacaggttctgggatattaaatctaaatacttcacgtgtcaatgcggttccgagaaatgcaaacatagcgctgaagccatagccctggagcagtctcgcctggcccggctggacccccatccagagctcttaccagaactaggctctctgccaccagtgaatacctag

SEQ ID NO: 108167 - DNA, 3531 bp, Artificial Sequence
  derived and/or modified sequence
atggccgccgccgccggcgccgccgccgccgccgccgccgagggcgaagcaccggcagaaatgggagccctcctgttagaaaaggaaactagaggggccacggaacgagttcacggatcattgggggatacaccaaggtctgaggagactttgccaaaagcaacaccagattcattggaacccgcgggaccctccagtcctgcctcagtgactgtgacagtgggcgatgagggagcagacaccccagtgggtgctactcctctgattggggacgagagtgagaacctcgagggcgacggggacctgagaggaggcagaatcttgctggggcacgcgacaaaaagtttcccctcgtcacctagtaagggaggttcatgtcctagtcgcgcaaagatgagcatgacaggagccggtaaatcaccccccagtgttcagagcctcgctatgagactcttaagtatgcctggcgctcagggtgctgcggccgctggctcagagcccccccccgctactacatcaccagagggccaacctaaggtccaccgcgccaggaaaacaatgtcaaagccgggtaatggtcagcctccagtgcccgaaaaaaggccaccggaaatccagcatttcaggatgagtgacgacgtgcactccctgggcaaagtgacatccgatttggccaagcgacgcaaactgaattctggaggcggattaagcgaagagttaggcagcgctaggagatccggtgaggtgacgcttacaaaaggagatcccggctcactggaagagtgggaaactgtggtaggggacgatttctcgctgtactatgactcctactcagtggatgagagagtagatagtgattctaagtctgaagttgaggcgcttacagagcagctgagcgaagaggaggaagaggaggaggaggaagaggaggaggaggaagaagaagaagaggaggaggaggaagaagaagacgaggagagtggaaatcagtcggacagaagtggaagctctggtagacggaaggcaaagaaaaaatggagaaaggattccccgtgggtcaagccgtctcggaaacggcggaaacgggagccccctcgggccaaagagccccggggagtcagcaacgatacgtcctcactggagacagagcgaggcttcgaggaactccccctgtgcagctgtcgaatggaagcacctaagattgatcggatcagcgaaagagccggacacaagtgtatggctactgaatccgtggacggcgagctgagcggttgcaacgcagccattctcaaaagggagaccatgcgaccatcctctcgggtagcccttatggtgctctgcgagactcatcgcgcccgaatggttaaacaccattgctgccccgggtgcggctatttctgcacagccggaaccttcttagaatgccaccccgacttcagggtggcgcaccggttccacaaggcgtgcgtttcacagctaaatggtatggtgttctgccctcactgcggcgaggatgctagtgaagcccaggaagttactatcccgaggggagacggcgtgacccctccagccggtaccgcggcaccagctccacctccactgtctcaagatgtccccggtcgggcggacacatcccagcccagcgctcgcatgcgcggacatggagagccacggaggccgccatgcgaccccctggcagacacaattgacagcagcggaccttctctcacgctgccgaacggcggttgcctttcggctgtgggcctgccattgggtccgggacgggaagctttagagaaggctctggtgatccaagagagcgagcgccgcaagaagctgagatttcatccccggcaattatacttgtctgttaagcagggggaactgcaaaaggtaatactgatgctcctagacaaccttgaccccaacttccagtctgaccagcaaagtaagcgcaccccactgcatgcagctgcacagaaagggtccgtggaaatttgccatgtcctgttgcaggctggagccaacatcaatgccgtggataaacagcagaggaccccgcttatggaagctgtggttaacaaccatctggaggtcgcccgctatatggttcagcgcgggggctgcgtatattctaaggaagaggacggatcaacatgcttacaccatgcagccaagattggaaacctagaaatggtgtctctgctgctgtctactggccaggtggacgtgaacgcccaggatagcgggggctggacccctatcatctgggccgccgaacataagcatatagaagtcattcggatgttgctgacacgtggagctgatgtcacactaaccgataacgaagagaacatctgcttgcattgggcctcctttactggatctgccgcaatagctgaggtgctcctgaatgctagatgcgatctccacgctgtgaactatcatggcgacacccccttgcatatcgcagcaagagaaagctaccacgactgtgtactgctcttcctgagtcggggagccaaccctgagctgcgcaataaagagggtgacaccgcttgggacttgaccccggagcgttccgacgtgtggtttgcactacagttgaaccgcaagctgagactgggggtgggaaatcgcgcaatcagaaccgaaaaaatcatatgtcgcgacgtggctcgggggtatgaaaacgtgcccatcccctgtgttaatggggtagacggtgagccttgtcccgaagactacaaatacataagcgaaaactgcgagacctctaccatgaacattgataggaacataactcatctgcagcactgtacatgcgtggatgactgtagcagctctaattgtctatgtgggcaactgtccattcggtgttggtacgataaagacgggaggcttcttcaggaattcaataaaatagaaccacctctgatttttgaatgcaaccaggcctgctcatgttggcgaaactgcaaaaaccgcgtggttcagtcgggcatcaaagttagattgcagctctacaggactgcaaaaatgggatggggagtacgagccttacaaacaataccccagggcacgttcatttgcgaatatgtaggggagcttatctcagacgctgaggctgatgtgagagaagatgactcctacctgtttgatctggacaataaagatggcgaggtgtactgtattgacgcaagatactacggaaatattagtaggttcattaaccacctctgcgaccctaacataataccggttagggtgttcatgctgcatcaagatctgcgattccctcgtattgcctttttcagttccagggacatcagaactggcgaggaactcgggttcgattacggggaccggttctgggatattaagtcaaagtacttcacatgccagtgtggatcagagaagtgtaaacattccgccgaggccatagccttggaacaaagcaggttagcgaggctagatccgcaccccgagttgctccccgaactcggttcactcccccccgtcaatacttag

SEQ ID NO: 108168 - DNA, 3702 bp, Artificial Sequence
  derived and/or modified sequence
atgcggggcctgccccggggccggggcctgatgcgggcccggggccgcggtcgcgccgcgccccccggatcacggggcagaggacgggggggcccccatcgtggcagaggacggcctcgaagtctcctgtctttaccccgagcccaagcatcctggactcctcaactatctacaggtctgacgagcccacccgtgccctgtctccctagccagggcgaagcccccgccgaaatgggcgctctcctgcttgaaaaggagaccagaggggccacagagcgggttcacggctccctaggagataccccaaggtctgaggaaacactgcctaaggccaatcccgactcgctggaacccgctggaccaagcagccccgcatccgtgaccgtcacagtgggagacgaaggagccgacacgccagtcggcgccacgcccctgatcggagacgagtccgagaacctcgaaggggacggggatcttcgcggcggaaggatccttttgggacatgctacaaagagcttccccagcagcccttctaagggcggatcttgtccttctcgggccaagatgtcaatgactggtgccgggaaaagcccaccctccgttcaatcactggcgatgcggttgctctccatgccaggcgcacagggagccgccgccgccggctctgagcctccacctgccacaacgtcccccgaaggacagccaaaggtgcacagggccaggaagacaatgtccaaacctggcaacgggcagccccccgtgccggagaaaagaccgcccgaaattcagcacttcagaatgagcgacgatgtgcacagcttggggaaggtcacatccgacctggcaaaaaggcgtaagctgaactctggcggagggctcagcgaggaattgggtagcgctaggcgcagtggcgaggtgacgttgactaaaggagaccccggctcgctggaggagtgggagacagtggtgggtgacgactttagcctgtattatgactcatattctgtggatgagcgagtggactccgacagcaagtccgaagtggaggccctcacagagcagctgtccgaagaggaagaagaggaggaggaggaggaagaggaggaagaggaagaggaagaagaggaagaggaggaggaggacgaagaatcaggcaatcagtccgaccggtcaggaagtagtgggaggcgaaaggctaagaaaaagtggaggaaagactctccctgggtgaagccctccaggaagcgaaggaaacgagaacctccccgagccaaagagcctagaggggtatcaaatgacacgagctccctggaaaccgaaagagggttcgaggagttgccactgtgcagttgtcgcatggaagctccgaagattgaccgtatttctgagcgggccggacataaatgcatggccacggagtccgttgacggtgaattatctgggtgtaatgctgccatcttgaaaagggagactatgcgtccttcgtccagggtcgccctgatggttctgtgcgaaacccaccgggctcggatggtgaagcaccattgctgtcctggatgcggatacttctgcaccgctggtacttttctagagtgccatcctgattttagagtggcacacaggtttcataaggcttgcgtgagtcagctgaatggcatggtgttttgtcctcattgtggtgaagacgctagtgaagcccaggaggtgaccatccccagaggggacggtgtaaccccgcccgccgggacagccgcaccggcccccccgcccctttcccaagacgtgcccggaagagcagatacctcacagcctagcgcgcgcatgagagggcatggggagccccgcaggcctccatgcgatcccctagcggatacaatcgattccagcggcccgtctcttacattgcctaatggaggctgcttgagtgctgtgggattgcccttggggccagggagggaggctctggaaaaggccctggtgatccaagagtctgagcggcggaagaagctgcgctttcatccacgacagctatatctctcggtgaagcagggtgagctgcagaaagttatcttgatgctactggataacctagatcccaacttccaatccgatcagcagtctaagagaacgcccctgcacgctgctgcccagaagggctccgttgaaatctgccacgtgctgctgcaggccggggcaaatattaatgccgtcgataaacagcaaagaactcctcttatggaagccgtcgtcaataatcatctggaggtggccagatacatggtccagcgcggtggttgtgtgtatagcaaggaagaggacggttcaacatgcctacatcatgccgccaagatcgggaacttagagatggtatctctcttactgtccacaggacaagtggacgtgaatgctcaggactccgggggatggacgcctattatatgggcggctgaacataaacatatcgaggtgatcagaatgttgctgacacgcggtgctgatgtgacgctgaccgataacgaagaaaacatttgcctccattgggcttctttcaccgggtccgctgccattgcagaagtactgctgaacgcccgatgtgatctgcacgccgtcaattatcacggtgacactcctcttcatatagcagcccgagagtcttaccacgattgtgtgctgttgtttctgtctcggggggcaaatcccgaactgaggaacaaagagggagatactgcatgggacttaacacctgagaggtccgatgtgtggttcgccctacagctcaaccgcaagctgcgtctcggtgtaggcaatcgagcaattcgtaccgagaaaatcatttgccgcgacgtggcccggggatacgaaaacgtacccataccttgtgtgaatggggtggacggcgaaccatgcccagaagattacaagtacatcagcgaaaattgtgagacttctacgatgaatattgatcggaatatcacccacctgcaacactgtacatgtgtagacgactgctctagcagcaactgtctgtgcggacagcttagcattcggtgttggtacgataaagatggtaggctgctgcaggaattcaacaagatcgagccacccctgatctttgaatgcaatcaggcatgttcatgttggcgcaattgcaaaaaccgcgtcgttcaatcaggcattaaagtccggctgcagctgtatcgtacagcaaagatgggctggggggtgagggctctgcagaccattcctcaagggacatttatttgtgagtatgtgggggaattaatcagcgatgccgaggccgatgttagagaggacgactcatacctgtttgacctggataataaggatggagaggtgtattgtatcgatgcccgttattatggtaacatcagccggttcatcaaccatttatgcgatcctaatatcatccccgtgagagtgttcatgctgcaccaagacttgaggttcccccggatcgcttttttttcatcccgagatatccgaactggtgaagagctgggatttgattatggtgaccgattctgggatataaagtccaaatacttcacctgccaatgtggtagcgagaagtgcaaacattccgctgaagcaatagccctggaacagtctcggctggcgcggttggatccacatccggaactactgccggagttggggtctctgccaccagtgaacacatag

SEQ ID NO: 108169 - DNA, 3702 bp, Artificial Sequence
  derived and/or modified sequence
atgcggggcctgccccggggccggggcctgatgcgggcccggggccgaggccgggcggcccctcctggttctagaggacgcggacggggtggcccccataggggccgcggcagaccccgctctcttttgtctttgcccagggcgcaggcttcctggacacctcagcttagcactgggctcacttcacctccagtcccctgtctgcccagccaaggagaggcacctgctgagatgggtgccctgctactggagaaagagacacgcggtgcaaccgaacgggtgcacgggagccttggtgatacccccaggagtgaggaaactttgcccaaggcaacccccgacagcctggagccagcggggccttcatctcccgccagcgtaacagttacagtgggagacgagggcgccgacacccccgtcggcgccactcctcttatcggggatgagtctgagaacttggagggtgatggggacctccgcggaggaagaatcctactgggacatgctactaaaagtttcccttcttcaccgtctaagggtggcagctgtccttcccgtgctaagatgtcaatgacaggtgctggcaagtcaccgccctccgtgcaatctctcgcgatgcggctgctgtcaatgcccggagcccaaggggcagccgcagctggctccgagccacctcctgccacaaccagccctgagggccagcccaaggtgcaccgggcaaggaaaactatgtctaaacctgggaacgggcagccccctgtgcccgaaaaacgaccaccggaaatccaacacttccggatgtcggatgatgtacactccctgggcaaagtgacttccgacctagcgaagcggcgcaaactgaattccgggggcggcctcagtgaagagctgggctctgcccggaggtctggcgaagtcaccctaacgaagggcgaccccggatccctcgaggaatgggaaacggtcgtgggggacgatttctccctctactatgatagctactctgtagatgagagggtggacagcgactccaagagcgaagtcgaagctctcaccgagcaactgagtgaggaggaagaggaggaagaagaagaagaggaggaagaggaagaggaggaagaggaggaggaggaagaggaagacgaggagtccggtaaccagagcgatagaagcggcagctcagggagacggaaggccaaaaagaagtggagaaaggatagtccctgggtgaagccctctcggaagcgcaggaagcgagaaccgccccgggcgaaggagcctcgcggagtgtccaatgatacttcctctctggagacagagcggggctttgaggagctgccactgtgttcttgtcggatggaggctccaaaaatcgatcgcatctccgagcgagctggccacaagtgtatggcaacagagagcgtggatggagaactaagcggttgcaatgctgccatcctcaaacgggaaactatgcgcccatccagccgggtggcactgatggtgctgtgtgaaacccaccgcgcgcgtatggtcaagcaccactgctgtccagggtgcggatacttttgcaccgcagggaccttcctggaatgtcacccagattttcgagtggcacaccgatttcataaagcctgtgtcagccagctgaacggtatggtgttctgccctcactgtggcgaagacgcttcggaagctcaggaagtgacgatcccgcgcggggatggcgttacaccacccgcggggactgccgcccctgctcctcccccactctcccaagacgtgcctggacgagccgacacatcacaaccgtccgcaagaatgcgaggacatggagagccccgacgacctccttgcgatccactagccgacacaatcgactcctctggccctagtctgacgttgccaaatggcggttgcctctccgctgttgggctgcccctgggacctggacgggaagcactggaaaaggccctggtcattcaagaatccgagaggcggaagaagctacgcttccatcctcggcaactgtatctttccgttaaacagggcgagctgcagaaggttatcttaatgctgctcgacaatttagatcctaacttccagagcgatcagcaatctaagcgcactcccttgcacgccgctgctcagaagggcagcgtggagatttgccacgttctgttgcaggctggcgcaaacatcaacgctgtggacaagcagcagaggacacctctcatggaagcggttgttaataaccatctcgaggtcgctaggtatatggtacaaagaggaggttgcgtctattctaaggaggaggacggatcaacttgtctccaccatgccgctaaaataggtaatctggaaatggtaagcctgttactgtcaacggggcaggtcgatgtaaatgcccaggactcaggaggttggacgccaatcatctgggcagcagagcacaagcacatagaggtgatcaggatgctgctcactaggggtgccgatgtaacattaacagataacgaagagaacatttgcctccactgggcctcttttactggatctgccgcgattgccgaagtgctacttaatgcgcggtgcgaccttcacgctgttaattaccatggggacactccccttcatatcgcggctagagagtcatatcatgactgcgtcctcctgttcctgagccgcggtgcaaaccctgaattacgcaataaagagggggataccgcttgggacctaacacccgaaagatctgacgtctggtttgcacttcaattgaataggaagcttaggttgggcgtcggaaacagggccatacgcacggaaaaaatcatctgtcgggacgttgcaaggggttatgagaatgtgccaatcccttgcgtgaatggtgtggacggtgagccgtgtccagaggattacaagtatattagtgaaaattgtgagaccagcaccatgaacatcgacagaaatattacacacctccagcactgtacttgtgtcgatgattgtagctcgagcaattgcttgtgtggacagcttagcatcagatgttggtacgacaaagacggccgcttgttacaggaatttaacaagatcgagcctcccctcatctttgagtgcaatcaagcctgttcctgttggcgcaactgtaagaatcgagtcgtccagtcaggcattaaagttagattgcaactgtaccggacagcaaaaatgggatggggtgtccgcgctctccaaaccataccgcagggtacattcatttgcgaatacgttggcgagctgatctctgatgcggaagctgatgtgagggaggatgacagttatctttttgacctcgataacaaagacggcgaggtgtattgtatcgatgctcgatattatggaaacatttcccggtttatcaatcatctctgcgaccctaacattatcccggttcgggtctttatgttgcaccaggatctcagattccctaggatcgctttcttttcctcgagggacataaggaccggtgaagagcttgggttcgattacggtgacaggttctgggacatcaagtccaagtactttacatgtcagtgcggcagcgagaagtgcaaacacagcgcagaggccatcgcgctggagcaatctcgcctggctaggctcgacccgcatcctgagctgcttcctgaactgggaagtctacctcctgttaatacatag

SEQ ID NO: 108170 - DNA, 2667 bp, Artificial Sequence
  derived and/or modified sequence
agcgaggtggaggccctgaccgagcagctgagcgaggaggaggaggaggaggaagaggaagaagaggaagaggaggaggaggaagaagaagaagaggaggaggaggatgaggaaagtggaaatcagtcagatcggtcaggatctagcgggcgccggaaggcaaaaaagaaatggagaaaggactccccttgggttaaaccctccagaaagcggagaaagcgagagcccccaagggccaaagagccacgtggggtctctaacgatacaagtagcctcgaaaccgagaggggcttcgaggaactaccgctctgtagttgccgcatggaggcccctaagattgatcggattagcgagcgcgcaggacacaagtgtatggccacagagagtgtagacggtgaactgtctgggtgtaatgcggcgatcttgaagcgtgaaactatgcggcccagtagcagagttgccctcatggtcctgtgtgagacacaccgcgcgcggatggtgaaacatcactgctgtcctggctgtggatatttctgcaccgccgggactttcttggagtgtcatcctgactttagagtcgcccacagatttcacaaagcctgcgtttctcaacttaatgggatggttttttgcccacattgcggcgaagacgctagtgaggcacaggaggtgacaatccctagaggagacggggtgacgccgcctgcaggcactgctgccccagcaccccccccattgagccaggacgtgcctgggcgcgccgatacaagtcaaccttcggctcgcatgcggggccacggtgagccacgccgccctccatgtgacccgctagccgacaccattgacagctctgggcctagcctcacgcttccaaatggcggctgcttatctgccgtaggcctgccactcggtccaggaagagaggccttggaaaaagctctggtgatccaggaatcagagagaagaaaaaaactgcgttttcacccacgccagctctacttaagcgtgaaacagggagagttgcagaaggtgattttgatgttgcttgataatttggatccaaacttccagtccgatcagcagtcaaagcggactcccctccatgccgccgcccagaaagggagtgtcgagatctgtcacgtgctccttcaggctggcgccaacattaacgcagtcgataagcagcagcggacacccctgatggaagccgtggttaataatcatctcgaggtggctcggtatatggtgcaacgaggcggatgcgtttattccaaggaggaagacggatcaacatgtctgcaccacgccgctaaaattggcaacctcgaaatggtgtcccttctcctaagcaccggccaggtggatgtcaacgctcaggacagcggcggctggacccctatcatctgggcagccgagcacaagcatattgaggtcatcagaatgttactgactaggggagccgacgtgaccctcaccgacaatgaggaaaacatatgcctgcactgggcgtcattcacaggatctgctgcaattgccgaggtactgctgaacgcgaggtgcgacctgcatgctgtgaactaccatggcgacactccactgcacattgctgctagagagagttaccatgattgtgtgttgctcttcctttctcgtggagccaacccagagctacgaaacaaagagggcgacacggcttgggatctaactcctgaacggtctgacgtgtggttcgcactccagctgaaccggaagcttcgcttgggggtcggtaatcgcgccatacgaacagagaagatcatttgccgcgatgtggccagagggtatgagaatgtgcctatcccatgcgtgaacggtgtggacggggagccatgcccagaagactataaatatatatcggaaaactgtgagacgtcaactatgaatattgacagaaatattacccacttgcagcactgcacatgtgtggatgactgtagctcctcgaactgtctctgtggacagctgagcattaggtgttggtacgacaaggacggtcgattactgcaggaattcaacaagattgagccaccactgatatttgagtgcaaccaggcatgtagttgctggaggaattgcaaaaaccgggtggtgcaatccggcatcaaggtcaggcttcaactctatagaaccgctaagatgggctggggcgtgcgggcgctgcagacaattccccagggcacttttatttgtgaatacgttggagaactcatctccgatgcagaggcagacgtacgcgaagacgacagctacctgttcgatctcgataacaaagatggcgaagtgtactgtattgatgcccgttactacggaaacatttccaggtttattaatcatctttgcgatccaaacattatcccagtgagggtgttcatgctgcaccaggacctgaggtttccgcgtatcgcatttttcagtagccgagacattcggactggagaggagcttggctttgattatggagaccggttttgggatatcaaaagcaaatactttacatgtcagtgtggaagcgaaaagtgtaagcattcagccgaggcaattgcgctggagcagagccgcctcgcacgcttagacccacaccccgagctactcccggagctcggcagtctacctccggtgaatacctag

SEQ ID NO: 108171 - DNA, 3531 bp, Artificial Sequence
  derived and/or modified sequence
atggccgccgccgccggcgccgccgccgccgccgccgccgagggcgaggcaccggccgaaatgggagcactgcttcttgaaaaggaaacgcgaggagccacggaacgggtccacggatccctgggcgacactccccgctccgaggaaacactgcccaaagccaaccccgatagcctcgagccagcagggcctagctcgccagcaagcgtgactgtcacggttggtgacgagggcgcagacactccagtgggtgctacccctcttatcggagatgaatccgaaaacttggagggagatggcgatctccgcggtgggcggattttactcggccatgctaccaagagcttcccaagttctccaagcaaaggcgggtcctgccccagccgcgctaaaatgtccatgaccggggctggcaagtcaccaccgtctgtgcaatctttggccatgcggcttttgtctatgcccggcgcccagggcgcggctgctgctgggagcgagcctcctcccgctaccacatcccctgaagggcagcccaaagtacaccgcgcaagaaagaccatgtcaaagccgggaaacggtcagccccctgtcccagaaaagcggccacctgagatacagcactttcggatgtctgacgacgtgcattcgctaggcaaagtgactagtgatcttgcgaaaaggaggaaactgaatagcggcggcggactatcagaagaattgggctctgcacgtcgatccggcgaggtcacactcactaaaggcgatcccgggtctctggaagaatgggaaacagtggtcggcgacgacttcagcttgtactatgactcctattcagtcgacgaaagagtggacagtgatagtaaatccgaagtcgaggccctcaccgagcaattgtctgaggaagaagaagaggaagaggaagaagaagaagaagaggaagaagaagaagaggaagaggaggaggaagaagacgaggaaagcggcaatcagagcgaccggtccggctcatccggacgacgcaaagccaagaaaaagtggagaaaggattcaccatgggtgaagccgagccggaaacggcgaaaacgcgagcccccaagagctaaagagccccggggagtatccaatgatactagtagtctggaaaccgaacggggattcgaagagctccctttatgctcctgtagaatggaggctcctaagattgaccgcataagcgaacgtgccggacataaatgcatggccaccgagagcgtcgacggagaactgtcaggatgtaatgcagcaatactaaagcgagaaactatgaggccttcctcaagggtggcccttatggtactctgtgagactcaccgtgcacggatggtgaaacatcactgctgcccaggctgcggatacttttgtactgccgggacattcctggagtgtcaccccgatttccgggtcgcccaccgatttcacaaagcttgcgtgagccagcttaacggaatggttttctgtcctcattgcggggaggacgccagtgaggcacaggaggtgacaatccctcgaggggatggtgttacacctcccgccggcacagccgcaccggcccccccaccattgtctcaggacgtacctggaagggctgacacatctcagcctagtgcccgcatgcgcggccacggagagccacgacggccgccctgtgaccctctcgctgataccattgattcatctggtccctctctgacactgccaaacgggggctgcctgtcagctgtgggtctgccacttgggcctggacgtgaggctttggagaaggcgctggtcattcaagagtccgagcggcggaaaaagctgagattccaccctcgccagctatatctgtcagtcaaacagggggagctgcagaaggttatcttgatgctgcttgataatttggatccaaactttcagagtgatcagcaaagtaagcggactcctctccacgctgctgcacagaagggatctgtcgagatctgccacgtcctgctgcaggccggggccaacatcaatgccgtggataagcagcagcgaactccactgatggaggccgtggttaataaccacttagaagtggctagatacatggtccagcgtggcggctgtgtttatagtaaggaggaagatgggtccacctgcttgcatcatgcagcaaagatcgggaatttggagatggtgtcccttctgttgagtacaggacaggtggatgtgaacgcccaagactccggcggctggactcctatcatatgggccgctgagcataagcacatcgaagtcattcggatgctgctgacgagaggtgcagatgtgaccttgaccgataatgaagagaatatctgcctgcactgggcctcttttaccgggtcagccgctatagcagaggtgctccttaatgccagatgcgaccttcatgcagttaattaccatggtgatacgccgctacacatcgctgcacgggagtcataccacgactgcgtgctgctgtttttgtctcgcggagcgaacccggagctgcgcaacaaggagggcgatactgcctgggatttgacaccagaaaggtctgacgtgtggtttgccctgcagctgaatcggaagctgcgtctcggagtgggaaacagagctatccgcacagagaagattatctgtcgggacgttgctcgcggctacgagaacgtgcccattccatgcgtgaacggcgtcgacggggaaccatgcccggaagactataaatatatctcagaaaattgcgagacttcaaccatgaatattgaccggaacatcacacatctccaacattgtacgtgcgtggatgactgtagcagcagcaattgcttgtgcgggcagctgtcaatcagatgctggtatgacaaagatgggcgcctgcttcaagagtttaacaagatagagcctccactgatctttgaatgtaatcaagcctgctcctgctggaggaactgtaagaacagagtggtgcagagtggaatcaaggtgagattgcagctgtacaggacagccaaaatgggctggggggtacgcgcattacagacaattcctcaaggcaccttcatatgcgaatatgtaggcgaattaatttccgatgcagaagctgatgtacgcgaggatgacagctatctgttcgatttggacaacaaggacggcgaggtgtactgcattgacgcccggtattatggcaacattagtaggtttatcaaccatctgtgtgaccccaacatcatccctgtgcgggtgtttatgcttcaccaggatttacgattcccaagaattgcattcttttctagtcgagatattaggaccggggaggaattaggtttcgattacggagataggttctgggatatcaaaagcaagtacttcacttgtcagtgcgggagcgaaaaatgcaaacactctgccgaagcgattgcccttgaacagtctcgattagcgcgtctggacccacaccctgagctcctgcctgagctgggttcattaccacctgtaaacacctag

SEQ ID NO: 108172 - DNA, 3702 bp, Artificial Sequence
  derived and/or modified sequence
atgcggggcctgccccggggccggggcctgatgcgggcccggggcaggggacgcgcagcacctccaggttcccggggaaggggccgggggggcccccatcgcggacggggtaggcctcggtctctgttgtcgctgccgagggcacaagcctcgtggactccgcagttaagcacaggcctgacatcccccccagtgccttgtctgccctcacagggagaagccccagctgagatgggcgctctgctgctggagaaggaaactagaggcgccacggagagagtgcatggatccctgggtgacacacctcgtagtgaggagaccttgcccaaagcaacccccgattctttagagcctgctggtcccagtagtcccgcctccgtgactgtcacagtgggggatgagggagcggatacccccgtgggcgcaaccccactgatcggcgacgagagcgaaaaccttgaaggcgacggcgacctccgaggaggaaggatactcttgggtcacgcgactaagtccttcccctcctcacctagtaaaggcgggtcatgtccttcccgcgccaaaatgtcgatgacaggcgctggaaaatcaccgccgtctgtgcagagtctggccatgagactgttatccatgccaggagcccaaggcgctgcagcggctggctcggaacctcctccagcaaccacatctccggaaggccagccaaaggtgcacagggccaggaagactatgagcaaacctgggaacggccagcccccagtgcccgagaagaggccccctgagattcagcatttcaggatgagcgacgacgtgcacagtttaggaaaagtcaccagcgacttggccaagcggaggaaattaaactccggaggcggactgagcgaggagctgggatccgcccgcaggtctggggaagttacactgactaaaggggaccctggctccttggaggaatgggaaacagtggtgggggatgattttagcttatattatgattcctacagtgtcgacgaacgcgtagactccgacagtaagtccgaagttgaagccctgacagagcaactttccgaagaagaggaggaagaagaagaggaggaggaagaggaggaggaggaggaagaggaggaagaagaggaagaggacgaagagagtggtaatcagtcagaccgcagcggatcttctggacggcggaaggctaaaaagaagtggcgcaaggatagtccctgggtcaagccatctcggaagcgtcgcaagcgcgagcctccaagagcaaaagaaccacgcggggtgtccaacgacaccagctctttagagacagaacgcggattcgaagagctgcccctgtgtagttgtagaatggaagcgccaaaaattgatagaatttctgagagagccggacataagtgcatggcgacagaaagtgtggatggcgagttgtcgggatgcaatgccgccatcctcaagagagagactatgaggccaagtagtagagtggccctcatggttctgtgcgaaacacaccgtgctcgaatggtaaaacatcactgctgtcccggctgtggctatttctgtaccgccggcacttttctcgaatgccacccagactttcgggttgcgcaccgctttcacaaagcctgcgtgtcccagcttaacggaatggtcttctgtccacattgcggtgaagacgcgtcagaagctcaagaggttacgattccacgaggggatggggtaactcctccagctgggacagccgcccccgcgcctccaccgctttcccaggatgtgcccggtcgcgctgatactagccaaccctcggcgcggatgcgaggccacggagagcctcgaaggccaccctgcgatcccttggccgacacgattgactcaagcggcccgagtttgacactgcctaatggaggatgcctatctgccgttggcttaccactcggcccagggcgcgaggcactcgaaaaagcgctggtgatccaggagagcgaaaggcggaagaaattgcgctttcacccccgccagctctacctgtccgtgaagcagggagagttgcagaaagttatattgatgcttctggataacctagacccaaatttccaatctgaccagcaaagcaaaagaacccccctgcacgcagccgcccaaaagggttctgtagagatttgccatgtgctcctccaggctggcgctaacatcaatgctgtagataaacagcaacgtacccccctgatggaggctgttgttaacaaccaccttgaagtggcaaggtatatggtacaaagaggcggctgcgtgtatagcaaggaagaggatggctctacttgccttcaccacgctgctaagattggaaatttggagatggtgtcacttctgttgtctaccggacaagtagatgtgaatgcacaggatagtggcggatggacgccaatcatttgggcagccgagcacaagcatatcgaggttatccggatgcttctaacccggggagctgacgtaacgctgaccgataacgaggagaacatatgtttacactgggcaagctttactggctcagctgccatagccgaagtcttactgaacgcccgatgtgatctgcatgccgtgaattaccacggagataccccattacacattgccgcaagagaatcctatcacgactgcgtccttctatttctgtcccgaggcgccaacccagagctccggaataaagagggcgacactgcgtgggatctgacacctgagagatccgacgtatggttcgcattgcagcttaaccgtaagctcaggttaggagttgggaaccgggctattcgcacggagaaaattatatgccgcgacgtggcacgtggatacgagaatgtgcccatcccctgcgtgaacggagttgatggggagccctgtcccgaagattacaagtatatttcagagaactgtgagacatctacaatgaacatcgacaggaatattacccatctgcagcattgcacttgtgtagacgattgcagcagcagcaattgtctctgcgggcagttatccatccgttgctggtacgataaagatggaaggctgctgcaagagtttaataagattgaacctcctctcatcttcgaatgtaaccaggcctgcagctgttggaggaactgcaaaaacagggtggtccaatctggcatcaaggtcaggcttcagctataccgcaccgccaagatgggctggggagttcgggctttacagacaatacctcagggcacctttatctgtgagtatgtaggcgagctcatttccgatgcggaggcagacgttagggaggatgactcatatctgtttgacctggacaataaggatggggaggtgtattgtatagacgcaagatattatggaaatattagcagatttatcaaccatctgtgtgatcccaatataattcctgtgcgcgtttttatgcttcaccaagacttgcgttttccaaggatcgcttttttctccagccgagatatccggaccggagaggaactgggcttcgattatggcgatcgtttttgggatattaagtccaagtattttacctgtcagtgtgggtcagagaagtgcaagcattcagcagaagcaatcgcactggaacagtcacgactggcgcgcttagatccccaccccgagttattgcccgaactgggctcactcccccccgtaaatacgtag

SEQ ID NO: 108173 - DNA, 3531 bp, Artificial Sequence
  derived and/or modified sequence
atggccgccgccgccggcgccgccgccgccgccgccgccgagggcgaagcccccgctgaaatgggggctctgctgctcgagaaggaaacacggggcgctaccgagcgggtccacggctcactcggagacaccccccgaagcgaggagacactgccgaaggccactcctgattctctggagccggctggtccttcctctccggcgagtgtgacggtgacggtgggggacgaaggagctgacacccccgttggagccaccccgcttattggcgacgagtctgaaaacctcgagggagatggagatctcaggggcggcagaattctcttagggcacgctaccaaatcgttcccatcctcccctagcaaggggggctcctgtccctctcgggcaaagatgtccatgacaggcgctggcaagagtcccccaagtgtccagtccctggccatgcggctgctgtctatgcctggcgcgcagggcgcagccgccgccggtagtgaaccccctcccgccaccaccagcccagagggccagcccaaggttcatagggccagaaagaccatgtccaagcccgggaacggccaaccgcctgtgcctgagaaaaggccaccagaaatacagcattttcgtatgtccgatgacgtgcactccctgggaaaagtcacgagtgatttagccaagcgccgtaaacttaattcaggcggtgggttatctgaagaattgggcagtgccaggagatccggagaggtgaccctgaccaaaggcgatcctggcagcctggaggaatgggagacagtcgtgggagacgacttctcactgtactacgacagttactctgtggacgagagggtggatagcgactccaagagcgaggtagaggctctgacagaacagctgtccgaggaagaagaagaggaagaagaggaggaggaagaggaggaggaggaagaagaggaagaagaagaggaagaagacgaagagtcaggaaaccagagcgatcgttcaggcagcagtggcaggcggaaggccaagaaaaagtggcgaaaggacagcccatgggtaaagccatcccggaagcgcaggaagcgtgagccacctcgggctaaagagccaaggggtgtaagcaacgacacgagttctctggaaactgaacgcggctttgaagaactgcctctgtgttcttgtagaatggaagcccccaagatcgaccgcatatctgaacgagccggccacaagtgcatggcaacagaaagcgtcgatggtgaactgagtggctgcaatgcagccatactcaaacgggagacaatgcgcccgtcgtcacgcgtcgccctaatggtcctttgcgaaacccatcgcgcccggatggtgaagcaccactgttgtccagggtgcgggtatttttgtacagcggggacatttctggagtgtcaccccgattttagagtggctcacagatttcataaggcatgtgtctctcaacttaatggaatggtgttctgtccccattgtggagaggacgcttcagaagcgcaggaagttacaataccaaggggagacggcgtgactccacccgcaggcacagccgcaccagcaccgcctcccctgtctcaagatgtgcctggcagggccgataccagtcagccctcagcgaggatgaggggccacggtgagccaaggaggcccccatgcgacccgttggcagataccattgattcttcagggcccagcttgactctgccaaacggaggctgtctctctgccgtcggattacccctcggccccggtagggaggccctagagaaagcactcgttatccaggagtccgaaagaaggaagaagctaaggtttcaccccagacagctgtatttaagtgtgaagcagggggagttacagaaagttattctgatgctgctagacaatctcgaccctaattttcagtcagaccagcagagcaagcgcaccccattacatgcagcggcacagaaaggtagtgtggagatctgtcatgtactgctccaggctggagcaaacatcaacgccgttgataagcagcaaaggactccacttatggaggccgtggtaaataatcatctcgaagtggctagatacatggtgcaacgcggcggctgtgtgtattcgaaagaggaggacggctctacttgcctccatcacgctgcaaagatcggcaatctcgagatggtgtccttgctgttatccaccggacaggtcgatgtcaacgcccaggactccggagggtggacacctataatctgggccgccgagcacaaacacattgaggttatacgaatgttgctcacaaggggtgcagacgtaacattgactgataacgaggagaacatctgcctgcattgggccagttttaccggaagcgccgccatcgccgaggtgctgttgaacgctagatgcgacttgcatgccgtgaactaccatggtgatacgcctttacacattgctgctcgagaatcctaccatgactgcgtgctgttgttcctgtcaaggggagctaatcctgaactccgaaacaaagagggggacaccgcatgggatctgactcctgagcggagcgatgtctggtttgctttgcagctaaaccgaaagctgcgcctgggagtcggaaatagagcgatacgcactgaaaaaattatatgtagggatgtcgcccgaggctacgagaacgtaccaatcccctgtgtcaacggagttgacggcgagccttgcccagaagactacaagtacatctccgaaaactgtgaaacctcgacaatgaatatagatcgcaacattactcatctgcagcactgcacctgtgtggacgattgttccagttccaattgcctctgtgggcaactgtccatccgttgctggtatgacaaagacggcagactgctgcaggagttcaataagatagagccaccgctcatctttgaatgtaaccaggcgtgctcttgttggcgtaactgcaaaaatcgcgtagtgcaatcaggtatcaaagtccgtctgcagctgtaccggactgcaaaaatgggttggggcgtgcgggcccttcagacgattcctcagggtacatttatctgtgaatacgtgggagagctcatttctgatgctgaggctgacgtgcgggaagatgactcttatctcttcgatctggacaataaagacggggaagtctattgtatcgatgccaggtattacggtaacatttcgcggtttattaaccacctctgtgaccctaacataattcccgttcgggtcttcatgctccaccaggatttacggtttcccaggatagcatttttcagtagccgagacataaggaccggtgaggaactgggattcgattatggcgatcggttttgggatatcaagagtaaatacttcacatgccagtgtggcagtgagaagtgcaagcattcagctgaagcaatcgcactggagcaaagcagactggcccgcctggacccccatcccgagctgctccccgagttaggtagtctccctcctgtgaatacatag

SEQ ID NO: 108174 - DNA, 3702 bp, Artificial Sequence
  derived and/or modified sequence
atgcggggcctgccccggggccggggcctgatgcgggcccggggcaggggcagagccgccccgcctggttcgcgggggagagggagaggaggtccccaccgcgggcgaggcaggccacgctcgctcctgagcctgccccgcgcccaggcaagttggacgccccagctgagcaccggactcaccagtcccccggtcccctgcctgccaagccagggtgaggcccccgccgaaatgggagcgctgctgttggagaaagagacgcggggcgctacagagagggttcacggctccctcggcgacactcctaggtcagaagaaaccctccccaaggctaatcccgactctctggaaccggcagggccttcctctccagcaagtgtgactgttactgttggcgatgaaggagcagatactcccgtcggagccaccccacttatcggagatgagtctgagaatctggagggtgatggcgatctgagagggggccggattctgcttggccatgcaaccaagagcttcccaagtagcccgtccaagggcgggtcttgcccgtcacgggccaagatgagtatgaccggagccggcaagagcccccctagcgtacagtcactggctatgagactgctgtccatgccaggcgcgcagggggccgcggccgcaggatctgagcccccacctgctaccacctctccagagggacagccgaaagtccacagggccaggaaaaccatgtctaaaccaggtaatggccaaccaccggttcccgaaaagcgacctccagagattcagcattttcggatgtccgacgacgtccattcccttggaaaggtgacctccgatttggctaaacggagaaagctgaattcaggcggcgggttatctgaagaactcggtagtgctagacgttccggcgaggtgacactaacaaaaggagatcccggaagcctggaagaatgggaaaccgttgtgggtgacgacttctcgctgtattacgactcgtacagtgttgatgagagagtggactcagacagcaagtcggaagttgaagctctcactgaacagctgtccgaagaggaggaggaagaggaagaggaagaggaggaagaagaagaggaggaagaagaagaggaggaggaggaggacgaggaatccgggaatcagtcagaccggtctggtagttcaggcagacgaaaggccaagaagaaatggaggaaagactcaccttgggtgaaaccttctaggaagcggcggaagagggaaccacccagagccaaggagccgcgtggggtgtccaatgatacctcgagcctagagaccgagcgcgggttcgaagaactgcctctttgcagctgcaggatggaggctcccaagatagaccgtatcagcgaacgcgctggccacaagtgtatggccaccgagtcagtcgacggcgaactgtccggatgtaatgccgccattttgaagcgagaaactatgagacccagttcaagagtcgcattaatggtgctgtgcgagactcaccgggcccgaatggtgaagcaccactgctgccctgggtgtggatacttttgtacagcaggcaccttcctggagtgtcaccctgatttccgtgtggcccatcgttttcacaaagcctgcgtcagccagctcaacggtatggtgttttgcccacactgcggcgaggatgcttccgaagctcaggaagtcaccatcccaaggggcgatggagtgacacctcctgcagggaccgccgcaccagctccccccccccttagccaggatgtgccggggagggctgacacaagtcaaccatcagctcgcatgcgcgggcacggcgagccccggcgcccgccgtgtgacccgctcgctgacaccatcgattccagtgggccctctctgaccctccccaacggtggatgccttagcgcagttggtctgcctctgggacccggccgcgaagcactcgaaaaggccctggtgatccaggaaagtgaacggcgcaagaagctccgcttccaccctagacagctttacctgagcgtgaagcagggagaactgcagaaagtaattctgatgctccttgacaaccttgacccgaatttccagtcggaccagcagagcaagcgtacccccttgcacgccgctgcacagaaaggcagcgtcgaaatttgtcatgtactccttcaggccggggcaaacatcaatgcagtagacaaacagcagcgcactccactgatggaagctgttgtgaataaccacttagaagtggctcgctacatggtgcaacgcggcgggtgtgtatatagcaaagaagaggacggtagcacatgtcttcatcatgccgcaaaaataggcaacctcgaaatggtcagtctgctcctctctacaggtcaggtcgacgttaatgcccaggattccggcggctggacacccattatctgggctgctgaacataaacatatcgaggtgattaggatgctcctgacacgcggagccgatgtgactctgaccgataatgaagagaatatttgcctccattgggccagctttacagggtcagccgccattgcagaggtgctgctgaacgcgcggtgcgatctccacgctgttaactaccacggggacacacccctccacattgccgcaagagagtcgtatcatgactgtgttttgttgtttctcagcaggggggcaaaccccgagctgcgaaataaggagggtgacacggcttgggacctaacccccgaacgcagtgacgtgtggtttgcactgcaacttaaccgcaagctccggctgggtgtcggaaatcgcgcaattcggactgaaaagataatttgtcgtgacgtcgcccgcggatacgaaaatgtacctattccttgcgtcaacggtgttgacggggagccttgcccagaagattacaagtacatctctgaaaactgtgaaacttctacaatgaatattgatcgtaatattacccacctgcaacactgtacttgcgtggacgactgttcctccagtaattgcctgtgtggtcagttgtcgatacggtgctggtacgacaaagatggcaggctcctgcaggagttcaataagattgaaccacctctgatcttcgagtgcaaccaggcatgctcttgttggcgtaactgcaaaaaccgggttgtgcagtctggcattaaggttaggttgcagctgtataggaccgctaaaatgggttggggggtgcgcgcacttcagactatacctcagggtacattcatttgcgaatacgtcggtgaactgatctctgacgccgaggcagatgtcagagaggacgactcctatttatttgatcttgacaacaaagacggggaggtctattgcatcgacgcaagatattacggcaacatttcacggttcattaaccacttgtgtgaccccaacattatcccggtgagagtctttatgctgcatcaggatctacgatttcctcggatcgcctttttctccagccgggacatcaggacaggcgaggaactggggttcgactatggagacagattctgggacatcaagagcaagtacttcacatgtcaatgtgggagcgagaaatgcaaacacagtgccgaggccattgctctggaacagtctaggcttgcccggcttgacccccaccccgagctcttacccgaactcgggtctctgccacccgtgaacacctag

SEQ ID NO: 108175 - DNA, 3531 bp, Artificial Sequence
  derived and/or modified sequence
atggccgccgccgccggcgccgccgccgccgccgccgccgagggcgaagcgcccgccgagatgggagcattactcctcgaaaaagagacacgtggcgctaccgaaagagtgcatggctcattgggtgacactcctagaagtgaagagacactccccaaagccaaccctgattctctcgagcccgccggaccgtccagtcctgcctccgtcacagtgaccgtgggggacgagggggccgatacacccgtaggagcgacgcccttaataggagatgaatccgagaacctagaaggcgatggagacctaaggggggggcgcatactgctggggcacgccaccaagtcttttcccagttccccatccaaaggcggaagttgtccctctcgtgccaaaatgtccatgactggggccgggaagtctcccccctccgtccagtcactagctatgcgcctgctcagcatgcccggggctcagggcgctgctgcagccgggtctgagccacctcctgccaccacctcgccagagggccaacccaaggtacaccgcgcccggaaaactatgtccaagccaggaaacggtcaaccgcctgtccccgagaagcggcccccagagattcaacacttcaggatgtccgacgatgtacattcactcggaaaggtgacatcagatcttgctaagaggcgaaagctgaattccggtggcggtttaagtgaagaactggggtcggctaggcggagcggagaagtgaccctcaccaagggagaccccggaagtctagaggagtgggaaacggtcgtgggagatgatttctctttgtactatgattcctacagcgtggacgaacgagtggacagcgattccaagagtgaagttgaggctctgaccgagcagcttagcgaagaagaggaggaagaggaagaagaagaagaggaggaggaggaggaggaggaggaggaggaggaggaggaggatgaagaaagtggcaaccaatcagaccggagcggaagttctgggcgacggaaggctaagaaaaagtggcggaaagacagcccttgggtgaagcccagcaggaagcgccgaaagcgggagcccccacgggcaaaagaaccgagaggcgtttctaacgacacctccagcctcgaaacggaaaggggctttgaagagctcccgctctgttcttgccgcatggaagcacccaagatcgacagaatttctgaaagggccggtcacaaatgcatggctactgagagtgttgatggcgaactgtctggctgcaacgcagccatcctgaagcgagaaacaatgcgaccctcctctcgcgtggcactaatggtgctatgcgagactcaccgcgccaggatggtaaagcatcactgttgtccaggctgcggttatttttgtaccgccggaaccttcctcgagtgtcatcctgattttcgcgttgcccatcgatttcacaaggcttgtgtgtcccagcttaacggaatggtcttctgtccgcactgcggagaggatgcatccgaagcacaagaagtcacgatccctaggggcgacggggtcaccccgcccgctggtaccgccgcacctgcgcctccacccttgagccaggacgtacctggccgggcagatactagccaaccatcggcacggatgagagggcacggcgaacccagacgacctccttgcgacccgctggctgacacaattgattctagcggaccctctctgactcttcctaacggtggatgtttgagcgccgtagggctgcctctgggtccaggccgcgaagctctcgagaaggcccttgtgattcaagaatccgagcgtagaaaaaagctgaggtttcacccacgccagttgtatctctccgtgaagcagggggagcttcaaaaggttattctgatgttattggacaaccttgatccaaacttccagagtgaccagcaatcaaagaggactcccttgcatgcagcagcccagaagggctccgtcgagatctgtcatgtcttgctccaggccggagccaacatcaacgccgtcgataaacagcagcgcactcctttgatggaggctgtggtgaacaaccaccttgaagtggcccgttatatggtgcagagaggggggtgtgtgtatagcaaggaagaggacggtagtacatgtctgcatcatgccgctaaaattggtaaccttgagatggtcagtctgctgctgagcactgggcaggtcgacgtgaacgcacaggactcaggaggctggacacccatcatctgggctgctgaacataagcacatcgaggtcataagaatgcttctgacaaggggagccgacgtgaccctgacagataacgaagagaatatttgcttacattgggcatcattcaccggcagcgccgccatcgcagaagtgttactaaatgcaagatgcgacctgcacgccgtcaactaccacggagataccccactgcatattgcagcaagagagtcatatcacgactgcgtcctcctgttcctgtcccgtggggccaaccccgaattgaggaataaggagggggataccgcttgggacctgaccccagagagatccgatgtttggttcgcacttcagttgaacagaaagctgcggcttggggtaggaaaccgtgcgatcaggacagaaaaaattatttgtcgggacgttgcaaggggctatgaaaatgtgcctatcccatgcgtcaacggcgtggatggtgagccctgccccgaagattataaatatataagtgagaactgtgagacttctactatgaacatagatagaaatatcacccacttgcagcattgtacttgcgtcgatgactgtagttcatcgaattgcttatgcggacagctctctatacggtgttggtacgacaaggatggcagactgctgcaggaatttaataagattgaaccgccattaatctttgaatgtaatcaggcttgctcatgctggcgcaattgcaagaaccgggtggtccagagtggtattaaagtacgcctgcagctctacagaactgcgaagatgggctggggggtgagagcactccagaccataccacagggaaccttcatatgcgaatatgttggcgaacttatttccgacgccgaagcagacgtaagggaggatgatagctatcttttcgatctggacaataaagatggagaggtgtactgtatcgatgccagatattatggcaacatctctcgtttcattaaccacctgtgcgaccctaacattattcccgttagggtgttcatgctccaccaggatctccgctttcctcggattgcttttttctccagcagggacatacgtacaggcgaggaactaggattcgactatggtgatcgattttgggacatcaagagtaaatacttcacatgccagtgcggatcggagaaatgcaaacactccgccgaggctattgcactggaacagtcccggctggccaggctcgacccccaccccgagttactccccgagctaggcagcctgcctccggtgaatacctag

SEQ ID NO: 108176 - DNA, 2667 bp, Artificial Sequence
  derived and/or modified sequence
agcgaggtggaggccctgaccgagcagctgagcgaggaggaggaggaggaggaagaagaagaagaggaggaagaggaggaggaagaggaggaagaggaagaagaggacgaagagtcaggcaatcagtccgaccgatctgggtcatctggccggcggaaagcaaaaaagaagtggcggaaggatagtccctgggtaaagccaagcaggaaaagacgcaagcgagagcccccacgagccaaagaaccacgcggagtgagcaatgatacctcttctctagaaaccgaacgggggtttgaagaactgcccctctgctcatgtcgcatggaggccccaaaaatcgacagaattagcgagcgggccggccataaatgcatggccaccgagagtgtggatggagagttgagcgggtgcaatgcagcgattttgaaacgggagacaatgcggccctccagcagggttgcgttaatggtcctgtgtgagacacacagagccagaatggtgaagcaccactgctgtccaggctgtggctacttctgtaccgctgggacttttctcgaatgccatcccgacttccgggtagctcatagatttcataaggcatgcgtctcccagctgaacggcatggtgttttgtccacattgtggggaggacgctagcgaggcacaggaggttacaattccacgcggcgacggcgtgacccctccagccggaacagcagccccagctccaccccctctctcccaggacgttcctggcagggccgacacttcacagccttcagcaaggatgcgcggtcatggcgagcctaggcgaccaccctgcgacccccttgcggataccattgactcttctggcccttcacttacattgccgaatggcgggtgcttatcagccgtgggcttacccttgggtccaggccgggaggccctggagaaggcactcgtgattcaggagtccgaacggcgcaagaaacttcgtttccacccccgccagctctacctgtcagtcaagcaaggcgaactgcagaaagtgatcctgatgctgctagataatttagacccgaactttcaatcagaccagcagtccaagcgtactcctctccacgccgccgcgcagaaagggtccgtggaaatctgccacgtgctgctgcaagcaggggctaacataaacgccgttgacaagcagcagagaacgcctctgatggaggcggtggtgaacaaccatttggaagtggccagatatatggttcagcggggaggctgcgtctatagtaaggaggaggacggatccacttgtctgcatcacgcggctaaaatcgggaacctcgagatggtctccctcctgctgagcactggacaggtcgacgtgaatgctcaggactctggcggttggactcctattatttgggcagccgagcataaacatattgaggtgattcgcatgctgctcaccaggggcgctgacgtgaccctcacagataacgaggagaacatatgcctacactgggccagcttcacgggaagcgccgcaatagctgaagtgttactcaacgcacgctgtgatcttcatgccgtgaattaccacggggacaccccccttcacatcgccgccagggaaagttaccacgattgtgtgctgctgtttttgtcccgcggcgcaaaccctgagctgcgcaataaggaaggggacacagcttgggatctaacccccgagcgcagcgatgtttggtttgcgctccagctgaacagaaagttacgccttggagtcggcaacagagcgatccggactgagaaaatcatctgccgggacgtggcaaggggctatgagaatgtccccattccctgtgtgaatggagtggacggcgaaccctgcccagaggattacaaatatatctcagagaattgcgagaccagcactatgaacattgaccgtaatatcactcacctgcagcattgtacgtgtgttgacgattgcagtagctctaattgtctctgtggccaactttccatccgttgctggtatgataaagacggaaggttgctgcaggagtttaataaaatcgaacctccacttattttcgaatgtaatcaggcctgctcttgctggcgcaattgcaaaaatagagttgtacagagcgggatcaaggttagactacaactttataggactgcaaagatggggtggggggttcgggccctgcagactatcccacagggaaccttcatttgcgagtacgtgggcgaattgatcagtgacgctgaagcagacgtaagagaagatgattcctacctatttgatttagataacaaagacggtgaagtttactgcatagatgcccggtactacgggaatatctctcgttttatcaaccatctctgcgatcctaatatcatcccagtgagagtttttatgctgcaccaggatctgcggttccccagaattgctttctttagttctagggacattcgcaccggtgaggaactcgggttcgattacggagatagattctgggatatcaaatccaaatacttcacatgccaatgtggctccgaaaagtgcaagcatagcgccgaagcgattgccttagaacaatcaaggttggctagactcgaccctcacccggagctactaccagagttgggatccctgccgcccgttaacacctag

SEQ ID NO: 108177 - DNA, 3702 bp, Artificial Sequence
  derived and/or modified sequence
atgcggggtctgcccagaggacgaggtctgatgagagctcggggtcggggaagagcagccccacctggctcacgcggaagaggccgaggaggtccgcaccgcggtcggggaagacccaggtccctattatccctaccacgggctcaggcctcctggactcctcaactctctaccggactgacttccccacctgtcccttgtctaccatcccagggcgaggcccctgccgagatgggggcactgctactcgaaaaggagactcggggagccacagagcgggtgcatggatctctcggggacacacctcgcagtgaggaaacgttacctaaagctacacccgactccttggaacctgccggtccgagctccccagcctcagtcactgtgacagtgggagacgagggtgcagacacaccggtgggagcaactcccctgataggcgatgaaagcgagaacttagagggagatggggacctccgtgggggaaggatcttactgggccacgccacaaaaagcttcccttctagcccatcaaaggggggttcatgcccctctcgagccaagatgagtatgacgggggctgggaaatctccaccaagcgttcagagcctcgctatgcggttgctgagtatgcccggtgcacagggtgcagctgcagcagggtccgagcctcccccagcaacaactagtcccgagggacagcccaaagtgcaccgagctagaaagaccatgagtaaacctggcaacgggcagcctcccgtgcctgagaagaggccaccagaaatacaacacttccgaatgtctgacgacgtgcacagcctggggaaggtcacgtcagatctggccaagagacgcaaattaaatagcggaggtggcctgagtgaagagctgggatcagcgcgacggtctggagaggtgacattaaccaagggtgatcccggaagcttggaggagtgggagactgtagtgggagacgatttctccctgtactacgatagctactctgtcgatgaaagggtagactccgatagcaagtccgaggttgaggccctcaccgaacaattgagcgaagaggaggaggaagaggaagaggaagaggaagaggaagaggaggaagaggaggaagaggaggaggaggaggacgaggaaagcggcaatcagagtgataggtcaggcagttccgggcgtcgcaaagctaagaagaagtggcggaaagattccccatgggtgaagcctagccgaaagagaaggaagagagagcctcccagagcaaaggaacccaggggcgtgagcaacgatacgtccagtctcgagacagaacggggtttcgaagagttgccactgtgcagttgtaggatggaagcacccaagattgatcgaatcagcgaacgggcaggacacaagtgcatggctacagaatccgtagacggggagctgtcggggtgtaatgccgctattctgaaacgggagacaatgcggcctagttctagagtcgcactgatggtcctgtgcgagacacaccgagcgaggatggtgaaacatcactgttgcccaggctgtggttacttttgcacagccggtaccttcctggagtgtcatcccgacttcagagtcgcccatagatttcacaaggcgtgtgtcagccagttaaacggaatggtgttttgcccccactgtggagaagacgcctctgaggcccaagaggtgactattcctcgcggagatggagtgaccccaccagctggcacagcagcccctgcaccacctcccctatcccaagatgtacccggtagggccgacacatcccagccctccgctaggatgcgtgggcatggagagccaaggagacctccatgcgatccccttgccgacactatcgatagctcaggccctagtctcacactccctaacggcggatgtcttagcgccgtgggacttcccttgggacctgggagggaggccctcgagaaagccctcgtcattcaagagagcgaacggaggaaaaagcttcggtttcaccccaggcagctgtatctgtccgtgaaacaaggtgagttgcagaaagtgattctcatgctgctagataatcttgatcctaattttcagtccgatcagcaatccaagcgcacgccactgcatgccgcagcccagaaaggatcagtggaaatatgtcatgttctgctgcaagctggagccaatattaacgccgttgataagcagcaacgtacgcctctgatggaggctgttgtcaacaatcatttggaggttgcccgttacatggtgcagcgaggagggtgtgtttatagcaaggaggaagatggaagcacgtgcctacaccacgctgcgaagatcggtaacctggaaatggttagcctgctcctcagtactggacaggttgacgtgaacgcacaagatagtgggggatggactccaatcatctgggctgctgaacacaaacacattgaggtgatcaggatgctactcacgagaggggctgatgtgaccttaactgacaatgaagaaaacatctgcctgcattgggcttctttcacagggtccgccgctatcgccgaggtgctcctgaatgctagatgtgatctccatgcagtgaactatcacggcgatacccctctgcatatagccgctagggaaagttatcatgattgcgtgttgttgtttcttagtaggggggctaacccagagctcaggaataaggagggcgataccgcttgggatttaaccccggaacgaagtgatgtctggttcgccttacaactgaatcgcaagctccgtctcggagtaggaaatcgcgcaatccggaccgaaaagatcatctgccgggatgttgctcgcggatatgaaaacgtgcctattccatgcgtgaacggcgtcgacggagagccctgtcctgaggattacaagtatattagtgaaaactgcgaaactagcactatgaacattgataggaacattacacacctccagcactgcacctgtgtggacgattgcagctcaagtaactgtctctgcgggcagctgtctatccgatgttggtacgacaaggacggacggctgctgcaggagttcaacaagattgagcctccattgatcttcgaatgcaaccaggcatgttcatgttggcggaattgtaagaaccgagtggttcagagcggcataaaagtgcgcctacagctgtataggactgccaaaatgggttggggcgtgcgggctttacagaccatcccacagggaactttcatctgtgaatatgtgggggaattaattagtgatgccgaagctgatgtacgcgaggacgattcgtatttattcgacctagataacaaagatggggaggtgtactgcatcgacgctcgttattatgggaatataagcagatttattaatcacctgtgcgatccaaacatcattcccgttagggtgtttatgcttcaccaggacttaagatttccccgtatcgccttcttttctagtcgagacataaggacaggcgaagagttgggtttcgactacggggatcgattttgggatatcaaaagtaaatactttacatgtcagtgtggttccgagaaatgtaagcattccgctgaagccatcgccctggagcagagcagacttgccagactcgacccacatccagagctactcccggaattgggttccctgccacccgtaaacacttag

SEQ ID NO: 108178 - DNA, 3531 bp, Artificial Sequence
  derived and/or modified sequence
atggccgcagccgctggcgcagcagcagccgcagccgcagagggcgaagctccagctgagatgggtgctcttctgcttgagaaagagacacgcggagctacagaacgcgttcacggttcgcttggagatactcccagatccgaggagaccctaccaaaggctacacccgacagcctggaacccgcaggacctagtagccctgccagcgtgactgtgacagtgggcgacgagggcgcagacactccagtgggcgctacccctctcatcggtgatgagagtgagaacttagagggtgacggcgacctgcggggaggccgtatcctgttaggccacgccaccaaaagttttccctcttcacctagtaaaggagggtcatgtcccagccgggctaaaatgagcatgaccggagccggaaaaagcccgccttcagtgcaatctttggcgatgcggctcctgagtatgcctggcgctcagggagccgctgctgcaggaagcgagccccctccagcgacgacttcaccagagggccagcccaaagtgcaccgcgctcggaagaccatgtcaaagcctgggaacggacagccaccggttcccgaaaaaaggcctcctgaaattcaacactttaggatgtcggacgatgtgcatagcctgggaaaagtgacctcagatctggctaagcgcagaaagctgaatagtgggggaggcttgtcagaggagctgggcagtgcgagaagatcaggcgaagtgactttgaccaaaggagacccaggttctcttgaggagtgggaaactgtagtgggcgacgactttagcctgtactacgactcctatagcgttgatgaaagagtcgattctgatagcaagtccgaagtagaggctctaaccgaacagctgagcgaggaggaggaagaagaggaggaagaagaagaggaagaagaagaggaagaggaggaagaagaagaggaagaagacgaggagtccggcaaccagtcagatcggtccggatccagcggtcgcaggaaggctaaaaagaaatggagaaaggattcaccctgggtgaagccctcgcgcaagaggcgaaagagggaacctccccgagccaaggagcctcgcggtgtttccaacgacacaagttcactcgaaacggagcgaggtttcgaagaactccccctgtgttcttgccgaatggaggctccgaagatcgaccggatttcagagagggctgggcacaaatgcatggccaccgagtccgttgatggcgagttgtctgggtgcaatgcagccatcctgaaacgcgagaccatgcgacccagctctcgggtggccctaatggtgttatgcgagacgcacagagcacgtatggttaagcatcattgctgtcctggctgcgggtacttttgcaccgccggaaccttcctcgaatgccacccagatttccgtgtcgctcacaggtttcataaggcctgcgtaagccagctgaacggcatggtgttctgcccccactgtggcgaagatgcaagcgaggctcaggaagtgaccatcccgcgaggtgacggggttacccctcctgccggtaccgctgccccagcccctccccctctgtctcaagatgtgcctggcagggccgatacctcacaaccttcagctagaatgcgcggacatggtgagcccagaagacctccctgtgatcccttggcggacacaatcgactcttccggaccctcacttactctgcctaacggaggctgcctgtctgccgtcggcttgccacttggcccagggagagaagccctggagaaggcgctcgtgatccaggaatctgagcgcagaaaaaagctgcgcttccatcccagacagctatacttgtcagtgaaacagggcgagcttcaaaaagtgatactaatgctgctggataacctcgatccaaactttcagtccgatcagcaatctaaaagaacccctctgcacgcagctgcccagaaagggtccgttgagatatgccatgtcctactgcaggcaggagcaaacatcaatgctgtggataaacagcagcggaccccactgatggaagctgtggtgaacaatcaccttgaagtagcgagatatatggtccaaaggggtgggtgcgtgtattctaaagaagaagacggctcaacgtgcttacatcatgccgctaaaattggaaacctggaaatggtgtccctcttgctttctacaggacaggtggatgtgaacgctcaggattccggcggatggactcctatcatatgggcggctgaacataaacacatcgaggttattaggatgctgctgacccggggagctgacgtaactttgactgataatgaggagaatatctgtctgcactgggcttctttcaccggaagcgccgctatcgcagaggtgttactcaatgcacggtgtgatcttcatgccgtgaattaccacggagatacgccactccacatcgcagctcgggaatcctatcatgactgcgtgctcttgtttctctcacgaggggctaatcctgagttaaggaataaagaaggcgacaccgcttgggacctgacccctgaaaggtctgatgtttggtttgccctccagttgaacagaaagctgcgtctgggggtggggaacagggccatccgcactgagaaaattatttgtcgcgacgttgctcgtggatatgagaacgttccaatcccatgtgtcaacggcgtggacggagagccgtgcccagaagattataaatatataagtgaaaactgcgaaacttctactatgaacatcgacaggaacataacccatctgcagcattgcacatgcgttgatgactgttcgtccagtaattgtctttgtggacagcttagcatcaggtgttggtacgacaaggacggtaggttgctacaagaatttaacaagatagagccgcctctcatttttgaatgtaatcaggcttgctcctgttggcggaactgcaagaatcgggtggtccagagcgggatcaaggttcgtctgcagctctatcggaccgctaaaatggggtggggcgtacgtgccctgcagacaatcccacagggcacctttatatgtgagtacgtcggcgagctaattagtgacgccgaggcagatgtccgggaagatgattcataccttttcgacctcgacaataaggacggcgaagtctactgcatcgatgctaggtactacggaaacattagcagattcattaaccacctttgtgatccaaacatcatccctgtgagggtctttatgttacaccaagatctccggtttcctcgcattgcctttttttcttccagagacatccgaactggggaagaactcggttttgactatggcgaccgcttttgggatattaaatcaaaatatttcacctgccagtgtggcagcgagaagtgtaagcacagtgcagaagccattgccctggagcaatctcgcctggctaggttggaccctcacccagaactcctgcccgagctgggatctctcccccctgtgaacacctag

SEQ ID NO: 108179 - DNA, 3531 bp, Artificial Sequence
  derived and/or modified sequence
atggcggctgccgcaggcgctgccgcagctgccgctgctgagggagaagcgcctgcggagatgggcgctctgctgctggagaaggagactcgcggagccacggagcgtgtacacggaagccttggggataccccacgcagcgaagaaactctgcccaaggcaacccccgacagtttggaacctgcaggaccttcttctccagctagcgtgactgttaccgtgggggacgagggagccgatacccccgtgggagctacacctctgatcggcgacgagagcgaaaatctggagggagacggcgatctgcggggaggccgaatattactcggccacgcgactaaaagtttcccctcaagtccgtccaaaggtgggagttgtccaagtcgcgctaagatgtctatgaccggggctggcaaatcacctccgtctgtccagtccctggcaatgcgcctgctgtcaatgcctggtgcccagggcgcagctgccgctgggtctgagcctcctccggcaactacaagcccagaggggcagccaaaggttcaccgcgcacgtaagacaatgagcaagcccggtaacggccagccaccggtccccgagaagcgacccccagaaatccagcactttcgcatgtccgacgacgttcacagcctcggaaaggtgacatccgacctggccaagcggcgtaaacttaactccggaggcggactaagcgaggagctggggagcgccagaagaagcggggaggttactctgactaagggagatccaggctcattggaagagtgggaaaccgtggtgggcgacgatttttcgctgtactacgattcctattctgttgatgagcgggttgattcagatagtaagtccgaagtagaggcactcacagaacagctctctgaggaggaggaggaggaggaagaggaggaagaggaggaagaagaggaagaagaagaggaggaagaggaagaagatgaggaatcggggaaccagtcagatcggtctggttctagcggccgtcggaaagccaagaagaagtggcgcaaagacagcccttgggtaaagccatctcggaagcggaggaaacgcgaacctccccgtgctaaagaaccgcgtggagtgtcgaacgacacgtcttcattggaaaccgagagagggtttgaagagttgcccctttgttcgtgtaggatggaggccccaaagatcgacaggataagtgagcgggctggacacaaatgtatggccactgagtctgtggatggtgagttgtctggatgcaacgctgcaattctgaaacgggaaaccatgcggccttcgagccgcgttgcgttaatggtcctgtgtgagactcatagagctcgcatggtcaagcaccactgttgtccaggctgcgggtacttttgtactgctgggacctttctcgagtgccaccctgattttagggtggcgcacaggttccacaaagcctgtgtctcccagcttaatggcatggttttctgtcctcactgcggggaggacgccagcgaggcacaggaggtaactattccaaggggagacggggtgacgccgccagctggcaccgccgctccagccccaccccctctctcacaggatgttccaggacgggcagatacatctcaaccctctgcgcgaatgcggggacacggcgagcctagaaggcctccttgcgatccactcgccgatacgattgacagctctggcccaagcttgaccctgccaaacggaggatgtctgtcagcggtcggcctgcccctcggtcctggcagagaggccctggaaaaggccctcgtgatccaggagtccgagcggagaaagaagcttagattccaccctagacaactgtatctgagcgtgaagcaaggcgagctgcagaaagtgatactgatgctgttggacaacctcgatccgaacttccagtccgaccagcagagtaaacgcacaccactccacgccgctgcacaaaaggggtccgtagaaatctgtcacgttttactacaagctggggcaaacatcaacgccgtggacaagcaacagaggacaccactgatggaagcagtggtaaacaatcaccttgaagttgccaggtacatggtgcagcgtgggggatgtgtttactcaaaggaggaagatggctcgacatgcctccatcatgcagccaaaatcggcaacctggagatggtcagtctactgctttctacggggcaggtcgatgtgaatgcccaggattccggtggctggacacctataatctgggccgctgagcataagcacatagaagtgattcggatgctgctgaccaggggggctgatgtgactctcaccgacaacgaagagaacatctgcctgcattgggcctcattcacgggctcagcagcaattgccgaggttctcctgaatgcacgctgtgacttgcatgcagtgaactaccacggggacacccccctgcacattgcagcccgagagtcatatcatgactgcgtgctgctgtttctgtcacgaggcgctaacccagaattgagaaacaaggaaggcgacaccgcctgggacctgactcccgaacgaagtgatgtgtggttcgcactccagctcaatagaaaactcaggctgggcgttggaaaccgagcgataagaaccgagaaaatcatatgtagggatgttgcgcgaggttacgaaaacgtgcctataccctgcgtgaacggcgtcgatggcgaaccgtgcccggaagattacaaatacatatccgaaaattgcgagacttctaccatgaatattgatcggaacataacccatcttcagcattgtacctgtgttgatgattgctcatccagcaattgcttgtgcgggcaactctcgatccgatgctggtatgacaaagatgggcgattgctgcaagaattcaataagatcgaacccccactcattttcgagtgtaaccaagcatgcagctgttggcgcaactgtaagaacagggttgtgcagtccgggattaaggtgcgactgcagctgtaccgcaccgccaagatgggctggggggtcagagcactacagactataccccagggaacattcatatgtgaatacgtgggggagttgatctctgacgcagaggcagacgtgagagaggacgattcatatcttttcgatttagataataaggacggggaagtgtactgtatcgacgctcgatactatggaaacatcagtcgctttattaaccatctgtgcgatcctaacattattccggtgcgtgtcttcatgctgcatcaagacctgcgttttccgaggatcgcgtttttctccagtcgagatatcagaacgggtgaagagctcggctttgactatggggaccggttctgggacatcaagtccaaatactttacatgtcaatgcgggtccgagaagtgtaaacacagcgcggaggctatcgctttagaacagagtcggttagccaggctcgacccccacccagaactgctgcccgagctggggtccctcccaccagtcaacacctag

SEQ ID NO: 108180 - DNA, 3702 bp, Artificial Sequence
  derived and/or modified sequence
atgagagggcttcccaggggacgtggcctgatgagggctcgcggaagggggagggccgctccgcctggaagccggggaagaggacgcggaggtccgcatcgcggaaggggcagaccacgatccctcctatctttgcctcgcgctcaggcttcttggacgccccagctgtctaccggcctgacgagtccgccagtgccgtgcctgccctctcagggagaagcccctgctgagatgggagccctgctcctggaaaaggagacgaggggagcaacggaacgggtccatggctctctcggcgatacaccaaggagcgaagaaacattaccaaaagctacacctgactctctcgaaccagctgggcctagctcgccagccagcgtcaccgtaacagttggagacgaaggggcagatacgcctgtgggagcgacacctctaattggggacgaatctgagaacctcgagggtgatggggatctcagagggggaagaatattactaggacatgccaccaagagtttccccagctctcccagcaaggggggatcctgccctagccgcgcaaaaatgagtatgactggtgcaggaaaatcaccaccatccgtccagtctttagcaatgcgacttcttagcatgcctggtgcccaaggcgctgctgccgctgggtccgagcctcctccggcaacgacctcccctgaaggacagcctaaggtgcacagagctcgcaagaccatgtccaaaccaggtaatggtcaacctcctgttccagaaaagaggccaccagaaatacaacacttcagaatgagtgatgacgtccactcattagggaaagtcacttcagatctcgcaaaacggaggaagctgaactccggcggaggactcagcgaagagctgggaagcgcccgtagatccggggaggtgacactcaccaagggggatcccggaagcttagaggaatgggaaactgttgttggtgatgatttcagtctttattatgactcttatagcgtcgatgagagggtggactccgacagcaagtcagaagtcgaggctctaacagagcagctctccgaggaggaggaggaggaggaggaagaggaggaagaagaagaagaggaggaggaggaggaagaggaagaggaagacgaggagagcggcaaccagtctgacagatctggctcctccggccgaaggaaggctaagaaaaagtggcgaaaagactccccctgggttaagcccagccgaaagcgtaggaagagggagcccccacgcgcaaaagagccacggggtgtttccaacgatacttcttcactggagacggaacgtgggttcgaagagctccctttgtgctcctgtcgcatggaggccccaaagattgaccgtatctccgaacgggcaggccataaatgtatggccactgaaagtgtcgatggagagctctcagggtgtaacgccgcaatccttaaaagggagactatgcggcctagttctagagtcgctctcatggttctatgtgagacgcaccgtgccaggatggtcaagcaccattgctgccctgggtgcggatacttctgtacagcgggaaccttccttgagtgccaccccgacttccgtgtcgcacataggtttcacaaggcatgcgtcagccagctcaacggaatggtgttctgtccacattgcggcgaggatgcctccgaggcacaggaagtgactatcccgaggggcgacggagtgactccccctgctgggactgccgctcccgctccacctcccctgtctcaggacgttccaggcagggctgacacatctcagccatctgctcgcatgcgcggtcacggagagcccaggcggccaccgtgcgatccattggcggataccatcgactcctctggacccagtctgactctgccaaatggcggttgtctttccgcagttggacttcctctgggcccaggtagggaagcgctggagaaggccctcgtgattcaggaatctgaacggaggaaaaagctcaggttccacccacgtcaactgtacttgagtgttaaacagggcgaactacagaaggtgatcttgatgctgctggacaatctggaccccaatttccagtccgaccaacagtcaaagagaacgccgcttcacgctgccgctcagaagggctccgtcgagatttgtcacgtattactgcaggccggagccaatattaatgccgtggacaagcaacaacggacccccctcatggaggcagtggttaacaaccacctggaggtcgccagatatatggtgcagaggggcggatgtgtgtactccaaggaagaggacggatctacgtgtttgcaccatgcagctaagattgggaatctggaaatggtcagcctgttgctgagtaccggacaggttgatgtgaatgcccaggattcgggagggtggacgccgattatctgggcggcagagcataagcacattgaggtcatacggatgctgctgacccgaggtgccgacgtaacgctgactgacaatgaggaaaatatttgcctgcactgggcctcattcactgggagtgcagcgatcgcagaggttctgctcaacgcaagatgcgatcttcatgccgtgaactatcacggggacactccccttcacattgctgcaagagagtcctatcatgactgcgtcctgctcttcctctcgcgaggcgctaatcctgagttgaggaacaaggagggggatacagcttgggatcttacacccgaacgatcagacgtgtggtttgcactgcaattgaatagaaaacttcgcctgggggtagggaaccgggctatcaggactgagaaaattatttgtagagacgtcgcacgtggctacgagaatgtgcctattccatgtgtgaatggtgtggacggggaaccttgcccggaggattacaaatacatctccgagaattgcgagaccagcactatgaatattgataggaatatcacacatttgcagcattgtacttgcgtggatgactgcagctcatccaactgtctgtgcggacagctgtcaatccgatgctggtacgacaaggacgggaggttgctgcaagagttcaataaaatcgaaccaccactgatctttgaatgcaatcaggcttgctcgtgttggaggaactgcaagaaccgcgttgttcagagcggcattaaggtccgtttgcagctttaccgtactgcgaagatggggtggggggttcgcgcactgcagactatcccacagggaacattcatctgtgagtatgtaggtgagcttatctccgacgcagaggcggacgttagggaagatgactcatacctgtttgacctggacaacaaggacggcgaggtttactgtatcgatgcaaggtactacgggaatatcagcagattcatcaaccatctgtgtgaccctaatatcatcccggtgcgggttttcatgctgcatcaagatcttcgcttccccaggatcgccttcttctcttctcgagacatacgtacaggagaggagttgggattcgattatggggatcgtttctgggacatcaaatctaaatactttacttgccagtgcggctccgaaaagtgcaagcatagcgctgaagccatcgctctagagcagagccgcctcgctcgcctcgatcctcacccagaattgcttccagagttaggatcactgccccctgtcaacacctag

SEQ ID NO: 108181 - DNA, 3531 bp, Artificial Sequence
  derived and/or modified sequence
atggccgctgccgctggggctgcggcagccgctgcagcggaaggcgaagcacccgctgagatgggagctctgctgctcgaaaaagagaccagaggagccacggagagagtccacggatccctgggtgacactccacggagcgaggagactctccccaaggcgacccccgattccctggagcccgcaggtccatcaagtcctgcctctgtgacagttacagttggtgatgagggagcagacacacccgtcggagctaccccactgattggggatgagtctgaaaacctggaaggcgatggggatcttaggggaggccgaatcctgctcggtcacgctacgaaatcttttccaagcagtccgagtaaggggggttcctgcccgtcaagagccaagatgtctatgaccggggcaggcaagtctcctccttccgtgcagagtctcgccatgagattgctatccatgccaggagcccaaggcgcagcggctgctggcagcgagcctccccctgcaactacatcaccagagggtcagcctaaagtccacagggcccgaaagacaatgagcaagcccggaaatggccaacctcccgtacctgagaaaagacccccagagatacagcactttagaatgagcgatgacgtgcactccctaggtaaagtgacctccgacctagccaagcggaggaagcttaactccggaggagggctcagtgaggagttgggttctgcccgacggtcaggtgaggtgacactaaccaagggagatcctggctctcttgaggaatgggagacagtcgtgggagacgatttcagcctttattatgactcctactctgtggatgagagggtggattctgactccaagtcagaggtcgaggctctgactgaacagctgagcgaggaggaggaggaagaggaggaggaagaggaggaggaggaagaggaggaagaggaggaagaggaagaagaagacgaggagagcggcaatcagtctgatcggagtggatcaagtgggaggagaaaggcgaaaaagaagtggcggaaggacagcccgtgggtgaaaccttcaagaaagagaaggaagcgggaacctccaagagcaaaggaacctcggggtgtgtctaatgatacaagctctcttgagacagaaagaggctttgaagaactgccgttgtgtagctgcagaatggaagcgcctaaaatagacagaataagtgagcgggcaggccacaagtgcatggccaccgaatccgtcgacggagaactatccggctgtaacgctgccattctgaaaagagagactatgaggcccagcagtagggtggcgctgatggtcctgtgcgaaacccacagagcgagaatggttaaacaccattgctgtcccggttgcgggtacttctgcacagcgggaacctttctcgaatgtcatccagactttcgggtggctcatcgtttccataaagcttgtgttagccagctgaatggaatggtgttttgtcctcactgcggcgaagacgcttccgaggcccaggaggtaacgatacctaggggggatggggttacacctcccgcagggacagcggcaccagcccctccacctttaagccaggatgtgcccggtcgtgcagacacttcccaaccttccgccagaatgcgtggccacggtgagccacgtagaccaccttgcgaccccctcgctgacaccatcgattcttcaggtccaagtcttactctgccaaatgggggttgtctttcagccgtaggcctgccgttgggtccgggaagggaagcccttgagaaggctctggtgatacaggaaagcgaacgcagaaagaagctgcggttccacccaaggcaactctacttatcagtcaaacagggggagctgcaaaaggtgatcctgatgcttctcgacaacttagaccctaatttccagtccgatcaacagagcaaaagaactcccctacacgcggcagcccagaaggggagcgtcgagatctgccacgtgctcctccaggctggcgcaaatatcaatgcggtcgataagcagcagcgaactcccctgatggaagcggttgtgaacaatcatctcgaggtggctcggtatatggtgcaacggggtggctgcgtgtattccaaggaagaagacggcagcacttgtctgcaccacgccgctaaaatcgggaacctcgaaatggtcagtcttttattatctacaggacaggtagatgtcaacgcccaggactccggcggatggacaccaattatttgggccgctgaacacaagcatattgaggtgatcaggatgctattgacccggggtgcggatgttaccctgaccgacaacgaagagaacatatgtttacattgggcatcctttaccggaagtgccgctatcgctgaggtgctcttaaatgccagatgtgacctgcacgccgtgaactatcacggcgacacccctttacatatcgccgctcgggagagctaccacgattgtgttcttttgttcttgagcaggggcgctaaccctgagctaaggaacaaggagggagacactgcctgggacctgacacccgagcgatctgacgtgtggtttgcactacaactcaatcgaaagttacggcttggagtggggaatcgggctatccggacagagaaaatcatctgtcgggacgtcgcgagaggctacgagaatgtgcctataccgtgtgtgaatggagtagacggcgagccctgtcccgaagattacaagtacattagcgaaaattgtgagacgtccaccatgaatattgatcgcaatatcacacaccttcagcattgtacatgcgtagatgattgcagcagctctaattgcctctgcggccagctaagcattcgctgttggtatgacaaggacggcagactgctgcaggaatttaacaagattgaacccccactgatttttgagtgcaatcaggcttgctcttgttggcgcaattgtaaaaatagggtcgtccagagcggaatcaaagtgcgtctacagctttataggacagctaagatgggctggggggttagagccctccagacaatccctcagggaacatttatttgcgaatatgtcggcgaacttatcagcgacgcagaggccgatgtccgggaggatgactcttatttgtttgatctggataacaaagatggggaggtgtattgcattgatgcacgttattatggtaacatcagcagatttattaaccatctctgcgatcccaacatcattccagtccgtgtgttcatgctgcatcaggacctgcgttttcccaggattgctttctttagtagccgagatattcggaccggcgaggaactgggtttcgattatggcgatcggttctgggacatcaaatccaagtatttcacttgtcagtgtggttccgagaaatgtaaacatagtgcagaagcgatcgcacttgaacagtctcgtttagcgagactcgatccccaccctgagttgctgccagagctgggttcgcttccgcctgtgaacacatag

SEQ ID NO: 108182 - DNA, 3702 bp, Artificial Sequence
  derived and/or modified sequence
atgaggggactgccacgcggtcggggtctgatgcgcgctcgcggtagaggacgcgcagccccacctgggtcccgcggtaggggtcggggagggcctcataggggcagagggcgaccccgaagcctcctgtctctccctcgggctcaggccagctggactccccagctctccactgggctgaccagcccgcctgtgccgtgtctgccatctcagggggaggcacctgctgaaatgggcgctcttcttctggaaaaggaaactcgcggagccaccgagagggtgcacggcagtctgggtgatacacccagatccgaggagacactgccaaaggctaaccccgattcactcgaaccggctggtcctagtagccctgcttcagtcaccgtcaccgttggcgacgagggcgctgatacccctgtgggcgcaactcctctcatcggggacgagtcagagaacctggagggcgacggcgacttgagagggggacgcatcctactcggccacgcgactaagagctttccaagctcaccttccaaaggaggctcttgtcccagcagggccaagatgagcatgacgggcgcaggaaagagcccgcctagcgttcagagcctggcaatgcgtctgttgagtatgcctggtgcccaaggcgcagccgctgcaggaagtgagccaccccctgctaccacatcccccgagggacaacctaaagttcacagggcgagaaaaactatgagcaagcccggtaacggtcaaccgcctgtccccgaaaaacgaccacctgagatccagcattttagaatgtccgacgatgttcatagcctgggcaaggtgactagtgatctggctaagagacggaaactgaacagtggtggagggctctccgaagagctgggctctgctaggagatcaggcgaggtgaccctgaccaaaggtgatcctggctcgcttgaggaatgggagacggtggtcggggacgattttagcctatactatgactcctactctgtggacgagcgagttgattccgatagtaaatccgaggtggaggccctcaccgagcagcttagcgaagaagaagaggaggaggaggaagaagaagaggaggaggaggaggaagaggaggaggaggaagaggaagaggatgaggagtccggaaatcagtcagatcggagtgggtcctctggtagacgcaaggctaagaagaaatggcggaaggattctccctgggtgaaaccttctaggaagagacgaaagcgggagccaccaagagccaaagagccgaggggagtctctaatgacacaagcagtctggagactgagaggggttttgaagaactgccattatgcagctgccggatggaggcccctaaaatagacaggatctctgagcgggctggacacaagtgcatggccactgaatcggtcgacggtgaactgtcaggttgtaatgcggctatactcaagcgcgaaacgatgcggccttctagccgcgtggctcttatggtgctatgcgaaacacatcgggcaagaatggtaaagcatcactgctgtccaggctgcggttatttttgcaccgctgggaccttcctggagtgccacccagattttagggttgcgcataggttccataaggcatgcgtgagccagctcaacggaatggtattctgtccccactgtggcgaggacgcttcagaggcccaggaagtgacgatccctaggggtgatggtgtgaccccccctgccggtaccgctgcccctgcccctcctccccttagccaggacgtccccggtagagctgatacttctcaacccagcgccaggatgcgaggtcacggagagccacgacgccctccttgtgatccactcgccgatactatcgattcttctgggcctagcctaacattgcccaatggcggatgtttgtctgccgtgggtctgcctcttggtcctggccgagaggcactggaaaaagccctggtgattcaagagagtgagcgaagaaagaaactccggtttcacccaaggcagctgtacctctccgtaaaacaaggcgagttacagaaagtcattttgatgcttttggacaacctcgatcccaattttcagtccgaccaacagagtaagcgaacccccctacatgccgctgcccagaagggctccgtcgaaatctgccatgtcctgctccaagccggagctaatattaatgccgtggacaagcagcagaggacccctctcatggaagccgtggtaaacaatcacctggaagtggcgaggtatatggttcagagaggaggatgcgtgtacagtaaggaggaagacgggtccacctgccttcatcacgctgctaagatcgggaatctcgagatggtatccctgttactctcaactgggcaggtggacgttaacgctcaggatagcggagggtggaccccgattatctgggctgcggaacacaagcacattgaagtaatacggatgctgctgactcggggtgcagatgtgactctgaccgacaacgaggaaaacatttgcctgcactgggcttcattcactggctcagcagcaatcgctgaggtcctgctcaacgcgaggtgcgatcttcatgcagtgaattatcacggcgataccccactgcacatcgccgcaagggagtcataccacgactgcgtgttgctgttcctgtcacgtggggcaaatcccgagcttcgcaacaaagagggagacaccgcctgggatctgacacctgagcgcagtgatgtttggtttgccctacagcttaataggaaactgaggctcggggtcgggaatagagccatccggaccgaaaaaatcatttgcagggacgtggcacgcggttacgagaatgtgcccattccttgtgtcaatggggtcgatggggaaccctgtcccgaggactacaagtacatatcagaaaattgtgagactagcacaatgaacatagatcggaacattacacacctgcagcactgcacatgcgtggatgattgcagttcatccaactgtctgtgtggacaactttcaatcaggtgttggtacgacaaggatggcagactgttgcaagaattcaataagatcgaacccccactcatctttgagtgcaaccaagcttgctcctgctggcggaactgcaaaaaccgggtggtccagtctggcatcaaggtgcggctgcaactttacaggaccgcaaagatgggctggggagtacgagcacttcagaccatcccacaaggaacgtttatatgcgagtatgtaggggagctgatttcagatgcagaggccgatgtaagggaggacgactcatatctgtttgacctggacaacaaggacggtgaagtttattgtatcgacgccagatactatggaaatatcagcaggttcattaaccacctgtgcgatccaaatattattcctgtaagagtcttcatgcttcaccaagacctaaggtttccacgtattgccttcttcagctcaagagacatacggaccggggaagagctgggtttcgattatggtgacaggttctgggatattaagagtaagtattttacttgccagtgtggatcagagaaatgtaaacacagcgccgaagccattgcgttggagcagagtagactggcaaggctcgatccacaccccgaactactgccagaactcggcagtcttccacctgtgaatacctag

SEQ ID NO: 108183 - DNA, 3702 bp, Artificial Sequence
  derived and/or modified sequence
atgcgagggctgcccagaggacgagggcttatgcgcgcacggggaaggggcagggcagcaccaccaggctcgcgaggtcgcggacggggtggaccccaccggggtcgcggacgcccaaggtctctcctctccctccctagagcgcaggccagttggacgccccagctgtcaactgggctgacatcacctcccgtgccatgcttgcccagtcaaggggaagccccagctgagatgggtgccctgctactcgaaaaggagacacggggtgccaccgagcgggtgcacggaagcctcggtgatacaccacgatcagaggaaaccctaccaaaggccacccctgatagcctggaacctgccggtccatcctcacccgctagtgtgaccgtgactgtgggcgacgaaggcgcagacacccccgtcggggcaactccgctcatcggagatgagtcagagaatctcgaaggtgacggggatctgagaggcggtcggattctgctgggtcacgctacaaaatctttcccgtcctcccctagtaaggggggatcctgcccctctagagctaaaatgtcaatgacaggagctggcaaaagcccaccatccgtgcagtcgctggcaatgcgtcttttatcaatgccaggagcacaaggggcagcggctgctgggtcagagccgccaccagctaccacgtccccagaaggacaaccgaaagtacacagagctagaaagaccatgagcaagccagggaatgggcagccccctgttccggagaaacgaccacccgaaattcaacactttcgcatgagcgatgacgtgcactccctggggaaagtgacttccgaccttgcaaaacggcgaaagctaaactccgggggtggcctgagtgaggaattgggctccgcccgtcggtccggcgaagtcacactcaccaaaggggatcctggaagcctcgaagagtgggagaccgtggtgggggacgatttctcgctatattacgacagctactcagtggatgaacgagtcgacagtgactctaaatcagaggtcgaggccctgactgagcagctctcagaggaggaggaggaagaagaagaggaggaagaagaagaggaggaggaagaggaggaggaagaggaggaagaggacgaagagtcagggaatcaatctgaccgctctggaagctcaggacgtagaaaggctaagaagaaatggcgaaaagactcaccttgggtgaagccctctagaaaacgccgtaagagagagccccctagggcgaaggagccacggggtgtgtctaatgacacatcttctctggagacggaacgcggttttgaagagctgcctttatgctcttgccggatggaagctcccaagatcgatcgcatttctgaaagagctgggcacaaatgcatggccacagaatcagtggatggcgagctaagcggctgcaatgctgctatactaaagcgcgaaaccatgcgaccatcctctagggtagcccttatggtcctctgcgaaacacaccgagcccgaatggtaaagcatcattgctgtcccggttgtggctacttctgtactgctggcacgtttttagagtgccatccggatttccgtgtggctcaccgctttcacaaggcatgtgttagccaacttaacggcatggtcttttgcccccactgtggggaggacgctagtgaggcccaggaggtgacgattcccagaggcgacggggtgacacccccagccggtactgcagctcctgcgcctccgcctttgtcccaggacgtccctggtcgggcagacacaagtcagccctcagcccgtatgcgcggacatggtgagccgagacgcccaccttgtgaccccttggccgacacaatcgattcttccggcccatctctcacgcttcccaatgggggttgtttgagcgccgtcgggctgcctctaggacccggtagggaggctctggagaaagccctggtgatacaggaatcggagagacgaaaaaagctaagattccatcctagacagctttatctctctgtgaagcagggcgaactgcaaaaggtgattctcatgctgctcgataacttagacccaaacttccaatcagaccagcagtcaaagcggacacctctccacgctgccgcacagaagggcagcgtggaaatttgccacgttttgctgcaagcaggtgccaacatcaatgctgtagacaaacagcaaaggacccctttgatggaagccgtcgtgaataatcatctggaggttgccagatatatggtgcaaagaggagggtgcgtgtactctaaagaagaggacgggtccacctgcctccaccacgcagctaagatcggaaatttagagatggtcagtctcctacttagtacgggacaggtcgatgtgaatgctcaagattccggaggatggacgcccatcatctgggctgcagagcacaagcacatcgaggtgattcggatgctgctgacacgaggggctgatgttaccctgactgacaatgaggagaatatatgtcttcactgggccagttttaccgggtcggccgcaattgccgaggtgctgctcaatgctcgatgtgacctccatgcggtgaattatcatggcgatactccactacacatcgcagccagggagtcctatcacgattgtgtcctgctgttcctatctcgcggagcaaatcctgagctgagaaataaggaaggagacacagcatgggatctaactccagaaagaagtgatgtttggttcgccctccagcttaataggaagctgcgactgggcgtagggaatagggcgatacggactgaaaaaatcatttgtcgcgatgtagctcgcggatacgaaaacgtgccgattccctgtgtgaatggcgtagacggggaaccctgtccagaggattataagtatatctctgagaattgtgagacttcgaccatgaatatcgacagaaacataacacatttacagcactgcacctgcgtggatgactgctcttctagcaactgtctgtgcggccagctgtccattcgctgttggtacgacaaagatggacgcctcttgcaggagttcaacaaaattgagccccctctaatctttgagtgtaaccaagcgtgtagctgctggcggaactgcaagaaccgtgtggtgcagagcggcatcaaggtacgcttacagctgtaccggactgctaaaatgggatggggcgtgcgcgcactgcagacaataccccagggaacattcatctgtgaatacgttggagaactgatcagcgatgctgaagctgacgttagggaggacgattcatacctgttcgatctcgacaacaaggacggcgaggtatattgcatcgatgctaggtactacggcaatatcagtcgcttcattaaccacctgtgcgatccgaatatcatccccgtgcgggttttcatgctgcaccaggacctcagatttccacgcatagctttcttcagctcacgggatattcgcaccggcgaggagctaggatttgattatggggatagattttgggatatcaagtccaagtactttacctgtcagtgtggttcagaaaaatgcaagcacagcgcagaggcaatagcacttgagcagagcagactagccaggctggatccccaccccgagttgttaccagagttaggctccttgccacctgtgaacacatag

SEQ ID NO: 108184 - DNA, 2667 bp, Artificial Sequence
  derived and/or modified sequence
tcagaagtggaggcactgaccgagcagctctccgaagaggaagaggaagaggaagaggaagaagaggaagaagaggaggaagaggaggaagaagaggaggaggaggacgaggagtctggcaatcaatctgacaggtcaggctcaagcggtcggagaaaagccaagaagaaatggcgaaaggattcaccgtgggtcaaaccatccagaaagcgtcgaaaacgcgaaccaccacgagccaaagaacctagaggcgtgagcaacgacacgagcagtcttgaaacagaacggggattcgaggaactccctttgtgcagctgcagaatggaagctcccaaaatagatcggatctctgagagagccggacacaaatgcatggcgacggaaagtgtggacggggagctcagcgggtgcaacgcggcaattctaaagagggaaacgatgcggccatcttctcgagtggccctcatggtactctgcgaaacacaccgggctcggatggtcaaacatcattgttgccctggttgcggatatttctgcacagcaggcacgttcctggaatgtcatccagacttccgggttgcacaccgattccacaaggcctgtgtgagtcagctgaatggcatggtgttctgccctcattgcggtgaggatgcttccgaggcccaggaggtcaccatccccaggggtgatggcgtcaccccgccagcaggcacagccgctccggcacctccaccactgagtcaagacgtccctggcagggctgacaccagccaacccagcgctcgcatgcgtggtcatggcgagccccgtcggcctccatgtgaccctctcgctgataccatcgattcatcaggtccaagcctcaccctaccgaacggcggttgccttagtgccgtgggactgcctctgggacctgggagagaagctttagagaaggccttggttattcaggaatccgagcgacgcaagaaactgcgctttcatccgaggcagctgtacctcagcgtgaagcagggcgaactgcagaaagtaatattaatgctcctcgataacctggaccccaatttccaatccgatcagcaatccaagagaacacctcttcatgccgctgcccagaaggggtccgtggagatctgtcatgtactgctacaggccggtgccaacatcaacgccgtggataagcagcagcggacaccgcttatggaagccgtggtcaacaaccatcttgaggtggctagatatatggttcaacggggtgggtgcgtgtattcgaaggaagaggacggaagtacttgtttacatcacgccgctaaaatagggaacctggaaatggttagtctattgcttagcacaggacaggttgacgtgaacgcacaagattccggtggctggacgcctatcatctgggcagccgaacacaagcatattgaggtgatccgcatgctgctgacgagaggcgctgacgtgaccctcaccgacaacgaagaaaacatctgtctccactgggcctcattcaccggttcggccgcaattgccgaagtgctcctcaacgccagatgcgacctgcatgcagtgaattatcatggcgacacgccgcttcacattgctgctcgagaatcatatcatgactgtgttctgttgttcctgagccgtggagccaacccagagttgcgcaataaggagggcgatactgcctgggacttgacgcctgaacgtagtgacgtgtggtttgcgctccagctgaacagaaagctgcggttgggcgtaggaaatagagcaattaggacagagaaaatcatctgcagagatgtagcgaggggttacgaaaacgttcccattccttgcgttaatggcgttgatggggaaccatgccctgaagattataaatatatatccgagaattgcgagacatctaccatgaatatagacagaaacatcacccacctccaacattgcacctgtgtcgatgattgttcgtctagcaattgcctctgcggccaactcagcattcgctgctggtatgataaagacgggcgtctgcttcaggagttcaacaagatagaacctccactgattttcgagtgcaatcaggcctgctcctgctggcgcaactgtaagaatagggtagtgcaatccggaataaaggtgagattacaattgtatagaacagcgaagatggggtggggagtcagagctttgcagaccattccacaaggcaccttcatctgtgagtacgtcggggagttaattagcgacgctgaggccgacgttagggaagacgattcgtatctgtttgacctggataacaaggacggtgaagtgtactgcatcgacgcacggtactatgggaacatcagcagatttattaatcacttatgcgacccgaatatcatacccgtgcgggtatttatgctccatcaggacctgagattcccgcgtatcgccttcttttctagccgtgatatccgcaccggcgaagagctggggtttgactacggcgacagattctgggacatcaagtccaaatatttcacatgtcagtgtgggagcgaaaaatgtaagcacagtgcggaagccattgcccttgaacagtcccggctcgcacgcctcgacccgcaccctgagctgctcccagagctggggtcccttccaccagttaatacctag

SEQ ID NO: 108185 - DNA, 3531 bp, Artificial Sequence
  derived and/or modified sequence
atggcagctgcagctggggcagcggcagctgccgcagcggagggggaggcaccggcagagatgggggctctcctgctagagaaagaaacacgcggtgccactgagcgggtccatggatctctgggcgacaccccacgcagcgaagaaaccctgcctaaggccaatccagactcgctggagcccgctggaccttcttcacctgctagcgtcacggtgaccgtgggggacgagggcgctgatacccctgttggtgccacacctttgataggggatgagtctgagaatctggagggagacggggatctcagaggtgggagaattcttttgggccatgcaaccaagagttttccgtcatcacccagcaaagggggatcctgcccctcccgcgctaagatgtcaatgactggcgctggcaagagtccgcctagcgtccagtctttggctatgcggttactttcaatgccaggggctcagggggctgcagctgcaggttccgaaccaccacctgccaccacgtctccggaggggcagccgaaagtgcaccgggcaagaaagaccatgtccaagcccggaaacgggcagccccctgtccctgaaaagcgccctcctgagattcagcattttcgtatgtcagatgatgttcactcattggggaaggttaccagtgacctcgccaagcggcgtaagcttaatagcggagggggactgagtgaagaacttggcagtgcacgaagatctggggaagtgacactcactaaaggggacccaggatccctagaagagtgggaaacagtggttggggatgactttagtctgtattatgactcctatagtgtggatgaaagggtcgacagcgatagtaagtccgaggtggaggctttaactgagcagctctcagaggaggaagaggaagaggaagaggaggaagaagaagaagaagaggaagaagaggaagaagaagaggaggaagatgaggagtctggaaatcagtctgacaggagcgggtcaagtgggagaagaaaagccaagaagaaatggcgcaaggatagtccttgggtaaaaccttcaaggaagcgaaggaagagagagccgcctcgagctaaagagcctagaggggtctctaatgacacctcttctctcgaaaccgagaggggctttgaggagctgccattatgctcctgtcgcatggaggcccctaaaatcgaccgaatctccgaacgtgccggacacaaatgtatggcaacggaaagcgtcgatggggagctgtcaggctgtaatgccgctattctgaagagagaaactatgcgtccctcatcacgggtcgcgctcatggttctctgtgaaacccacagggccagaatggtgaaacaccattgctgtccgggatgcggctacttctgcactgccggtacattcctggagtgtcacccggatttcagagtggcacatcggtttcacaaggcctgcgtgtctcaactaaatgggatggtgttctgccctcattgcggtgaagacgcttcggaagctcaggaagtcaccatcccccgtggcgatggggtgacgccaccggctggaacagctgcaccagctccgccaccactgtcccaggatgtccccggacgcgcagacacatctcagcccagtgccaggatgcgcggacatggagagcccaggcgtcccccttgcgatccactggccgatactatcgatagctcaggcccttccctcacactgccgaatgggggttgtttgtctgctgtgggcttacctctgggacccggaagagaggctctagaaaaggccttagtgatccaagagtcagagcggcgaaaaaaacttaggttccaccccagacagttatacttatcagtgaaacagggggagttacagaaagtgattcttatgctcctcgataaccttgatccaaactttcagtctgaccagcagagcaagaggacgccgctacatgcggctgcccagaaaggcagcgtcgagatttgtcatgtgctgctgcaggcaggcgctaatattaatgctgtggataagcagcagcggacccctctgatggaggccgtggttaacaaccacctggaggtggcccgatatatggttcagaggggagggtgcgtttacagcaaggaagaggatggatccacatgccttcatcatgcagctaaaatcggaaatctagagatggtcagtctcctgttgagcactggccaagtcgacgtcaacgcacaagactcgggaggttggaccccaattatttgggccgctgaacacaagcacatcgaggtgattagaatgctcctgactcgcggagcagatgttacactgactgataatgaagagaacatttgcttgcactgggcctccttcaccggcagcgctgctattgcagaagttctactgaacgcacggtgtgacctgcatgccgtcaactaccatggggatacacccctgcatatcgctgccagggaaagttaccatgactgcgtgctcctgttcctgtctcggggtgcaaaccctgagcttagaaataaggagggggacactgcctgggaccttacacccgagcggagcgatgtatggttcgccttacagctcaacaggaaactccgactaggagttggtaaccgcgctatccgtacagaaaaaatcatctgtagggatgtcgcaaggggttacgagaatgttcctatcccttgtgtgaacggagtggatggagagccctgcccagaagactataagtacatctccgagaactgtgagacgagcactatgaacattgatagaaatattacacatctgcagcattgtacatgcgtggacgattgcagctcctccaactgcctctgtggacaactatcgatcaggtgttggtacgacaaagacggcaggctgttacaagaattcaacaaaattgagccccctctgatttttgaatgcaatcaggcatgttcctgttggaggaactgcaaaaacagggtagtgcagagtggtatcaaagtaaggctgcagctctatcggacagccaaaatgggctggggtgttagagccctgcagacaataccccagggaacattcatttgtgaatatgtcggggagctcatctctgatgctgaggcagatgtgagagaagacgactcatatctgtttgacctagacaacaaggatggagaggtatactgtatagatgctaggtattatggcaacatctctcggttcatcaaccacctctgtgacccgaacattatccccgtgcgggtctttatgctgcaccaggatctgagatttccaagaatagcattcttctctagtcgggatataagaactggtgaagagcttggcttcgattacggtgacagattttgggacataaagtccaagtacttcacatgccagtgcggctctgagaaatgtaaacacagcgcagaagctatagcgttggaacagagtcgtctggcaaggctcgatcctcatcctgagctcctccctgagctggggtccctaccacctgtcaatacctag

SEQ ID NO: 108186 - DNA, 3702 bp, Artificial Sequence
  derived and/or modified sequence
atgcgaggactccccaggggaagggggctgatgcgggctcggggaagagggagggccgctccccctggcagtagagggagggggagagggggtcctcataggggccgaggtagaccacgtagtctgttgtctttaccaagggcacaagccagctggactcctcagttgtctacaggtctcaccagccctccagtcccttgcttaccatcccaaggcgaagcaccggcagagatgggcgctctgcttttggagaaggagactcggggagcaaccgagcgcgttcatggaagtctcggcgatactccacgcagcgaggagacattgccgaaagccacccctgacagcttagagcccgctgggccatcctcccccgctagtgtgacagtgaccgtgggagacgagggagcagacacccctgtgggtgctactccgctcatcggagacgagtctgagaatttagagggtgatggcgatttgagaggtggccgaatactattgggccacgccacaaagtcattcccatcctccccctcgaaaggtggaagctgtccctcccgtgccaaaatgagcatgaccggggctggtaaaagccccccttctgtgcaatctcttgcaatgaggctgctgtcaatgccgggagcccagggtgctgccgctgccggatccgagccgccacctgctacaacctcccccgagggccagcccaaggtgcaccgggctaggaagaccatgtcaaaacctggtaacggtcagcctcctgtccccgagaaacgccctcccgaaatccagcactttagaatgtcagatgacgtgcattccctgggcaaggtaacctctgatctcgctaagagacgaaaacttaatagtggaggtgggttgtccgaggaacttggttctgcacgcagatcgggggaggtgacccttaccaaaggcgatcccggttccttagaagaatgggagaccgtggtgggcgacgacttttctttgtactacgatagctactcggtggatgaacgtgttgacagtgatagtaaaagcgaagttgaagctttgactgagcagctgtccgaggaagaggaagaagaagaggaggaggaagaggaggaggaagaggaagaggaagaggaagaggaggaagaggacgaggagtccggcaaccaatcggatcgttccggaagcagcgggaggaggaaggctaaaaaaaagtggcgtaaagattccccctgggtgaaaccttctagaaaaagaaggaaacgcgaacctccccgtgccaaagagcccagaggcgtttccaatgacaccagctccttggaaacagagcggggtttcgaagaattgccactgtgttcttgtaggatggaagctccaaaaatcgatcgaatctctgaacgcgcaggccataagtgtatggcaaccgaatccgtggacggagaactgtccggctgcaatgccgctatcctcaaacgcgaaaccatgaggcccagctcaagggtagccctgatggtgctctgcgaaacacacagggcccgaatggtaaaacaccattgttgccccggttgcggttatttttgcactgcagggaccttcctggagtgccatccagacttcagggttgcccatagatttcacaaggcatgtgtgagccagcttaacggaatggtgttttgccctcactgcggcgaggatgcctctgaagctcaggaggtcacaatacctcgtggggacggcgtgacaccccctgcaggcaccgctgctcccgctccacctcccctaagccaggacgtaccaggacgggcagatactagccagccatctgcgaggatgcgaggccacggggagccacggagaccaccctgcgatccgttagccgacaccatcgacagcagtgggcctagcttaaccttgcccaacggtggatgtttaagcgccgtcggactgcccctcgggccaggcagagaggcactggagaaggccctggtcatccaggaaagtgaaaggaggaagaagctgcgtttccaccctcgtcagctttacctcagcgtcaaacagggagaactccagaaggtgatattaatgctccttgataatctggacccaaacttccagagcgaccagcagtcaaagagaaccccgctccacgccgctgcacagaaagggagtgtggagatctgccacgttctgctgcaggcaggtgctaacatcaacgccgtggataagcagcaaaggactccactaatggaagctgtggtgaacaatcatctggaggtggcacggtatatggttcagagaggcggttgcgtatattccaaagaggaggatggatctacctgtctgcaccatgccgctaaaattggaaatctggagatggtcagcctgcttttgagcactgggcaggttgacgtgaacgcgcaagacagcggaggttggactcctattatctgggctgccgagcacaagcacatcgaagtgatcagaatgttgcttacaaggggtgcggatgtgacgctgaccgacaacgaggaaaatatttgcttgcattgggcctccttcaccggaagcgctgcgattgctgaagtgctactcaacgccagatgtgacttacacgctgttaactatcatggcgacacaccgctacatatcgcagccagagaatcctaccatgactgcgttcttctgttcctgtctaggggcgcaaatcctgagttaaggaataaagaaggagacaccgcttgggacctgacgcccgagcgaagcgacgtgtggttcgctctgcagctgaaccgaaagctgcggctcggagttggcaatcgtgctattcgcacagagaagattatctgccgcgacgtcgccagaggatacgagaacgtgcctatcccatgtgtcaatggggtcgatggtgagccctgccctgaggactacaagtacatcagcgagaactgtgaaacctcaacaatgaacattgatcgtaatataacccacctgcagcactgcacctgtgtggatgattgttcctcctctaactgcctttgtggacaattgagcatccgatgctggtatgacaaagacgggaggttgcttcaagagttcaacaaaattgagccaccccttatatttgagtgtaatcaggcctgctcttgctggaggaactgcaaaaatcgcgtcgtgcaatctggcatcaaagttcgactgcaactttaccgaaccgcaaagatggggtggggggtgcgtgctctgcaaactattccacaggggacatttatctgtgaatatgttggagaattaatttcggacgccgaggccgatgtcagggaagacgattcttacctgtttgacctcgataacaaagacggtgaggtgtattgtatcgatgctaggtactacgggaatataagccgcttcatcaaccacctgtgtgacccaaacatcattcctgtgagagtgttcatgctccaccaggacttaaggtttcctcgcatcgcctttttttcaagtcgcgacattcgcacgggcgaggaactcgggttcgattacggggatcgcttttgggacattaaatccaaatacttcacttgccaatgcggttctgaaaaatgcaagcactcagctgaggcaatcgcacttgagcaatccaggcttgccagactcgacccccatccggaactcttacccgagttaggctccctccctccagttaacacgtag

SEQ ID NO: 108187 - DNA, 3531 bp, Artificial Sequence
  derived and/or modified sequence
atggcagcagccgctggcgctgctgccgcagccgcagcagagggcgaggcgcctgccgagatgggggcactcctgctggaaaaagagacgagaggcgctacggagagagtgcatggttctctgggggacacgccacgaagtgaggagacattgcctaaagcgacccccgactcactcgagcctgctggcccatctagtcctgcctccgtcactgttaccgtcggcgacgaaggggcagatacacctgtaggtgccacacccctgattggtgatgagagtgagaacctggaaggcgacggcgacttgaggggaggtaggatcctgctcgggcacgctacgaaatccttcccgtcttctcctagtaaggggggtagctgcccatcccgcgctaaaatgagtatgactggcgcaggaaagtcgcccccttcagtgcagagcctcgccatgaggttgttgtcgatgcccggtgctcaaggcgcagcagccgctgggtccgagcctccgcctgctactacttctcctgaaggccagccaaaagtgcacagggccagaaaaaccatgtcaaagccgggtaacggccaaccaccagttcccgaaaaacgccctcctgaaattcaacatttcaggatgtccgacgatgttcactctcttggcaaagtgactagtgacctggcaaaacgtcgtaaattgaatagcgggggagggttatctgaggagctgggaagcgccagacgatctggagaggtaacacttaccaagggagatcccggttctttggaagagtgggagacagtcgtcggggatgacttctctctgtattacgatagttatagcgtggatgagagagtcgacagtgactctaagtccgaggttgaagcgcttactgagcagctatccgaagaggaagaggaggaggaagaagaggaggaagaagaggaagaggaagaggaagaggaagaagaggaggaggatgaagaaagcgggaatcagagcgatcgctccggatccagcggcaggagaaaagcaaaaaagaagtggagaaaagattccccctgggtcaagcctagtcggaagagacgcaaaagggaacccccaagggcaaaagagccccgaggcgtcagtaatgacacatcatctttagaaaccgaaagaggctttgaggagctgccactgtgctcctgcagaatggaggctccaaaaattgaccgcatcagcgagcgtgccggacacaagtgcatggcaactgagagtgtggatggggaactgtccggatgcaatgctgcaatcttaaaaagagagaccatgcggcctagcagcagggtggctcttatggtgctctgcgagacccacagagccagaatggttaagcatcattgttgtcctggttgcggatacttctgtaccgcaggaaccttcctggagtgccacccagacttccgggttgctcatagattccacaaggcatgtgtgagccagctgaacgggatggtcttctgcccccactgtggtgaagacgcctctgaagctcaggaagtgactattccaagaggcgacggagtaacacctccagcaggaaccgcagccccagctccccctcccttaagtcaggacgtgcccggacgtgccgacacttcacagcccagcgcccgtatgcggggacatggtgagcctaggaggcctccttgcgatccactcgctgacacaatagactccagtgggccatccctcacattgcctaacggcggatgcttgtccgcagtggggcttccactgggtcctggtagagaggccctggaaaaggccctggtcatccaagagagcgaacggaggaagaaacttcggttccaccctcggcagctgtacctcagcgtgaaacagggagagctgcagaaggtgatactgatgctgttggataatctcgatccaaatttccagtccgatcagcagagcaaaagaaccccgctccacgccgcagctcagaaaggatctgtggagatctgccacgtgctgcttcaggctggagctaacatcaacgcggttgacaagcagcaacggaccccactgatggaggcggtagtcaacaatcatctagaagttgcgaggtacatggtgcagcggggtgggtgtgtatattccaaggaggaagatggttctacctgccttcaccacgctgctaaaatagggaacctggagatggtgagtctcttactctccacggggcaggtggatgtgaacgcacaggacagcggcggttggacaccaatcatctgggccgctgagcataagcacatagaggtaatcaggatgctgcttactcgcggagcagatgttacactgacagataacgaggagaacatctgccttcactgggcctctttcaccggctcagcagccattgccgaggtgctgttaaacgccagatgtgacttgcacgccgtgaactatcatggcgacactcccttgcatattgccgcaagagaaagctatcacgattgcgttctcctctttctctcccgcggtgcaaaccctgagcttaggaataaagaaggcgacacagcttgggatctcacgcccgaaagatctgacgtctggtttgccctgcaactgaacaggaaactgaggctgggcgtgggcaatagagccattagaaccgagaagatcatctgtagagacgtggccaggggctacgaaaacgtgcccattccatgtgtgaatggcgtggacggagagccatgtccagaagactataagtatatctctgagaattgcgagacctctacgatgaatattgatagaaacattactcatctccaacactgcacctgcgtggacgattgttcatccagtaactgcctttgtggacagctgtccatccgctgctggtatgataaagacgggagacttctgcaggagtttaataagatcgagcctcctttgatcttcgagtgcaaccaggcctgcagttgctggagaaactgtaaaaaccgggtggtgcaaagtggaatcaaggtgagactccaactgtaccggacggcgaagatgggctggggagtgcgggcactgcagacgattcctcaaggaacatttatctgcgaatacgtgggtgaactgatctccgacgctgaggcggatgtacgggaagacgactcttacctctttgatttggacaacaaagacggggaagtgtattgtatcgacgccagatactatggaaacatctcccgttttattaaccacctgtgcgaccctaacatcattcctgtccgcgtatttatgttgcaccaggatctgcgtttccctcgaatcgcttttttctcctcccgcgatattcggacaggtgaagaactcgggtttgactacggggatcgcttctgggatattaagagtaaatacttcacatgccaatgtggatcagagaagtgtaagcattcggctgaagccattgccttggagcagagcaggctggcccgtctcgaccctcacccagagctcctgccggaactgggttctctgccaccagtgaatacttag

SEQ ID NO: 108188 - DNA, 3702 bp, Artificial Sequence
  derived and/or modified sequence
atgagaggtctgccaaggggtagaggcctgatgagagctcgcggtaggggacgcgctgctcccccagggtctaggggtagaggccgaggcggacctcaccggggacgcggaagaccacgctcactgctgagccttccacgggcacaggcatcttggactccgcagctgtccacggggctgaccagccccccagtaccgtgtctgccttctcagggcgaagctcccgctgaaatgggcgcactgttgctggagaaggagacccgcggagcaaccgagcgcgtccatggttctctcggagatacaccaagatctgaggaaaccctgccgaaagcaaatcctgactccctggagccagccggtccaagtagcccagctagcgtaactgtgaccgttggggatgaaggagctgatacaccagtcggcgctaccccactcatcggcgacgagtccgagaacctggagggcgatggcgacttgcggggtggacggattttgctggggcatgcaacgaaatccttcccttcttcgccgagcaaagggggatcttgtcccagtcgggctaagatgagcatgaccggagcaggcaaaagcccaccatcggtccaatctcttgccatgcgcctgctgtccatgcccggagcacagggtgcagctgccgctggaagtgagccccctcctgcaaccacctcccctgagggccaacccaaggtgcacagagcacgtaagacaatgtctaagcccggtaatggccagccgccagttcctgagaaaagaccaccagagatacagcacttccgaatgtctgatgatgttcactccttggggaaggttacatctgaccttgcgaaaaggaggaagctgaatagtggcggaggtttgagtgaagaactaggcagcgccagacgctcaggggaggtgactttgactaagggggatccgggaagtctagaagagtgggagacagttgtgggagatgatttttctctatactacgattcctactccgtggatgaacgcgtggatagcgactcaaaatcagaggttgaggccctgacagagcagttgtctgaggaggaggaggaagaggaagaagaagaggaggaggaagaggaggaggaagaagaggaggaggaagaagaggacgaggaatccggcaatcaaagtgatcggtccgggtcatcagggcgacgtaaagctaagaagaagtggcggaaggattcaccatgggtgaagccttcccgtaaacggcgaaaacgagagcctccacgagctaaggagccacgcggagtgtccaacgatactagctctttggagaccgagaggggattcgaggagctgccgttatgctcttgtaggatggaggccccaaagattgaccggatctctgaacgggctggccacaagtgcatggcgaccgagagtgtcgacggcgaactgagcggctgcaacgctgcaattttgaagagggaaacaatgcggcctagctcgagagttgctttgatggttctgtgtgaaacgcacagggcgaggatggtcaagcaccactgctgccctggctgtggttatttttgtaccgccggtacttttttagaatgccatcctgactttcgggtcgctcatcggttccacaaggcatgcgtgagccagttgaacggcatggtcttttgcccacattgcggagaggatgccagtgaagcccaggaagtgaccattcctaggggagatggcgtgacacccccagctgggacggccgctccagcgccacccccactgagccaggatgtgccaggaagagctgacacatctcaaccctccgcaagaatgagagggcacggcgaacctcgaagacctccctgcgatcctcttgcagacacaattgacagtagtgggcctagcctgacattgccgaatggtggctgcctctccgccgtgggcttgcccctaggcccaggccgtgaagccctcgaaaaagcgcttgtaatccaggaatctgagcggagaaagaaactgcgatttcaccccaggcagctctacctctcagttaaacagggcgagctccagaaagtgatactgatgctcctggacaatctggatccgaatttccagagcgaccaacaatctaaaagaacaccactgcatgccgcagctcaaaagggcagtgtcgaaatctgtcacgtacttcttcaggctggtgcgaatataaacgctgtcgataagcaacagcgaacccctctgatggaggccgttgtgaataaccatctggaggtcgccaggtatatggttcagcgcggagggtgtgtgtacagcaaggaggaggacgggtccacgtgcctccaccacgctgcaaaaatcgggaacctggagatggtgtctctgctattgtcgaccgggcaagtcgatgttaatgcgcaggatagcgggggatggactcccatcatctgggccgcagaacacaagcacattgaggttatcagaatgctgctgacacggggagctgatgtgaccctcactgacaacgaggaaaatatttgcttgcattgggcatcatttactggatccgcagcgatagctgaagtcctgttaaacgccaggtgcgacctgcatgctgtgaattaccacggcgacacccccttgcacatagccgctagggagagttatcacgactgcgtgctacttttcctctcaaggggcgctaacccagagctgaggaataaggagggtgacaccgcatgggacctcacaccagaacggtctgacgtgtggtttgcacttcagctaaatagaaagttgaggcttggagtagggaatagggcaattcgcaccgagaaaatcatttgccgggatgtggccaggggctacgaaaatgtgcccataccctgtgtgaacggggtggatggggagccttgccccgaggactacaagtatatcagcgagaactgtgagacatcaacaatgaatatcgaccgcaacattacacacctccagcattgcacctgcgtagacgactgttctagtagcaattgcctgtgcggccagctatctataaggtgttggtatgacaaagacggacgtctgctgcaggagtttaataagatcgaaccccctctgatctttgagtgcaatcaagcctgttcctgttggcgtaattgtaagaatcgggtggtccagtccggcattaaagtaaggctacaactgtaccgcaccgcgaagatggggtggggggtgagggcgctgcagacaatcccccagggcactttcatttgtgagtacgtgggcgagctgattagcgatgcggaagctgacgtgcgcgaagacgactcgtacctgttcgatcttgacaataaggatggagaagtctactgtatcgatgccagatattacggcaacatctcacggtttataaatcacctctgcgatcccaatatcataccagtgcgggtgtttatgctgcaccaggacctgagattcccccgtatcgcgtttttcagctcccgggacatccggaccggcgaagagctggggttcgattacggagacaggttttgggacataaaaagcaagtactttacctgccaatgcggtagcgagaaatgtaaacactccgctgaggccatcgcacttgagcagtctcgactggcacggcttgacccgcacccagagctgttgcccgagttgggctccctcccgcctgtgaatacgtag

SEQ ID NO: 108189 - DNA, 3531 bp, Artificial Sequence
  derived and/or modified sequence
atggccgcagccgctggagccgcagccgcagctgccgctgagggcgaggctcctgctgaaatgggagccctgcttctggaaaaggagacccgcggtgccacagaacgcgtgcatggcagtctgggggatactcctcggagtgaagagactctgcccaaagccaaccccgatagccttgaacctgctgggcctagctcgccagcaagtgtcacagtgaccgtgggcgatgaaggtgccgacactccggtaggcgcaacccccctcataggtgatgagtccgagaaccttgagggtgatggagacctgagaggcggaaggatactgctgggtcatgcgaccaagtccttcccctcatccccatcgaagggcggaagctgccctagcagggcgaagatgagcatgacgggagcaggtaagagccctccaagtgtacagagcctggctatgcgcctactgtctatgcctggggctcagggtgcagccgcagccggttctgagccaccgccagcaacaacatcgccagagggacagcccaaagtacatcgcgcacgaaagactatgtcgaagcccggtaacgggcagccccctgtgcctgagaagcgtcccccagaaatccaacatttccgtatgagcgacgatgtgcactcgttaggaaaagtcacatctgacttagccaagaggcgtaagctcaattccgggggaggcttaagtgaagaactaggcagcgcccgtaggtccggcgaggtcactttgactaaaggcgacccagggtcgttggaagagtgggagacagtagtaggcgacgatttcagcctctattatgatagttactccgtggacgagagggtagatagcgattcgaagagtgaagtcgaggccctgaccgaacagttgtcggaggaggaagaggaagaggaagaagaagaggaggaggaagaagaagaggaggaggaggaggaggaggaagaagacgaggagagtggcaaccaatctgataggtctggctcatccggtagacggaaagccaagaagaagtggcgcaaggactccccctgggtgaaaccgtctagaaaacgcagaaagcgcgagccccctcgcgcaaaggaacctagaggcgtcagcaacgacactagttccttagaaacagagagaggatttgaggaattacccctgtgctcatgcagaatggaggcccctaaaatagataggatttccgagagggccggacacaaatgcatggctaccgaatctgttgacggtgagctctccggttgcaacgctgctatactgaagcgcgaaaccatgcggccaagcagcagagtcgcactgatggtgctctgtgaaactcatcgtgccagaatggtgaagcatcattgctgtcctggatgcggatacttttgtactgccggaacttttctagagtgtcaccctgactttcgcgtagcccaccgattccacaaggcttgcgtctcgcagctgaatggcatggtcttttgccctcactgcggagaagatgcttccgaggcccaagaggtcactattcctcgtggcgatggggtcactccaccggctggcactgctgccccagccccacctccactatctcaggatgtgccaggtagagccgatacatctcagccatccgctcggatgaggggacatggtgaaccccgacggccaccttgcgaccccttggcggatactattgattcgtccggtccatccctaacgctgcccaacggcggatgcctgtctgccgtggggttgcccttgggtccaggacgcgaagccttggagaaagctctagtcatccaggagagcgaaagacggaagaagctaaggttccatccacgccaactctacctgtctgtcaaacagggtgagctgcagaaggtgatccttatgctgcttgacaacctggacccgaatttccagagcgatcagcagagtaagcggactccactgcacgccgctgcccagaaagggtctgtggagatctgccatgtcctgctccaggccggagccaacattaatgccgtggacaagcaacagcggacaccccttatggaggccgtggtgaacaaccacctcgaagtggcacggtatatggtgcagcgcggaggctgtgtgtactccaaagaagaggacgggtccacatgcctccatcatgctgcaaaaataggcaacctagaaatggtgtcgcttctcctctctacgggccaggttgacgtgaatgcacaggattctggagggtggaccccgatcatttgggcggctgaacataagcatatagaggtgatccgtatgctccttactcgaggggctgatgtcacacttacggataatgaagaaaatatctgcctgcactgggcttcctttactggctccgctgccattgctgaggtcctcctcaatgccagatgcgacttacacgccgtgaactatcacggcgacacacctctgcacatcgccgcaagggagtcctatcatgactgtgttcttctctttttgtcacgtggcgcaaatccagaactgagaaacaaagaaggagatactgcctgggacctcactcccgaaagatctgatgtgtggttcgccctacaactgaataggaaactccgcttgggagtcgggaacagggccatacgcacagagaagataatctgtagagacgtggcccgaggctacgagaatgtgcccatcccctgtgtgaacggtgtggacggtgagccatgtccagaagattataagtacatttctgaaaactgtgaaacatctactatgaacatagacaggaatattacacatttacagcactgcacatgcgtggacgattgtagtagtagtaactgcttgtgtggtcagctctccataagatgttggtatgacaaggacggcaggctgctgcaggaattcaacaagatcgagccaccacttattttcgaatgcaaccaggcctgttcctgttggagaaattgtaaaaatcgcgtggtgcagagcgggattaaggtgcgcttgcagttgtacagaacagccaagatgggttggggcgttagggcactgcagactattccccagggcactttcatctgcgaatacgtgggtgagttgatctcagacgctgaggctgacgtacgcgaggatgactcctacctcttcgacctggacaacaaagatggtgaagtgtattgtattgacgctaggtattacggaaatatcagccggtttataaatcacctgtgcgacccaaacatcattccggtcagggtgtttatgctgcatcaggacttgcgatttcctaggatcgcattcttctccagtagagatataagaaccggggaagaattgggcttcgattacggtgaccgcttctgggatatcaagagcaaatactttacgtgtcagtgtggtagcgagaaatgcaaacactctgcagaggccatcgcccttgaacagtccagattagcccgtctggacccacatcccgaattgctgcctgaattggggagcctgccccctgtgaacacttag

SEQ ID NO: 108190 - DNA, 2667 bp, Artificial Sequence
  derived and/or modified sequence
agtgaggtggaagccttgaccgagcagttatccgaagaagaggaggaggaagaggaggaagaggaagaggaggaggaggaggaagaggaggaagaagaggaggaggatgaagagtctggcaaccaatctgacagaagcggatcttcaggcaggaggaaggccaagaagaagtggagaaaagactcgccctgggtgaaacccagcagaaagagaagaaaaagagagcctcccagagctaaggaaccacgcggagtcagtaacgacactagcagtttggagacagaaagggggttcgaggagttacctctttgttcttgcaggatggaggcgcctaaaatagatagaatttccgagcgagccggtcacaagtgcatggctacagagagtgttgacggagagctgtcaggatgcaacgccgctatcctgaagcgggaaacaatgagaccttcctcacgggtggccctcatggtgctgtgtgaaacacacagagccagaatggtcaagcaccattgttgccccggttgtggatacttttgcacagccggtacctttctggaatgccatcccgatttcagagtggcccatagattccacaaggcatgtgtctcacagctgaatggaatggtcttctgcccccactgcggggaagatgcgagtgaagcccaggaggtaaccatcccccgaggagacggcgtcacacccccagcaggtaccgctgccccagccccaccccctctgtcgcaggacgtccctggccgtgcggacacgagccaaccaagcgccaggatgagaggacacggagagcccaggagacccccatgcgaccccttggccgataccatcgatagcagcggacctagcctaacactgcctaacggaggatgtctgtctgcagtgggcttaccactgggccctggtagggaggcgctggaaaaagctttagtaattcaggagtcggagagaaggaagaaactgcgtttccaccccagacaattatacttaagtgtcaagcaaggggagctgcagaaggttatcctgatgctccttgataatttagacccaaattttcagagtgaccagcagtcaaaaaggaccccactgcacgctgctgcacagaagggctccgtggagatctgtcacgtgctgctgcaggcaggcgcaaacattaatgctgtggacaagcagcagcgcacaccgctaatggaggcggtggttaataatcatctggaggtggctcggtatatggtccagagaggcggatgcgtatattctaaagaagaagatgggtccacatgcctccaccacgccgctaagatcgggaacctggaaatggtgtcgctgctgctgtccacaggacaggtggacgtcaatgcgcaggattctgggggatggacccctatcatctgggcagcagagcacaaacacatcgaggtgatcaggatgctactgactagaggcgctgatgtcaccctcaccgacaacgaggaaaacatttgtctgcactgggccagctttaccgggtcagcagctattgcggaagtcctcctcaacgcaaggtgcgacctccatgctgtgaattaccatggagacaccccgctgcatatcgcagccagggagtcataccacgactgcgtccttcttttcctatcacggggtgccaaccctgaattacgtaataaggagggcgatacggcttgggacctgacccctgagagatctgacgtctggttcgctctccaactgaaccgcaagctgaggctgggggtcgggaacagggccatcaggacagaaaagatcatttgtcgtgatgtggcaagggggtacgaaaacgtcccaatcccctgcgttaatggtgtcgatggggagccttgcccggaggactataaatacatctctgagaactgtgaaacaagcaccatgaacatagaccgaaacatcactcatctgcagcattgtacgtgtgtggatgactgctcaagcagcaactgcttgtgtggacaactttctatcagatgttggtatgacaaggatggacggcttttgcaggagttcaataaaattgagccacccctgatttttgagtgtaatcaggcatgcagctgctggagaaattgcaaaaatcgggtcgtgcagtctggcatcaaagttcgactgcagctgtaccgcactgctaaaatgggttggggcgtgagggctctgcagacaattccccagggcactttcatttgtgagtacgtgggagaattgatctcagatgctgaggctgacgtccgcgaagatgactcctacctgttcgaccttgacaataaagatggcgaagtttactgtatagatgcccgatactacgggaacataagtcggtttattaaccacctgtgtgaccccaacatcatcccagtcagagtctttatgctccaccaggatctgaggtttccacgcattgctttcttcagttcacgggatatcaggacgggagaggagctagggtttgattatggagatcgcttctgggacataaaatcgaagtattttacatgtcagtgcggcagcgagaaatgtaagcattcagctgaggccatagccctcgagcagtctcgcctggcccgacttgaccctcaccccgagttgcttcccgagcttgggtcccttcctcccgtcaacacatag

SEQ ID NO: 108191 - DNA, 3702 bp, Artificial Sequence
  derived and/or modified sequence
atgagaggcctgcccagaggcagaggcctgatgagagccagaggcagaggcagagccgccccccccggcagcagaggcagaggcagaggcggcccccacagaggcagaggcagacccagaagcctgctgagcctgcccagagcccaggccagctggaccccccagctgagcaccggcctgaccagcccccccgtgccctgcctgcccagccagggcgaggcccccgccgagatgggcgccctgctgctggagaaggagaccagaggcgccaccgagagagtgcacggcagcctgggcgacacccccagaagcgaggagaccctgcccaaggccacccccgacagcctggagcccgccggccccagcagccccgccagcgtgaccgtgaccgtgggcgacgagggcgccgacacccccgtgggcgccacccccctgatcggcgacgagagcgagaacctggagggcgacggcgacctgagaggcggcagaatcctgctgggccacgccaccaagagcttccccagcagccccagcaagggcggcagctgccccagcagagccaagatgagcatgaccggcgccggcaagagcccccccagcgtgcagagcctggccatgagactgctgagcatgcccggcgcccagggcgccgccgccgccggcagcgagcccccccccgccaccaccagccccgagggccagcccaaggtgcacagagccagaaagaccatgagcaagcccggcaacggccagccccccgtgcccgagaagagaccccccgagatccagcacttcagaatgagcgacgacgtgcacagcctgggcaaggtgaccagcgacctggccaagagaagaaagctgaacagcggcggcggcctgagcgaggagctgggcagcgccagaagaagcggcgaggtgaccctgaccaagggcgaccccggcagcctggaggagtgggagaccgtggtgggcgacgacttcagcctgtactacgacagctacagcgtggacgagagagtggacagcgacagcaagagcgaggtggaggccctgaccgagcagctgagcgaggaggaggaggaggaggaggaggaggaggaggaggaggaggaggaggaggaggaggaggaggaggaggaggacgaggagagcggcaaccagagcgacagaagcggcagcagcggcagaagaaaggccaagaagaagtggagaaaggacagcccctgggtgaagcccagcagaaagagaagaaagagagagccccccagagccaaggagcccagaggcgtgagcaacgacaccagcagcctggagaccgagagaggcttcgaggagctgcccctgtgcagctgcagaatggaggcccccaagatcgacagaatcagcgagagagccggccacaagtgcatggccaccgagagcgtggacggcgagctgagcggctgcaacgccgccatcctgaagagagagaccatgagacccagcagcagagtggccctgatggtgctgtgcgagacccacagagccagaatggtgaagcaccactgctgccccggctgcggctacttctgcaccgccggcaccttcctggagtgccaccccgacttcagagtggcccacagattccacaaggcctgcgtgagccagctgaacggcatggtgttctgcccccactgcggcgaggacgccagcgaggcccaggaggtgaccatccccagaggcgacggcgtgaccccccccgccggcaccgccgcccccgcccccccccccctgagccaggacgtgcccggcagagccgacaccagccagcccagcgccagaatgagaggccacggcgagcccagaagacccccctgcgaccccctggccgacaccatcgacagcagcggccccagcctgaccctgcccaacggcggctgcctgagcgccgtgggcctgcccctgggccccggcagagaggccctggagaaggccctggtgatccaggagagcgagagaagaaagaagctgagattccaccccagacagctgtacctgagcgtgaagcagggcgagctgcagaaggtgatcctgatgctgctggacaacctggaccccaacttccagagcgaccagcagagcaagagaacccccctgcacgccgccgcccagaagggcagcgtggagatctgccacgtgctgctgcaggccggcgccaacatcaacgccgtggacaagcagcagagaacccccctgatggaggccgtggtgaacaaccacctggaggtggccagatacatggtgcagagaggcggctgcgtgtacagcaaggaggaggacggcagcacctgcctgcaccacgccgccaagatcggcaacctggagatggtgagcctgctgctgagcaccggccaggtggacgtgaacgcccaggacagcggcggctggacccccatcatctgggccgccgagcacaagcacatcgaggtgatcagaatgctgctgaccagaggcgccgacgtgaccctgaccgacaacgaggagaacatctgcctgcactgggccagcttcaccggcagcgccgccatcgccgaggtgctgctgaacgccagatgcgacctgcacgccgtgaactaccacggcgacacccccctgcacatcgccgccagagagagctaccacgactgcgtgctgctgttcctgagcagaggcgccaaccccgagctgagaaacaaggagggcgacaccgcctgggacctgacccccgagagaagcgacgtgtggttcgccctgcagctgaacagaaagctgagactgggcgtgggcaacagagccatcagaaccgagaagatcatctgcagagacgtggccagaggctacgagaacgtgcccatcccctgcgtgaacggcgtggacggcgagccctgccccgaggactacaagtacatcagcgagaactgcgagaccagcaccatgaacatcgacagaaacatcacccacctgcagcactgcacctgcgtggacgactgcagcagcagcaactgcctgtgcggccagctgagcatcagatgctggtacgacaaggacggcagactgctgcaggagttcaacaagatcgagccccccctgatcttcgagtgcaaccaggcctgcagctgctggagaaactgcaagaacagagtggtgcagagcggcatcaaggtgagactgcagctgtacagaaccgccaagatgggctggggcgtgagagccctgcagaccatcccccagggcaccttcatctgcgagtacgtgggcgagctgatcagcgacgccgaggccgacgtgagagaggacgacagctacctgttcgacctggacaacaaggacggcgaggtgtactgcatcgacgccagatactacggcaacatcagcagattcatcaaccacctgtgcgaccccaacatcatccccgtgagagtgttcatgctgcaccaggacctgagattccccagaatcgccttcttcagcagcagagacatcagaaccggcgaggagctgggcttcgactacggcgacagattctgggacatcaagagcaagtacttcacctgccagtgcggcagcgagaagtgcaagcacagcgccgaggccatcgccctggagcagagcagactggccagactggacccccaccccgagctgctgcccgagctgggcagcctgccccccgtgaacacctag

SEQ ID NO: 108192 - DNA, 3531 bp, Artificial Sequence
  derived and/or modified sequence
atggccgccgccgccggcgccgccgccgccgccgccgccgagggcgaggcccccgccgagatgggcgccctgctgctggagaaggagaccagaggcgccaccgagagagtgcacggcagcctgggcgacacccccagaagcgaggagaccctgcccaaggccacccccgacagcctggagcccgccggccccagcagccccgccagcgtgaccgtgaccgtgggcgacgagggcgccgacacccccgtgggcgccacccccctgatcggcgacgagagcgagaacctggagggcgacggcgacctgagaggcggcagaatcctgctgggccacgccaccaagagcttccccagcagccccagcaagggcggcagctgccccagcagagccaagatgagcatgaccggcgccggcaagagcccccccagcgtgcagagcctggccatgagactgctgagcatgcccggcgcccagggcgccgccgccgccggcagcgagcccccccccgccaccaccagccccgagggccagcccaaggtgcacagagccagaaagaccatgagcaagcccggcaacggccagccccccgtgcccgagaagagaccccccgagatccagcacttcagaatgagcgacgacgtgcacagcctgggcaaggtgaccagcgacctggccaagagaagaaagctgaacagcggcggcggcctgagcgaggagctgggcagcgccagaagaagcggcgaggtgaccctgaccaagggcgaccccggcagcctggaggagtgggagaccgtggtgggcgacgacttcagcctgtactacgacagctacagcgtggacgagagagtggacagcgacagcaagagcgaggtggaggccctgaccgagcagctgagcgaggaggaggaggaggaggaggaggaggaggaggaggaggaggaggaggaggaggaggaggaggaggaggaggacgaggagagcggcaaccagagcgacagaagcggcagcagcggcagaagaaaggccaagaagaagtggagaaaggacagcccctgggtgaagcccagcagaaagagaagaaagagagagccccccagagccaaggagcccagaggcgtgagcaacgacaccagcagcctggagaccgagagaggcttcgaggagctgcccctgtgcagctgcagaatggaggcccccaagatcgacagaatcagcgagagagccggccacaagtgcatggccaccgagagcgtggacggcgagctgagcggctgcaacgccgccatcctgaagagagagaccatgagacccagcagcagagtggccctgatggtgctgtgcgagacccacagagccagaatggtgaagcaccactgctgccccggctgcggctacttctgcaccgccggcaccttcctggagtgccaccccgacttcagagtggcccacagattccacaaggcctgcgtgagccagctgaacggcatggtgttctgcccccactgcggcgaggacgccagcgaggcccaggaggtgaccatccccagaggcgacggcgtgaccccccccgccggcaccgccgcccccgcccccccccccctgagccaggacgtgcccggcagagccgacaccagccagcccagcgccagaatgagaggccacggcgagcccagaagacccccctgcgaccccctggccgacaccatcgacagcagcggccccagcctgaccctgcccaacggcggctgcctgagcgccgtgggcctgcccctgggccccggcagagaggccctggagaaggccctggtgatccaggagagcgagagaagaaagaagctgagattccaccccagacagctgtacctgagcgtgaagcagggcgagctgcagaaggtgatcctgatgctgctggacaacctggaccccaacttccagagcgaccagcagagcaagagaacccccctgcacgccgccgcccagaagggcagcgtggagatctgccacgtgctgctgcaggccggcgccaacatcaacgccgtggacaagcagcagagaacccccctgatggaggccgtggtgaacaaccacctggaggtggccagatacatggtgcagagaggcggctgcgtgtacagcaaggaggaggacggcagcacctgcctgcaccacgccgccaagatcggcaacctggagatggtgagcctgctgctgagcaccggccaggtggacgtgaacgcccaggacagcggcggctggacccccatcatctgggccgccgagcacaagcacatcgaggtgatcagaatgctgctgaccagaggcgccgacgtgaccctgaccgacaacgaggagaacatctgcctgcactgggccagcttcaccggcagcgccgccatcgccgaggtgctgctgaacgccagatgcgacctgcacgccgtgaactaccacggcgacacccccctgcacatcgccgccagagagagctaccacgactgcgtgctgctgttcctgagcagaggcgccaaccccgagctgagaaacaaggagggcgacaccgcctgggacctgacccccgagagaagcgacgtgtggttcgccctgcagctgaacagaaagctgagactgggcgtgggcaacagagccatcagaaccgagaagatcatctgcagagacgtggccagaggctacgagaacgtgcccatcccctgcgtgaacggcgtggacggcgagccctgccccgaggactacaagtacatcagcgagaactgcgagaccagcaccatgaacatcgacagaaacatcacccacctgcagcactgcacctgcgtggacgactgcagcagcagcaactgcctgtgcggccagctgagcatcagatgctggtacgacaaggacggcagactgctgcaggagttcaacaagatcgagccccccctgatcttcgagtgcaaccaggcctgcagctgctggagaaactgcaagaacagagtggtgcagagcggcatcaaggtgagactgcagctgtacagaaccgccaagatgggctggggcgtgagagccctgcagaccatcccccagggcaccttcatctgcgagtacgtgggcgagctgatcagcgacgccgaggccgacgtgagagaggacgacagctacctgttcgacctggacaacaaggacggcgaggtgtactgcatcgacgccagatactacggcaacatcagcagattcatcaaccacctgtgcgaccccaacatcatccccgtgagagtgttcatgctgcaccaggacctgagattccccagaatcgccttcttcagcagcagagacatcagaaccggcgaggagctgggcttcgactacggcgacagattctgggacatcaagagcaagtacttcacctgccagtgcggcagcgagaagtgcaagcacagcgccgaggccatcgccctggagcagagcagactggccagactggacccccaccccgagctgctgcccgagctgggcagcctgccccccgtgaacacctag

SEQ ID NO: 108193 - DNA, 3702 bp, Artificial Sequence
  derived and/or modified sequence
atgagaggcctgcccagaggcagaggcctgatgagagccagaggcagaggcagagccgccccccccggcagcagaggcagaggcagaggcggcccccacagaggcagaggcagacccagaagcctgctgagcctgcccagagcccaggccagctggaccccccagctgagcaccggcctgaccagcccccccgtgccctgcctgcccagccagggcgaggcccccgccgagatgggcgccctgctgctggagaaggagaccagaggcgccaccgagagagtgcacggcagcctgggcgacacccccagaagcgaggagaccctgcccaaggccaaccccgacagcctggagcccgccggccccagcagccccgccagcgtgaccgtgaccgtgggcgacgagggcgccgacacccccgtgggcgccacccccctgatcggcgacgagagcgagaacctggagggcgacggcgacctgagaggcggcagaatcctgctgggccacgccaccaagagcttccccagcagccccagcaagggcggcagctgccccagcagagccaagatgagcatgaccggcgccggcaagagcccccccagcgtgcagagcctggccatgagactgctgagcatgcccggcgcccagggcgccgccgccgccggcagcgagcccccccccgccaccaccagccccgagggccagcccaaggtgcacagagccagaaagaccatgagcaagcccggcaacggccagccccccgtgcccgagaagagaccccccgagatccagcacttcagaatgagcgacgacgtgcacagcctgggcaaggtgaccagcgacctggccaagagaagaaagctgaacagcggcggcggcctgagcgaggagctgggcagcgccagaagaagcggcgaggtgaccctgaccaagggcgaccccggcagcctggaggagtgggagaccgtggtgggcgacgacttcagcctgtactacgacagctacagcgtggacgagagagtggacagcgacagcaagagcgaggtggaggccctgaccgagcagctgagcgaggaggaggaggaggaggaggaggaggaggaggaggaggaggaggaggaggaggaggaggaggaggaggaggacgaggagagcggcaaccagagcgacagaagcggcagcagcggcagaagaaaggccaagaagaagtggagaaaggacagcccctgggtgaagcccagcagaaagagaagaaagagagagccccccagagccaaggagcccagaggcgtgagcaacgacaccagcagcctggagaccgagagaggcttcgaggagctgcccctgtgcagctgcagaatggaggcccccaagatcgacagaatcagcgagagagccggccacaagtgcatggccaccgagagcgtggacggcgagctgagcggctgcaacgccgccatcctgaagagagagaccatgagacccagcagcagagtggccctgatggtgctgtgcgagacccacagagccagaatggtgaagcaccactgctgccccggctgcggctacttctgcaccgccggcaccttcctggagtgccaccccgacttcagagtggcccacagattccacaaggcctgcgtgagccagctgaacggcatggtgttctgcccccactgcggcgaggacgccagcgaggcccaggaggtgaccatccccagaggcgacggcgtgaccccccccgccggcaccgccgcccccgcccccccccccctgagccaggacgtgcccggcagagccgacaccagccagcccagcgccagaatgagaggccacggcgagcccagaagacccccctgcgaccccctggccgacaccatcgacagcagcggccccagcctgaccctgcccaacggcggctgcctgagcgccgtgggcctgcccctgggccccggcagagaggccctggagaaggccctggtgatccaggagagcgagagaagaaagaagctgagattccaccccagacagctgtacctgagcgtgaagcagggcgagctgcagaaggtgatcctgatgctgctggacaacctggaccccaacttccagagcgaccagcagagcaagagaacccccctgcacgccgccgcccagaagggcagcgtggagatctgccacgtgctgctgcaggccggcgccaacatcaacgccgtggacaagcagcagagaacccccctgatggaggccgtggtgaacaaccacctggaggtggccagatacatggtgcagagaggcggctgcgtgtacagcaaggaggaggacggcagcacctgcctgcaccacgccgccaagatcggcaacctggagatggtgagcctgctgctgagcaccggccaggtggacgtgaacgcccaggacagcggcggctggacccccatcatctgggccgccgagcacaagcacatcgaggtgatcagaatgctgctgaccagaggcgccgacgtgaccctgaccgacaacgaggagaacatctgcctgcactgggccagcttcaccggcagcgccgccatcgccgaggtgctgctgaacgccagatgcgacctgcacgccgtgaactaccacggcgacacccccctgcacatcgccgccagagagagctaccacgactgcgtgctgctgttcctgagcagaggcgccaaccccgagctgagaaacaaggagggcgacaccgcctgggacctgacccccgagagaagcgacgtgtggttcgccctgcagctgaacagaaagctgagactgggcgtgggcaacagagccatcagaaccgagaagatcatctgcagagacgtggccagaggctacgagaacgtgcccatcccctgcgtgaacggcgtggacggcgagccctgccccgaggactacaagtacatcagcgagaactgcgagaccagcaccatgaacatcgacagaaacatcacccacctgcagcactgcacctgcgtggacgactgcagcagcagcaactgcctgtgcggccagctgagcatcagatgctggtacgacaaggacggcagactgctgcaggagttcaacaagatcgagccccccctgatcttcgagtgcaaccaggcctgcagctgctggagaaactgcaagaacagagtggtgcagagcggcatcaaggtgagactgcagctgtacagaaccgccaagatgggctggggcgtgagagccctgcagaccatcccccagggcaccttcatctgcgagtacgtgggcgagctgatcagcgacgccgaggccgacgtgagagaggacgacagctacctgttcgacctggacaacaaggacggcgaggtgtactgcatcgacgccagatactacggcaacatcagcagattcatcaaccacctgtgcgaccccaacatcatccccgtgagagtgttcatgctgcaccaggacctgagattccccagaatcgccttcttcagcagcagagacatcagaaccggcgaggagctgggcttcgactacggcgacagattctgggacatcaagagcaagtacttcacctgccagtgcggcagcgagaagtgcaagcacagcgccgaggccatcgccctggagcagagcagactggccagactggacccccaccccgagctgctgcccgagctgggcagcctgccccccgtgaacacctag

SEQ ID NO: 108194 - DNA, 2667 bp, Artificial Sequence
  derived and/or modified sequence
agcgaggtggaggccctgaccgagcagctgagcgaggaggaggaggaggaggaggaggaggaggaggaggaggaggaggaggaggaggaggaggaggaggaggaggacgaggagagcggcaaccagagcgacagaagcggcagcagcggcagaagaaaggccaagaagaagtggagaaaggacagcccctgggtgaagcccagcagaaagagaagaaagagagagccccccagagccaaggagcccagaggcgtgagcaacgacaccagcagcctggagaccgagagaggcttcgaggagctgcccctgtgcagctgcagaatggaggcccccaagatcgacagaatcagcgagagagccggccacaagtgcatggccaccgagagcgtggacggcgagctgagcggctgcaacgccgccatcctgaagagagagaccatgagacccagcagcagagtggccctgatggtgctgtgcgagacccacagagccagaatggtgaagcaccactgctgccccggctgcggctacttctgcaccgccggcaccttcctggagtgccaccccgacttcagagtggcccacagattccacaaggcctgcgtgagccagctgaacggcatggtgttctgcccccactgcggcgaggacgccagcgaggcccaggaggtgaccatccccagaggcgacggcgtgaccccccccgccggcaccgccgcccccgcccccccccccctgagccaggacgtgcccggcagagccgacaccagccagcccagcgccagaatgagaggccacggcgagcccagaagacccccctgcgaccccctggccgacaccatcgacagcagcggccccagcctgaccctgcccaacggcggctgcctgagcgccgtgggcctgcccctgggccccggcagagaggccctggagaaggccctggtgatccaggagagcgagagaagaaagaagctgagattccaccccagacagctgtacctgagcgtgaagcagggcgagctgcagaaggtgatcctgatgctgctggacaacctggaccccaacttccagagcgaccagcagagcaagagaacccccctgcacgccgccgcccagaagggcagcgtggagatctgccacgtgctgctgcaggccggcgccaacatcaacgccgtggacaagcagcagagaacccccctgatggaggccgtggtgaacaaccacctggaggtggccagatacatggtgcagagaggcggctgcgtgtacagcaaggaggaggacggcagcacctgcctgcaccacgccgccaagatcggcaacctggagatggtgagcctgctgctgagcaccggccaggtggacgtgaacgcccaggacagcggcggctggacccccatcatctgggccgccgagcacaagcacatcgaggtgatcagaatgctgctgaccagaggcgccgacgtgaccctgaccgacaacgaggagaacatctgcctgcactgggccagcttcaccggcagcgccgccatcgccgaggtgctgctgaacgccagatgcgacctgcacgccgtgaactaccacggcgacacccccctgcacatcgccgccagagagagctaccacgactgcgtgctgctgttcctgagcagaggcgccaaccccgagctgagaaacaaggagggcgacaccgcctgggacctgacccccgagagaagcgacgtgtggttcgccctgcagctgaacagaaagctgagactgggcgtgggcaacagagccatcagaaccgagaagatcatctgcagagacgtggccagaggctacgagaacgtgcccatcccctgcgtgaacggcgtggacggcgagccctgccccgaggactacaagtacatcagcgagaactgcgagaccagcaccatgaacatcgacagaaacatcacccacctgcagcactgcacctgcgtggacgactgcagcagcagcaactgcctgtgcggccagctgagcatcagatgctggtacgacaaggacggcagactgctgcaggagttcaacaagatcgagccccccctgatcttcgagtgcaaccaggcctgcagctgctggagaaactgcaagaacagagtggtgcagagcggcatcaaggtgagactgcagctgtacagaaccgccaagatgggctggggcgtgagagccctgcagaccatcccccagggcaccttcatctgcgagtacgtgggcgagctgatcagcgacgccgaggccgacgtgagagaggacgacagctacctgttcgacctggacaacaaggacggcgaggtgtactgcatcgacgccagatactacggcaacatcagcagattcatcaaccacctgtgcgaccccaacatcatccccgtgagagtgttcatgctgcaccaggacctgagattccccagaatcgccttcttcagcagcagagacatcagaaccggcgaggagctgggcttcgactacggcgacagattctgggacatcaagagcaagtacttcacctgccagtgcggcagcgagaagtgcaagcacagcgccgaggccatcgccctggagcagagcagactggccagactggacccccaccccgagctgctgcccgagctgggcagcctgccccccgtgaacacctag

SEQ ID NO: 108195 - DNA, 3531 bp, Artificial Sequence
  derived and/or modified sequence
atggccgccgccgccggcgccgccgccgccgccgccgccgagggcgaggcccccgccgagatgggcgccctgctgctggagaaggagaccagaggcgccaccgagagagtgcacggcagcctgggcgacacccccagaagcgaggagaccctgcccaaggccaaccccgacagcctggagcccgccggccccagcagccccgccagcgtgaccgtgaccgtgggcgacgagggcgccgacacccccgtgggcgccacccccctgatcggcgacgagagcgagaacctggagggcgacggcgacctgagaggcggcagaatcctgctgggccacgccaccaagagcttccccagcagccccagcaagggcggcagctgccccagcagagccaagatgagcatgaccggcgccggcaagagcccccccagcgtgcagagcctggccatgagactgctgagcatgcccggcgcccagggcgccgccgccgccggcagcgagcccccccccgccaccaccagccccgagggccagcccaaggtgcacagagccagaaagaccatgagcaagcccggcaacggccagccccccgtgcccgagaagagaccccccgagatccagcacttcagaatgagcgacgacgtgcacagcctgggcaaggtgaccagcgacctggccaagagaagaaagctgaacagcggcggcggcctgagcgaggagctgggcagcgccagaagaagcggcgaggtgaccctgaccaagggcgaccccggcagcctggaggagtgggagaccgtggtgggcgacgacttcagcctgtactacgacagctacagcgtggacgagagagtggacagcgacagcaagagcgaggtggaggccctgaccgagcagctgagcgaggaggaggaggaggaggaggaggaggaggaggaggaggaggaggaggaggaggaggaggaggaggaggaggacgaggagagcggcaaccagagcgacagaagcggcagcagcggcagaagaaaggccaagaagaagtggagaaaggacagcccctgggtgaagcccagcagaaagagaagaaagagagagccccccagagccaaggagcccagaggcgtgagcaacgacaccagcagcctggagaccgagagaggcttcgaggagctgcccctgtgcagctgcagaatggaggcccccaagatcgacagaatcagcgagagagccggccacaagtgcatggccaccgagagcgtggacggcgagctgagcggctgcaacgccgccatcctgaagagagagaccatgagacccagcagcagagtggccctgatggtgctgtgcgagacccacagagccagaatggtgaagcaccactgctgccccggctgcggctacttctgcaccgccggcaccttcctggagtgccaccccgacttcagagtggcccacagattccacaaggcctgcgtgagccagctgaacggcatggtgttctgcccccactgcggcgaggacgccagcgaggcccaggaggtgaccatccccagaggcgacggcgtgaccccccccgccggcaccgccgcccccgcccccccccccctgagccaggacgtgcccggcagagccgacaccagccagcccagcgccagaatgagaggccacggcgagcccagaagacccccctgcgaccccctggccgacaccatcgacagcagcggccccagcctgaccctgcccaacggcggctgcctgagcgccgtgggcctgcccctgggccccggcagagaggccctggagaaggccctggtgatccaggagagcgagagaagaaagaagctgagattccaccccagacagctgtacctgagcgtgaagcagggcgagctgcagaaggtgatcctgatgctgctggacaacctggaccccaacttccagagcgaccagcagagcaagagaacccccctgcacgccgccgcccagaagggcagcgtggagatctgccacgtgctgctgcaggccggcgccaacatcaacgccgtggacaagcagcagagaacccccctgatggaggccgtggtgaacaaccacctggaggtggccagatacatggtgcagagaggcggctgcgtgtacagcaaggaggaggacggcagcacctgcctgcaccacgccgccaagatcggcaacctggagatggtgagcctgctgctgagcaccggccaggtggacgtgaacgcccaggacagcggcggctggacccccatcatctgggccgccgagcacaagcacatcgaggtgatcagaatgctgctgaccagaggcgccgacgtgaccctgaccgacaacgaggagaacatctgcctgcactgggccagcttcaccggcagcgccgccatcgccgaggtgctgctgaacgccagatgcgacctgcacgccgtgaactaccacggcgacacccccctgcacatcgccgccagagagagctaccacgactgcgtgctgctgttcctgagcagaggcgccaaccccgagctgagaaacaaggagggcgacaccgcctgggacctgacccccgagagaagcgacgtgtggttcgccctgcagctgaacagaaagctgagactgggcgtgggcaacagagccatcagaaccgagaagatcatctgcagagacgtggccagaggctacgagaacgtgcccatcccctgcgtgaacggcgtggacggcgagccctgccccgaggactacaagtacatcagcgagaactgcgagaccagcaccatgaacatcgacagaaacatcacccacctgcagcactgcacctgcgtggacgactgcagcagcagcaactgcctgtgcggccagctgagcatcagatgctggtacgacaaggacggcagactgctgcaggagttcaacaagatcgagccccccctgatcttcgagtgcaaccaggcctgcagctgctggagaaactgcaagaacagagtggtgcagagcggcatcaaggtgagactgcagctgtacagaaccgccaagatgggctggggcgtgagagccctgcagaccatcccccagggcaccttcatctgcgagtacgtgggcgagctgatcagcgacgccgaggccgacgtgagagaggacgacagctacctgttcgacctggacaacaaggacggcgaggtgtactgcatcgacgccagatactacggcaacatcagcagattcatcaaccacctgtgcgaccccaacatcatccccgtgagagtgttcatgctgcaccaggacctgagattccccagaatcgccttcttcagcagcagagacatcagaaccggcgaggagctgggcttcgactacggcgacagattctgggacatcaagagcaagtacttcacctgccagtgcggcagcgagaagtgcaagcacagcgccgaggccatcgccctggagcagagcagactggccagactggacccccaccccgagctgctgcccgagctgggcagcctgccccccgtgaacacctag

SEQ ID NO: 108196 - DNA, 4047 bp, Artificial Sequence
  derived and/or modified sequence
ctcttctctcggccccagagatgcggggtctaccgagagggagggggttgatgcgggcccgggggaggggtcgtgcggcccctccgggcagccgaggccgcggaaggggggggccccacagaggaagaggtaggccccggagcctactctctcttcccagggcccaggcatcctggaccccccaactctctactgggctgaccagccctcctgtcccttgtctcccctcccagggggaggcccccgctgagatgggggcgctgctgctggagaaggaaaccagaggagccaccgagagagttcatggctctttgggggacacccctcgtagtgaagaaaccctgcccaaggccacccccgactccctggagcctgctggcccctcatctccagcctctgtcactgtcactgttggtgatgagggggctgacacccctgtaggggctacaccactcattggggatgaatctgagaatcttgagggagatggggacctccgtgggggccggatcctgctgggccatgccacaaagtcattcccctcttcccccagcaaggggggttcctgtcctagccgggccaagatgtcaatgacaggggcgggaaaatcacctccatctgtccagagtttggctatgaggctactgagtatgccaggagcccagggagctgcagcagcagggtctgaaccccctccagccaccacgagcccagagggacagcccaaggtccaccgagcccgcaaaaccatgtccaaaccaggaaatggacagcccccggtccctgagaagcggccccctgaaatacagcatttccgcatgagtgatgatgtccactcactgggaaaggtgacctcagatctggccaaaaggaggaagctgaactcaggaggtggcctgtcagaggagttaggttctgcccggcgttcaggagaagtgaccctgacgaaaggggaccccgggtccctggaggagtgggagacggtggtgggtgatgacttcagtctctactatgattcctactctgtggatgagcgcgtggactccgacagcaagtctgaagttgaagctctaactgaacaactaagtgaagaggaggaggaggaagaggaggaagaagaagaagaggaagaggaggaggaagaggaagaagaagaggaagatgaggagtcagggaatcagtcagataggagtggttccagtggccggcgcaaggccaagaagaaatggcgaaaagacagcccatgggtgaagccgtctcggaaacggcgcaagcgggagcctccgcgggccaaggagccacgaggggtgtccaatgacacatcttcgctggagacagagcgagggtttgaggagttgcccctgtgcagctgccgcatggaggcacccaagattgaccgcatcagcgagagggcggggcacaagtgcatggccactgagagtgtggacggagagctgtcaggctgcaatgccgccatcctcaagcgggagaccatgaggccatccagccgtgtggccctgatggtgctctgtgagacccaccgcgcccgcatggtcaaacaccactgctgcccgggctgcggctacttctgcacggcgggcaccttcctggagtgccaccctgacttccgtgtggcccaccgcttccacaaggcctgtgtgtctcagctgaatgggatggtcttctgtccccactgtggggaggatgcttctgaagctcaagaggtgaccatcccccggggtgacggggtgaccccaccggccggcactgcagctcctgcacccccacccctgtcccaggatgtccccgggagagcagacacttctcagcccagtgcccggatgcgagggcatggggaaccccggcgcccgccctgcgatcccctggctgacaccattgacagctcagggccctccctgaccctgcccaatgggggctgcctttcagccgtggggctgccactggggccaggccgggaggccctggaaaaggccctggtcatccaggagtcagagaggcggaagaagctccgtttccaccctcggcagttgtacctgtccgtgaagcagggcgagctgcagaaggtgatcctgatgctgttggacaacctggaccccaacttccagagcgaccagcagagcaagcgcacgcccctgcatgcagccgcccagaagggctccgtggagatctgccatgtgctgctgcaggctggagccaacataaatgcagtggacaaacagcagcggacgccactgatggaggccgtggtgaacaaccacctggaggtagcccgttacatggtgcagcgtggtggctgtgtctatagcaaggaggaggacggttccacctgcctccaccacgcagccaaaatcgggaacttggagatggtcagcctgctgctgagcacaggacaggtggacgtcaacgcccaggacagtggggggtggacgcccatcatctgggctgcagagcacaagcacatcgaggtgatccgcatgctactgacgcggggcgccgacgtcaccctcactgacaacgaggagaacatctgcctgcactgggcctccttcacgggcagcgccgccatcgccgaagtccttctgaatgcgcgctgtgacctccatgctgtcaactaccatggggacacccccctgcacatcgcagctcgggagagctaccatgactgcgtgctgttattcctgtcacgtggggccaaccctgagctgcggaacaaagagggggacacagcatgggacctgactcccgagcgctccgacgtgtggtttgcgcttcaactcaaccgcaagctccgacttggggtgggaaatcgggccatccgcacagagaagatcatctgccgggacgtggctcggggctatgagaacgtgcccattccctgtgtcaacggtgtggatggggagccctgccctgaggattacaagtacatctcagagaactgcgagacgtccaccatgaacatcgatcgcaacatcacccacctgcagcactgcacgtgtgtggacgactgctctagctccaactgcctgtgcggccagctcagcatccggtgctggtatgacaaggatgggcgattgctccaggaatttaacaagattgagcctccgctgattttcgagtgtaaccaggcgtgctcatgctggagaaactgcaagaaccgggtcgtacagagtggcatcaaggtgcggctacagctctaccgaacagccaagatgggctggggggtccgcgccctgcagaccatcccacaggggaccttcatctgcgagtatgtcggggagctgatctctgatgctgaggctgatgtgagagaggatgattcttacctcttcgacttagacaacaaggatggagaggtgtactgcatagatgcccgttactatggcaacatcagccgcttcatcaaccacctgtgtgaccccaacatcattcccgtccgggtcttcatgctgcaccaagacctgcgatttccacgcatcgccttcttcagttcccgagacatccggactggggaggagctagggtttgactatggcgaccgcttctgggacatcaaaagcaaatatttcacctgccaatgtggctctgagaagtgcaagcactcagccgaagccattgccctggagcagagccgtctggcccgcctggacccacaccctgagctgctgcccgagctcggctccctgccccctgtcaacacatgagaacggaccacaccctctctccccagcatggatggccacagctcagccgcctcctctgccaccagctgctcgcagcccatgcctgggggtgctgccatcttctctccccaccaccctttcacacattcctgaccagagatcccagccaggccctggaggtctgacagcccctccctcccagagctggttcctccctgggagggcaacttcagggctggccaccccccgtgttccccatcctcagttgaagtttgatgaattgaagtcgggcctctatgccaactggttccttttgttctcaataaatgttgggtttggtaataaa

SEQ ID NO: 108197 - DNA, 3856 bp, Artificial Sequence
  derived and/or modified sequence
atggcggcggcggcgggagctgcagcggcggcggccgccgagggggaggcccccgctgagatgggggcgctgctgctggagaaggaaaccagaggagccaccgagagagttcatggctctttgggggacacccctcgtagtgaagaaaccctgcccaaggccacccccgactccctggagcctgctggcccctcatctccagcctctgtcactgtcactgttggtgatgagggggctgacacccctgtaggggctacaccactcattggggatgaatctgagaatcttgagggagatggggacctccgtgggggccggatcctgctgggccatgccacaaagtcattcccctcttcccccagcaaggggggttcctgtcctagccgggccaagatgtcaatgacaggggcgggaaaatcacctccatctgtccagagtttggctatgaggctactgagtatgccaggagcccagggagctgcagcagcagggtctgaaccccctccagccaccacgagcccagagggacagcccaaggtccaccgagcccgcaaaaccatgtccaaaccaggaaatggacagcccccggtccctgagaagcggccccctgaaatacagcatttccgcatgagtgatgatgtccactcactgggaaaggtgacctcagatctggccaaaaggaggaagctgaactcaggaggtggcctgtcagaggagttaggttctgcccggcgttcaggagaagtgaccctgacgaaaggggaccccgggtccctggaggagtgggagacggtggtgggtgatgacttcagtctctactatgattcctactctgtggatgagcgcgtggactccgacagcaagtctgaagttgaagctctaactgaacaactaagtgaagaggaggaggaggaagaggaggaagaagaagaagaggaagaggaggaggaagaggaagaagaagaggaagatgaggagtcagggaatcagtcagataggagtggttccagtggccggcgcaaggccaagaagaaatggcgaaaagacagcccatgggtgaagccgtctcggaaacggcgcaagcgggagcctccgcgggccaaggagccacgaggggtgtccaatgacacatcttcgctggagacagagcgagggtttgaggagttgcccctgtgcagctgccgcatggaggcacccaagattgaccgcatcagcgagagggcggggcacaagtgcatggccactgagagtgtggacggagagctgtcaggctgcaatgccgccatcctcaagcgggagaccatgaggccatccagccgtgtggccctgatggtgctctgtgagacccaccgcgcccgcatggtcaaacaccactgctgcccgggctgcggctacttctgcacggcgggcaccttcctggagtgccaccctgacttccgtgtggcccaccgcttccacaaggcctgtgtgtctcagctgaatgggatggtcttctgtccccactgtggggaggatgcttctgaagctcaagaggtgaccatcccccggggtgacggggtgaccccaccggccggcactgcagctcctgcacccccacccctgtcccaggatgtccccgggagagcagacacttctcagcccagtgcccggatgcgagggcatggggaaccccggcgcccgccctgcgatcccctggctgacaccattgacagctcagggccctccctgaccctgcccaatgggggctgcctttcagccgtggggctgccactggggccaggccgggaggccctggaaaaggccctggtcatccaggagtcagagaggcggaagaagctccgtttccaccctcggcagttgtacctgtccgtgaagcagggcgagctgcagaaggtgatcctgatgctgttggacaacctggaccccaacttccagagcgaccagcagagcaagcgcacgcccctgcatgcagccgcccagaagggctccgtggagatctgccatgtgctgctgcaggctggagccaacataaatgcagtggacaaacagcagcggacgccactgatggaggccgtggtgaacaaccacctggaggtagcccgttacatggtgcagcgtggtggctgtgtctatagcaaggaggaggacggttccacctgcctccaccacgcagccaaaatcgggaacttggagatggtcagcctgctgctgagcacaggacaggtggacgtcaacgcccaggacagtggggggtggacgcccatcatctgggctgcagagcacaagcacatcgaggtgatccgcatgctactgacgcggggcgccgacgtcaccctcactgacaacgaggagaacatctgcctgcactgggcctccttcacgggcagcgccgccatcgccgaagtccttctgaatgcgcgctgtgacctccatgctgtcaactaccatggggacacccccctgcacatcgcagctcgggagagctaccatgactgcgtgctgttattcctgtcacgtggggccaaccctgagctgcggaacaaagagggggacacagcatgggacctgactcccgagcgctccgacgtgtggtttgcgcttcaactcaaccgcaagctccgacttggggtgggaaatcgggccatccgcacagagaagatcatctgccgggacgtggctcggggctatgagaacgtgcccattccctgtgtcaacggtgtggatggggagccctgccctgaggattacaagtacatctcagagaactgcgagacgtccaccatgaacatcgatcgcaacatcacccacctgcagcactgcacgtgtgtggacgactgctctagctccaactgcctgtgcggccagctcagcatccggtgctggtatgacaaggatgggcgattgctccaggaatttaacaagattgagcctccgctgattttcgagtgtaaccaggcgtgctcatgctggagaaactgcaagaaccgggtcgtacagagtggcatcaaggtgcggctacagctctaccgaacagccaagatgggctggggggtccgcgccctgcagaccatcccacaggggaccttcatctgcgagtatgtcggggagctgatctctgatgctgaggctgatgtgagagaggatgattcttacctcttcgacttagacaacaaggatggagaggtgtactgcatagatgcccgttactatggcaacatcagccgcttcatcaaccacctgtgtgaccccaacatcattcccgtccgggtcttcatgctgcaccaagacctgcgatttccacgcatcgccttcttcagttcccgagacatccggactggggaggagctagggtttgactatggcgaccgcttctgggacatcaaaagcaaatatttcacctgccaatgtggctctgagaagtgcaagcactcagccgaagccattgccctggagcagagccgtctggcccgcctggacccacaccctgagctgctgcccgagctcggctccctgccccctgtcaacacatgagaacggaccacaccctctctccccagcatggatggccacagctcagccgcctcctctgccaccagctgctcgcagcccatgcctgggggtgctgccatcttctctccccaccaccctttcacacattcctgaccagagatcccagccaggccctggaggtctgacagcccctccctcccagagctggttcctccctgggagggcaacttcagggctggccaccccccgtgttccccatcctcagttgaagtttgatgaattgaagtcgggcctctatgccaactggttccttttgttctcaataaatgttgggtttggtaataaa

SEQ ID NO: 108198 - DNA, 3856 bp, Artificial Sequence
  derived and/or modified sequence
atggcggcggcggcgggagctgcagcggcggcggccgccgagggggaggcccccgctgagatgggggcgctgctgctggagaaggaaaccagaggagccaccgagagagttcatggctctttgggggacacccctcgtagtgaagaaaccctgcccaaggccacccccgactccctggagcctgctggcccctcatctccagcctctgtcactgtcactgttggtgatgagggggctgacacccctgtaggggctacaccactcattggggatgaatctgagaatcttgagggagatggggacctccgtgggggccggatcctgctgggccatgccacaaagtcattcccctcttcccccagcaaggggggttcctgtcctagccgggccaagatgtcaatgacaggggcgggaaaatcacctccatctgtccagagtttggctatgaggctactgagtatgccaggagcccagggagctgcagcagcagggtctgaaccccctccagccaccacgagcccagagggacagcccaaggtccaccgagcccgcaaaaccatgtccaaaccaggaaatggacagcccccggtccctgagaagcggccccctgaaatacagcatttccgcatgagtgatgatgtccactcactgggaaaggtgacctcagatctggccaaaaggaggaagctgaactcaggaggtggcctgtcggaggagttaggttctgcccggcgttcaggagaagtgaccctgacgaaaggggaccccgggtccctggaggagtgggagacggtggtgggtgatgacttcagtctctactatgattcctactctgtggatgagcgcgtggactccgacagcaagtctgaagttgaagctctaactgaacaactaagtgaagaggaggaggaggaagaggaggaagaagaagaagaggaagaggaggaggaagaggaagaagaagaggaagatgaggagtcagggaatcagtcagataggagtggttccagtggccggcgcaaggccaagaagaaatggcgaaaagacagcccatgggtgaagccgtctcggaaacggcgcaagcgggagcctccgcgggccaaggagccacgaggggtgtccaatgacacatcttcgctggagacagagcgagggtttgaggagttgcccctgtgcagctgccgcatggaggcacccaagattgaccgcatcagcgagagggcggggcacaagtgcatggccactgagagtgtggacggagagctgtcaggctgcaatgccgccatcctcaagcgggagaccatgaggccatccagccgtgtggccctgatggtgctctgtgagacccaccgcgcccgcatggtcaaacaccactgctgcccgggctgcggctacttctgcacggcgggcaccttcctggagtgccaccctgacttccgtgtggcccaccgcttccacaaggcctgtgtgtctcagctgaatgggatggtcttctgtccccactgtggggaggatgcttctgaagctcaagaggtgaccatcccccggggtgacggggtgaccccaccggccggcactgcagctcctgcacccccacccctgtcccaggatgtccccgggagagcagacacttctcagcccagtgcccggatgcgagggcatggggaaccccggcgcccgccctgcgatcccctggctgacaccattgacagctcagggccctccctgaccctgcccaatgggggctgcctttcagccgtggggctgccactggggccaggccgggaggccctggaaaaggccctggtcatccaggagtcagagaggcggaagaagctccgtttccaccctcggcagttgtacctgtccgtgaagcagggcgagctgcagaaggtgatcctgatgctgttggacaacctggaccccaacttccagagcgaccagcagagcaagcgcacgcccctgcatgcagccgcccagaagggctccgtggagatctgccatgtgctgctgcaggctggagccaacataaatgcagtggacaaacagcagcggacgccactgatggaggccgtggtgaacaaccacctggaggtagcccgttacatggtgcagcgtggtggctgtgtctatagcaaggaggaggacggttccacctgcctccaccacgcagccaaaatcgggaacttggagatggtcagcctgctgctgagcacaggacaggtggacgtcaacgcccaggacagtggggggtggacgcccatcatctgggctgcagagcacaagcacatcgaggtgatccgcatgctactgacgcggggcgccgacgtcaccctcactgacaacgaggagaacatctgcctgcactgggcctccttcacgggcagcgccgccatcgccgaagtccttctgaatgcgcgctgtgacctccatgctgtcaactaccatggggacacccccctgcacatcgcagctcgggagagctaccatgactgcgtgctgttattcctgtcacgtggggccaaccctgagctgcggaacaaagagggggacacagcatgggacctgactcccgagcgctccgacgtgtggtttgcgcttcaactcaaccgcaagctccgacttggggtgggaaatcgggccatccgcacagagaagatcatctgccgggacgtggctcggggctatgagaacgtgcccattccctgtgtcaacggtgtggatggggagccctgccctgaggattacaagtacatctcagagaactgcgagacgtccaccatgaacatcgatcgcaacatcacccacctgcagcactgcacgtgtgtggacgactgctctagctccaactgcctgtgcggccagctcagcatccggtgctggtatgacaaggatgggcgattgctccaggaatttaacaagattgagcctccgctgattttcgagtgtaaccaggcgtgctcatgctggagaaactgcaagaaccgggtcgtacagagtggcatcaaggtgcggctacagctctaccgaacagccaagatgggctggggggtccgcgccctgcagaccatcccacaggggaccttcatctgcgagtatgtcggggagctgatctctgatgctgaggctgatgtgagagaggatgattcttacctcttcgacttagacaacaaggatggagaggtgtactgcatagatgcccgttactatggcaacatcagccgcttcatcaaccacctgtgtgaccccaacatcattcccgtccgggtcttcatgctgcaccaagacctgcgatttccacgcatcgccttcttcagttcccgagacatccggactggggaggagctagggtttgactatggcgaccgcttctgggacatcaaaagcaaatatttcacctgccaatgtggctctgagaagtgcaagcactcagccgaagccattgccctggagcagagccgtctggcccgcctggacccacaccctgagctgctgcccgagctcggctccctgccccctgtcaacacatgagaacggaccacaccctctctccccagcatggatggccacagctcagccgcctcctctgccaccagctgctcgcagcccatgcctgggggtgctgccatcttctctccccaccaccctttcacacattcctgaccagagatcccagccaggccctggaggtctgacagcccctccctcccagagctggttcctccctgggagggcaacttcagggctggccaccccccgtgttccccatcctcagttgaagtttgatgaattgaagtcgggcctctatgccaactggttccttttgttctcaataaatgttgggtttggtaataaa

SEQ ID NO: 108199 - DNA, 4047 bp, Artificial Sequence
  derived and/or modified sequence
ctcttctctcggccccagagatgcggggtctaccgagagggagggggttgatgcgggcccgggggaggggtcgtgcggcccctccgggcagccgaggccgcggaaggggggggccccacagaggaagaggtaggccccggagcctactctctcttcccagggcccaggcatcctggaccccccaactctctactgggctgaccagccctcctgtcccttgtctcccctcccagggggaggcccccgctgagatgggggcgctgctgctggagaaggaaaccagaggagccaccgagagagttcatggctctttgggggacacccctcgtagtgaagaaaccctgcccaaggccacccccgactccctggagcctgctggcccctcatctccagcctctgtcactgtcactgttggtgatgagggggctgacacccctgtaggggctacaccactcattggggatgaatctgagaatcttgagggagatggggacctccgtgggggccggatcctgctgggccatgccacaaagtcattcccctcttcccccagcaaggggggttcctgtcctagccgggccaagatgtcaatgacaggggcgggaaaatcacctccatctgtccagagtttggctatgaggctactgagtatgccaggagcccagggagctgcagcagcagggtctgaaccccctccagccaccacgagcccagagggacagcccaaggtccaccgagcccgcaaaaccatgtccaaaccaggaaatggacagcccccggtccctgagaagcggccccctgaaatacagcatttccgcatgagtgatgatgtccactcactgggaaaggtgacctcagatctggccaaaaggaggaagctgaactcaggaggtggcctgtcggaggagttaggttctgcccggcgttcaggagaagtgaccctgacgaaaggggaccccgggtccctggaggagtgggagacggtggtgggtgatgacttcagtctctactatgattcctactctgtggatgagcgcgtggactccgacagcaagtctgaagttgaagctctaactgaacaactaagtgaagaggaggaggaggaagaggaggaagaagaagaagaggaagaggaggaggaagaggaagaagaagaggaagatgaggagtcagggaatcagtcagataggagtggttccagtggccggcgcaaggccaagaagaaatggcgaaaagacagcccatgggtgaagccgtctcggaaacggcgcaagcgggagcctccgcgggccaaggagccacgaggggtgtccaatgacacatcttcgctggagacagagcgagggtttgaggagttgcccctgtgcagctgccgcatggaggcacccaagattgaccgcatcagcgagagggcggggcacaagtgcatggccactgagagtgtggacggagagctgtcaggctgcaatgccgccatcctcaagcgggagaccatgaggccatccagccgtgtggccctgatggtgctctgtgagacccaccgcgcccgcatggtcaaacaccactgctgcccgggctgcggctacttctgcacggcgggcaccttcctggagtgccaccctgacttccgtgtggcccaccgcttccacaaggcctgtgtgtctcagctgaatgggatggtcttctgtccccactgtggggaggatgcttctgaagctcaagaggtgaccatcccccggggtgacggggtgaccccaccggccggcactgcagctcctgcacccccacccctgtcccaggatgtccccgggagagcagacacttctcagcccagtgcccggatgcgagggcatggggaaccccggcgcccgccctgcgatcccctggctgacaccattgacagctcagggccctccctgaccctgcccaatgggggctgcctttcagccgtggggctgccactggggccaggccgggaggccctggaaaaggccctggtcatccaggagtcagagaggcggaagaagctccgtttccaccctcggcagttgtacctgtccgtgaagcagggcgagctgcagaaggtgatcctgatgctgttggacaacctggaccccaacttccagagcgaccagcagagcaagcgcacgcccctgcatgcagccgcccagaagggctccgtggagatctgccatgtgctgctgcaggctggagccaacataaatgcagtggacaaacagcagcggacgccactgatggaggccgtggtgaacaaccacctggaggtagcccgttacatggtgcagcgtggtggctgtgtctatagcaaggaggaggacggttccacctgcctccaccacgcagccaaaatcgggaacttggagatggtcagcctgctgctgagcacaggacaggtggacgtcaacgcccaggacagtggggggtggacgcccatcatctgggctgcagagcacaagcacatcgaggtgatccgcatgctactgacgcggggcgccgacgtcaccctcactgacaacgaggagaacatctgcctgcactgggcctccttcacgggcagcgccgccatcgccgaagtccttctgaatgcgcgctgtgacctccatgctgtcaactaccatggggacacccccctgcacatcgcagctcgggagagctaccatgactgcgtgctgttattcctgtcacgtggggccaaccctgagctgcggaacaaagagggggacacagcatgggacctgactcccgagcgctccgacgtgtggtttgcgcttcaactcaaccgcaagctccgacttggggtgggaaatcgggccatccgcacagagaagatcatctgccgggacgtggctcggggctatgagaacgtgcccattccctgtgtcaacggtgtggatggggagccctgccctgaggattacaagtacatctcagagaactgcgagacgtccaccatgaacatcgatcgcaacatcacccacctgcagcactgcacgtgtgtggacgactgctctagctccaactgcctgtgcggccagctcagcatccggtgctggtatgacaaggatgggcgattgctccaggaatttaacaagattgagcctccgctgattttcgagtgtaaccaggcgtgctcatgctggagaaactgcaagaaccgggtcgtacagagtggcatcaaggtgcggctacagctctaccgaacagccaagatgggctggggggtccgcgccctgcagaccatcccacaggggaccttcatctgcgagtatgtcggggagctgatctctgatgctgaggctgatgtgagagaggatgattcttacctcttcgacttagacaacaaggatggagaggtgtactgcatagatgcccgttactatggcaacatcagccgcttcatcaaccacctgtgtgaccccaacatcattcccgtccgggtcttcatgctgcaccaagacctgcgatttccacgcatcgccttcttcagttcccgagacatccggactggggaggagctagggtttgactatggcgaccgcttctgggacatcaaaagcaaatatttcacctgccaatgtggctctgagaagtgcaagcactcagccgaagccattgccctggagcagagccgtctggcccgcctggacccacaccctgagctgctgcccgagctcggctccctgccccctgtcaacacatgagaacggaccacaccctctctccccagcatggatggccacagctcagccgcctcctctgccaccagctgctcgcagcccatgcctgggggtgctgccatcttctctccccaccaccctttcacacattcctgaccagagatcccagccaggccctggaggtctgacagcccctccctcccagagctggttcctccctgggagggcaacttcagggctggccaccccccgtgttccccatcctcagttgaagtttgatgaattgaagtcgggcctctatgccaactggttccttttgttctcaataaatgttgggtttggtaataaa

SEQ ID NO: 108200 - DNA, 4047 bp, Artificial Sequence
  derived and/or modified sequence
ctcttctctcggccccagagatgcggggtctaccgagagggagggggttgatgcgggcccgggggaggggtcgtgcggcccctccgggcagccgaggccgcggaaggggggggccccacagaggaagaggtaggccccggagcctactctctcttcccagggcccaggcatcctggaccccccaactctctactgggctgaccagccctcctgtcccttgtctcccctcccagggggaggcccccgctgagatgggggcgctgctgctggagaaggaaaccagaggagccaccgagagagttcatggctctttgggggacacccctcgtagtgaagaaaccctgcccaaggccaaccccgactccctggagcctgctggcccctcatctccagcctctgtcactgtcactgttggtgatgagggggctgacacccctgtaggggctacaccactcattggggatgaatctgagaatcttgagggagatggggacctccgtgggggccggatcctgctgggccatgccacaaagtcattcccctcttcccccagcaaggggggttcctgtcctagccgggccaagatgtcaatgacaggggcgggaaaatcacctccatctgtccagagtttggctatgaggctactgagtatgccaggagcccagggagctgcagcagcagggtctgaaccccctccagccaccacgagcccagagggacagcccaaggtccaccgagcccgcaaaaccatgtccaaaccaggaaatggacagcccccggtccctgagaagcggccccctgaaatacagcatttccgcatgagtgatgatgtccactcactgggaaaggtgacctcagatctggccaaaaggaggaagctgaactcaggaggtggcctgtcggaggagttaggttctgcccggcgttcaggagaagtgaccctgacgaaaggggaccccgggtccctggaggagtgggagacggtggtgggtgatgacttcagtctctactatgattcctactctgtggatgagcgcgtggactccgacagcaagtctgaagttgaagctctaactgaacaactaagtgaagaggaggaggaggaagaggaggaagaagaagaagaggaagaggaggaggaagaggaagaagaagaggaagatgaggagtcagggaatcagtcagataggagtggttccagtggccggcgcaaggccaagaagaaatggcgaaaagacagcccatgggtgaagccgtctcggaaacggcgcaagcgggagcctccgcgggccaaggagccacgaggggtgtccaatgacacatcttcgctggagacagagcgagggtttgaggagttgcccctgtgcagctgccgcatggaggcacccaagattgaccgcatcagcgagagggcggggcacaagtgcatggccactgagagtgtggacggagagctgtcaggctgcaatgccgccatcctcaagcgggagaccatgaggccatccagccgtgtggccctgatggtgctctgtgagacccaccgcgcccgcatggtcaaacaccactgctgcccgggctgcggctacttctgcacggcgggcaccttcctggagtgccaccctgacttccgtgtggcccaccgcttccacaaggcctgtgtgtctcagctgaatgggatggtcttctgtccccactgtggggaggatgcttctgaagctcaagaggtgaccatcccccggggtgacggggtgaccccaccggccggcactgcagctcctgcacccccacccctgtcccaggatgtccccgggagagcagacacttctcagcccagtgcccggatgcgagggcatggggaaccccggcgcccgccctgcgatcccctggctgacaccattgacagctcagggccctccctgaccctgcccaatgggggctgcctttcagccgtggggctgccactggggccaggccgggaggccctggaaaaggccctggtcatccaggagtcagagaggcggaagaagctccgtttccaccctcggcagttgtacctgtccgtgaagcagggcgagctgcagaaggtgatcctgatgctgttggacaacctggaccccaacttccagagcgaccagcagagcaagcgcacgcccctgcatgcagccgcccagaagggctccgtggagatctgccatgtgctgctgcaggctggagccaacataaatgcagtggacaaacagcagcggacgccactgatggaggccgtggtgaacaaccacctggaggtagcccgttacatggtgcagcgtggtggctgtgtctatagcaaggaggaggacggttccacctgcctccaccacgcagccaaaatcgggaacttggagatggtcagcctgctgctgagcacaggacaggtggacgtcaacgcccaggacagtggggggtggacgcccatcatctgggctgcagagcacaagcacatcgaggtgatccgcatgctactgacgcggggcgccgacgtcaccctcactgacaacgaggagaacatctgcctgcactgggcctccttcacgggcagcgccgccatcgccgaagtccttctgaatgcgcgctgtgacctccatgctgtcaactaccatggggacacccccctgcacatcgcagctcgggagagctaccatgactgcgtgctgttattcctgtcacgtggggccaaccctgagctgcggaacaaagagggggacacagcatgggacctgactcccgagcgctccgacgtgtggtttgcgcttcaactcaaccgcaagctccgacttggggtgggaaatcgggccatccgcacagagaagatcatctgccgggacgtggctcggggctatgagaacgtgcccattccctgtgtcaacggtgtggatggggagccctgccctgaggattacaagtacatctcagagaactgcgagacgtccaccatgaacatcgatcgcaacatcacccacctgcagcactgcacgtgtgtggacgactgctctagctccaactgcctgtgcggccagctcagcatccggtgctggtatgacaaggatgggcgattgctccaggaatttaacaagattgagcctccgctgattttcgagtgtaaccaggcgtgctcatgctggagaaactgcaagaaccgggtcgtacagagtggcatcaaggtgcggctacagctctaccgaacagccaagatgggctggggggtccgcgccctgcagaccatcccacaggggaccttcatctgcgagtatgtcggggagctgatctctgatgctgaggctgatgtgagagaggatgattcttacctcttcgacttagacaacaaggatggagaggtgtactgcatagatgcccgttactatggcaacatcagccgcttcatcaaccacctgtgtgaccccaacatcattcccgtccgggtcttcatgctgcaccaagacctgcgatttccacgcatcgccttcttcagttcccgagacatccggactggggaggagctagggtttgactatggcgaccgcttctgggacatcaaaagcaaatatttcacctgccaatgtggctctgagaagtgcaagcactcagccgaagccattgccctggagcagagccgtctggcccgcctggacccacaccctgagctgctgcccgagctcggctccctgccccctgtcaacacatgagaacggaccacaccctctctccccagcatggatggccacagctcagccgcctcctctgccaccagctgctcgcagcccatgcctgggggtgctgccatcttctctccccaccaccctttcacacattcctgaccagagatcccagccaggccctggaggtctgacagcccctccctcccagagctggttcctccctgggagggcaacttcagggctggccaccccccgtgttccccatcctcagttgaagtttgatgaattgaagtcgggcctctatgccaactggttccttttgttctcaataaatgttgggtttggtaataaa

SEQ ID NO: 108201 - DNA, 2992 bp, Artificial Sequence
  derived and/or modified sequence
tctgaagttgaagctctaactgaacaactaagtgaagaggaggaggaggaagaggaggaagaagaagaagaggaagaggaggaggaagaggaagaagaagaggaagatgaggagtcagggaatcagtcagataggagtggttccagtggccggcgcaaggccaagaagaaatggcgaaaagacagcccatgggtgaagccgtctcggaaacggcgcaagcgggagcctccgcgggccaaggagccacgaggggtgtccaatgacacatcttcgctggagacagagcgagggtttgaggagttgcccctgtgcagctgccgcatggaggcacccaagattgaccgcatcagcgagagggcggggcacaagtgcatggccactgagagtgtggacggagagctgtcaggctgcaatgccgccatcctcaagcgggagaccatgaggccatccagccgtgtggccctgatggtgctctgtgagacccaccgcgcccgcatggtcaaacaccactgctgcccgggctgcggctacttctgcacggcgggcaccttcctggagtgccaccctgacttccgtgtggcccaccgcttccacaaggcctgtgtgtctcagctgaatgggatggtcttctgtccccactgtggggaggatgcttctgaagctcaagaggtgaccatcccccggggtgacggggtgaccccaccggccggcactgcagctcctgcacccccacccctgtcccaggatgtccccgggagagcagacacttctcagcccagtgcccggatgcgagggcatggggaaccccggcgcccgccctgcgatcccctggctgacaccattgacagctcagggccctccctgaccctgcccaatgggggctgcctttcagccgtggggctgccactggggccaggccgggaggccctggaaaaggccctggtcatccaggagtcagagaggcggaagaagctccgtttccaccctcggcagttgtacctgtccgtgaagcagggcgagctgcagaaggtgatcctgatgctgttggacaacctggaccccaacttccagagcgaccagcagagcaagcgcacgcccctgcatgcagccgcccagaagggctccgtggagatctgccatgtgctgctgcaggctggagccaacataaatgcagtggacaaacagcagcggacgccactgatggaggccgtggtgaacaaccacctggaggtagcccgttacatggtgcagcgtggtggctgtgtctatagcaaggaggaggacggttccacctgcctccaccacgcagccaaaatcgggaacttggagatggtcagcctgctgctgagcacaggacaggtggacgtcaacgcccaggacagtggggggtggacgcccatcatctgggctgcagagcacaagcacatcgaggtgatccgcatgctactgacgcggggcgccgacgtcaccctcactgacaacgaggagaacatctgcctgcactgggcctccttcacgggcagcgccgccatcgccgaagtccttctgaatgcgcgctgtgacctccatgctgtcaactaccatggggacacccccctgcacatcgcagctcgggagagctaccatgactgcgtgctgttattcctgtcacgtggggccaaccctgagctgcggaacaaagagggggacacagcatgggacctgactcccgagcgctccgacgtgtggtttgcgcttcaactcaaccgcaagctccgacttggggtgggaaatcgggccatccgcacagagaagatcatctgccgggacgtggctcggggctatgagaacgtgcccattccctgtgtcaacggtgtggatggggagccctgccctgaggattacaagtacatctcagagaactgcgagacgtccaccatgaacatcgatcgcaacatcacccacctgcagcactgcacgtgtgtggacgactgctctagctccaactgcctgtgcggccagctcagcatccggtgctggtatgacaaggatgggcgattgctccaggaatttaacaagattgagcctccgctgattttcgagtgtaaccaggcgtgctcatgctggagaaactgcaagaaccgggtcgtacagagtggcatcaaggtgcggctacagctctaccgaacagccaagatgggctggggggtccgcgccctgcagaccatcccacaggggaccttcatctgcgagtatgtcggggagctgatctctgatgctgaggctgatgtgagagaggatgattcttacctcttcgacttagacaacaaggatggagaggtgtactgcatagatgcccgttactatggcaacatcagccgcttcatcaaccacctgtgtgaccccaacatcattcccgtccgggtcttcatgctgcaccaagacctgcgatttccacgcatcgccttcttcagttcccgagacatccggactggggaggagctagggtttgactatggcgaccgcttctgggacatcaaaagcaaatatttcacctgccaatgtggctctgagaagtgcaagcactcagccgaagccattgccctggagcagagccgtctggcccgcctggacccacaccctgagctgctgcccgagctcggctccctgccccctgtcaacacatgagaacggaccacaccctctctccccagcatggatggccacagctcagccgcctcctctgccaccagctgctcgcagcccatgcctgggggtgctgccatcttctctccccaccaccctttcacacattcctgaccagagatcccagccaggccctggaggtctgacagcccctccctcccagagctggttcctccctgggagggcaacttcagggctggccaccccccgtgttccccatcctcagttgaagtttgatgaattgaagtcgggcctctatgccaactggttccttttgttctcaataaatgttgggtttggtaataaa

SEQ ID NO: 108202 - DNA, 3856 bp, Artificial Sequence
  derived and/or modified sequence
atggcggcggcggcgggagctgcagcggcggcggccgccgagggggaggcccccgctgagatgggggcgctgctgctggagaaggaaaccagaggagccaccgagagagttcatggctctttgggggacacccctcgtagtgaagaaaccctgcccaaggccaaccccgactccctggagcctgctggcccctcatctccagcctctgtcactgtcactgttggtgatgagggggctgacacccctgtaggggctacaccactcattggggatgaatctgagaatcttgagggagatggggacctccgtgggggccggatcctgctgggccatgccacaaagtcattcccctcttcccccagcaaggggggttcctgtcctagccgggccaagatgtcaatgacaggggcgggaaaatcacctccatctgtccagagtttggctatgaggctactgagtatgccaggagcccagggagctgcagcagcagggtctgaaccccctccagccaccacgagcccagagggacagcccaaggtccaccgagcccgcaaaaccatgtccaaaccaggaaatggacagcccccggtccctgagaagcggccccctgaaatacagcatttccgcatgagtgatgatgtccactcactgggaaaggtgacctcagatctggccaaaaggaggaagctgaactcaggaggtggcctgtcggaggagttaggttctgcccggcgttcaggagaagtgaccctgacgaaaggggaccccgggtccctggaggagtgggagacggtggtgggtgatgacttcagtctctactatgattcctactctgtggatgagcgcgtggactccgacagcaagtctgaagttgaagctctaactgaacaactaagtgaagaggaggaggaggaagaggaggaagaagaagaagaggaagaggaggaggaagaggaagaagaagaggaagatgaggagtcagggaatcagtcagataggagtggttccagtggccggcgcaaggccaagaagaaatggcgaaaagacagcccatgggtgaagccgtctcggaaacggcgcaagcgggagcctccgcgggccaaggagccacgaggggtgtccaatgacacatcttcgctggagacagagcgagggtttgaggagttgcccctgtgcagctgccgcatggaggcacccaagattgaccgcatcagcgagagggcggggcacaagtgcatggccactgagagtgtggacggagagctgtcaggctgcaatgccgccatcctcaagcgggagaccatgaggccatccagccgtgtggccctgatggtgctctgtgagacccaccgcgcccgcatggtcaaacaccactgctgcccgggctgcggctacttctgcacggcgggcaccttcctggagtgccaccctgacttccgtgtggcccaccgcttccacaaggcctgtgtgtctcagctgaatgggatggtcttctgtccccactgtggggaggatgcttctgaagctcaagaggtgaccatcccccggggtgacggggtgaccccaccggccggcactgcagctcctgcacccccacccctgtcccaggatgtccccgggagagcagacacttctcagcccagtgcccggatgcgagggcatggggaaccccggcgcccgccctgcgatcccctggctgacaccattgacagctcagggccctccctgaccctgcccaatgggggctgcctttcagccgtggggctgccactggggccaggccgggaggccctggaaaaggccctggtcatccaggagtcagagaggcggaagaagctccgtttccaccctcggcagttgtacctgtccgtgaagcagggcgagctgcagaaggtgatcctgatgctgttggacaacctggaccccaacttccagagcgaccagcagagcaagcgcacgcccctgcatgcagccgcccagaagggctccgtggagatctgccatgtgctgctgcaggctggagccaacataaatgcagtggacaaacagcagcggacgccactgatggaggccgtggtgaacaaccacctggaggtagcccgttacatggtgcagcgtggtggctgtgtctatagcaaggaggaggacggttccacctgcctccaccacgcagccaaaatcgggaacttggagatggtcagcctgctgctgagcacaggacaggtggacgtcaacgcccaggacagtggggggtggacgcccatcatctgggctgcagagcacaagcacatcgaggtgatccgcatgctactgacgcggggcgccgacgtcaccctcactgacaacgaggagaacatctgcctgcactgggcctccttcacgggcagcgccgccatcgccgaagtccttctgaatgcgcgctgtgacctccatgctgtcaactaccatggggacacccccctgcacatcgcagctcgggagagctaccatgactgcgtgctgttattcctgtcacgtggggccaaccctgagctgcggaacaaagagggggacacagcatgggacctgactcccgagcgctccgacgtgtggtttgcgcttcaactcaaccgcaagctccgacttggggtgggaaatcgggccatccgcacagagaagatcatctgccgggacgtggctcggggctatgagaacgtgcccattccctgtgtcaacggtgtggatggggagccctgccctgaggattacaagtacatctcagagaactgcgagacgtccaccatgaacatcgatcgcaacatcacccacctgcagcactgcacgtgtgtggacgactgctctagctccaactgcctgtgcggccagctcagcatccggtgctggtatgacaaggatgggcgattgctccaggaatttaacaagattgagcctccgctgattttcgagtgtaaccaggcgtgctcatgctggagaaactgcaagaaccgggtcgtacagagtggcatcaaggtgcggctacagctctaccgaacagccaagatgggctggggggtccgcgccctgcagaccatcccacaggggaccttcatctgcgagtatgtcggggagctgatctctgatgctgaggctgatgtgagagaggatgattcttacctcttcgacttagacaacaaggatggagaggtgtactgcatagatgcccgttactatggcaacatcagccgcttcatcaaccacctgtgtgaccccaacatcattcccgtccgggtcttcatgctgcaccaagacctgcgatttccacgcatcgccttcttcagttcccgagacatccggactggggaggagctagggtttgactatggcgaccgcttctgggacatcaaaagcaaatatttcacctgccaatgtggctctgagaagtgcaagcactcagccgaagccattgccctggagcagagccgtctggcccgcctggacccacaccctgagctgctgcccgagctcggctccctgccccctgtcaacacatgagaacggaccacaccctctctccccagcatggatggccacagctcagccgcctcctctgccaccagctgctcgcagcccatgcctgggggtgctgccatcttctctccccaccaccctttcacacattcctgaccagagatcccagccaggccctggaggtctgacagcccctccctcccagagctggttcctccctgggagggcaacttcagggctggccaccccccgtgttccccatcctcagttgaagtttgatgaattgaagtcgggcctctatgccaactggttccttttgttctcaataaatgttgggtttggtaataaa

SEQ ID NO: 108203 - protein, 84 aa, Artificial Sequence
  derived and/or modified sequence
MKVKIKCWNGVATWLWVANDENCGICRMAFNGCCPDCKVPGDDCPLVWGQCSHCFHMHCILKWLHAQQVQQHCPMCRQEWKFKE

SEQ ID NO: 108204 - DNA, 255 bp, Artificial Sequence
  derived and/or modified sequence
atgaaggtgaagatcaagtgctggaacggcgtggccacctggctgtgggtggccaacgacgagaactgcggcatctgcagaatggccttcaacggctgctgccccgactgcaaggtgcccggcgacgactgccccctggtgtggggccagtgcagccactgcttccacatgcactgcatcctgaagtggctgcacgcccagcaggtgcagcagcactgccccatgtgcagacaggagtggaagttcaaggagtag

SEQ ID NO: 108205 - DNA, 892 bp, Artificial Sequence
  derived and/or modified sequence
gtgcgcactggcgtgcgagactcggcgggcgctgttgagggagtcgggccgcgactgtggtcgtttttataccttcccgcgcggacgccggcgctgccaacggaagggcgggtagggcggtgcgtgattaggttggcgaagagacggagtttcgtcatgttggccaggcccatttgagatctttgaagatatcctcaacgtgaggctctgctgccatgaaggtgaagattaagtgctggaacggcgtggccacttggctctgggtggccaacgatgagaactgtggcatctgcaggatggcatttaacggatgctgccctgactgcaaggtgcccggcgacgactgcccgctggtgtggggccagtgctcccactgcttccacatgcattgcatcctcaagtggctgcacgcacagcaggtgcagcagcactgccccatgtgccgccaggaatggaagttcaaggagtgaggcccgacctggctctcgctggaggggcatcctgagactccttcctcatgctggcgccgatggctgctggggacagcgcccctgagctgcaacaaggtggaaacaagggctggagctgcgtttgttttgccatcactatgttgacacttttatccaataagtgaaaactcattaaactactcaaatcttgctggaggcctctgggtgcctgtgttctcggcatatagatgtggtctcggtgtgttttgatatgaaaactctcatgaataaacatctccgtgaaacgccaaggccctcgtcaaaccctgagtcatgactgggaggagaaggagcaggatcagacggtagagcctggggcatgctcttcaggcatgctcttgcctgctggattgccggcggcggccctgggaccctccctcagg

SEQ ID NO: 108206 - DNA, 255 bp, Artificial Sequence
  derived and/or modified sequence
atgaaagtaaaaattaaatgttggaatggcgtggcaacgtggttatgggttgccaacgacgagaactgtggtatatgcagaatggcgtttaatggatgttgccctgattgtaaagttcctggcgacgactgcccgctcgtgtggggccagtgcagccactgctttcacatgcattgcattctgaaatggctgcatgcccagcaagttcaacaacactgccccatgtgtagacaagaatggaagttcaaggaatag

SEQ ID NO: 108207 - DNA, 255 bp, Artificial Sequence
  derived and/or modified sequence
atgaaggtgaaaattaagtgctggaatggagtggccacctggctctgggtggccaacgacgagaactgtggtatttgtaggatggctttcaatggctgttgtccagattgcaaggtccccggcgatgattgcccattagtctggggacaatgtagtcactgtttccacatgcactgtatattgaaatggttgcatgcccagcaggtgcagcaacactgtccaatgtgtagacaggagtggaagtttaaagagtag

SEQ ID NO: 108208 - DNA, 255 bp, Artificial Sequence
  derived and/or modified sequence
atgaaggtgaagatcaagtgctggaatggagtggccacctggctgtgggtggccaatgatgagaactgtggcatctgcaggatggccttcaacggctgctgcccagactgcaaggtgcctggagatgactgccccctggtgtggggccagtgcagccactgcttccacatgcactgcatcctgaagtggctgcacgcccagcaggtgcagcagcactgccccatgtgccggcaggagtggaagttcaaggagtag

SEQ ID NO: 108209 - DNA, 916 bp, Artificial Sequence
  derived and/or modified sequence
gatcggccagggctgggggcgctgggggcgctacgggcgcggcgggtgcctgggagctgctgggagtccttgtttccgctcccgcccaggactgtgcgctcggctcgcggtggggtccggcgggcgcggcttcggcgggcggcagccgctgcagacgagctgcggagacggagtttcgtcatgttggccaggcccatttgagatctttgaagatatcctcaacgtgaggctctgctgccatgaaggtgaagattaagtgctggaacggcgtggccacttggctctgggtggccaacgatgagaactgtggcatctgcaggatggcatttaacggatgctgccctgactgcaaggtgcccggcgacgactgcccgctggtgtggggccagtgctcccactgcttccacatgcattgcatcctcaagtggctgcacgcacagcaggtgcagcagcactgccccatgtgccgccaggaatggaagttcaaggagtgaggcccgacctggctctcgctggaggggcatcctgagactccttcctcatgctggcgccgatggctgctggggacagcgcccctgagctgcaacaaggtggaaacaagggctggagctgcgtttgttttgccatcactatgttgacacttttatccaataagtgaaaactcattaaactactcaaatcttgctggaggcctctgggtgcctgtgttctcggcatatagatgtggtctcggtgtgttttgatatgaaaactctcatgaataaacatctccgtgaaacgccaaggccctcgtcaaaccctgagtcatgactgggaggagaaggagcaggatcagacggtagagcctggggcatgctcttcaggcatgctcttgcctgctggattgccggcggcggccctgggaccctccctcagg

SEQ ID NO: 108210 - DNA, 255 bp, Artificial Sequence
  derived and/or modified sequence
atgaaggtgaagatcaagtgctggaacggcgtggccacctggctgtgggtagcaaatgacgaaaattgtggaatctgtcgcatggcatttaatggttgctgtcccgactgcaaggtgcccggggatgactgtcccctggtgtggggtcaatgctcgcattgttttcatatgcactgtatcttgaaatggctccacgctcagcaagtgcagcagcattgccctatgtgccggcaggagtggaagttcaaggaatag

SEQ ID NO: 108211 - DNA, 255 bp, Artificial Sequence
  derived and/or modified sequence
atgaaggtgaagatcaagtgctggaacggcgtggccacctggctgtgggtggccaacgatgagaattgtggcatttgtcgaatggcgttcaatggctgctgtcctgactgcaaggtgccgggagatgattgccctctggtttggggacaatgcagtcattgcttccatatgcactgcattctcaagtggctccatgcacagcaggtccagcagcactgtccaatgtgcaggcaggagtggaaattcaaagaatag

SEQ ID NO: 108212 - DNA, 255 bp, Artificial Sequence
  derived and/or modified sequence
atgaaagtgaagattaaatgttggaacggcgtggctacctggctatgggtggcaaacgatgaaaactgtggcatttgcagaatggcctttaacggctgctgccctgactgcaaggtacccggagacgattgtcccctggtctggggccagtgttctcattgtttccacatgcactgtatactgaaatggctgcacgcccagcaggtgcagcaacactgtcccatgtgcagacaggaatggaagtttaaagaatag

SEQ ID NO: 108213 - DNA, 255 bp, Artificial Sequence
  derived and/or modified sequence
atgaaagtgaagatcaaatgttggaatggagtcgctacatggctgtgggtggctaacgacgaaaattgtgggatttgcagaatggccttcaatggctgttgtccagactgcaaggtgcccggtgatgactgcccgctggtgtggggccagtgttcccattgcttccacatgcactgtatcttaaagtggctacatgcccaacaggtgcagcagcattgcccaatgtgcaggcaggaatggaagtttaaggaatag

SEQ ID NO: 108214 - DNA, 375 bp, Artificial Sequence
  derived and/or modified sequence
ggcggaaggtggcctccagctgactgcgggtgctgctgtagaagctgtcgctcctgccgcagctgtcggtgtcgccgatgggttggacgccgctccttgagtgttagaccgccgcgaggtggatccctgctggggccccgaccaagtagagcccacccttgccctcacaggtggcgctgggcctcacgcactgcagccgctacgccacggacatccgcaagacctcgccccgcaggcgcggcctgtgggacttgggcctgcacaccaaggagtctgcacccgcctacaatgaagttatccaggtggccctcccccgagcgaaaagatcagcatagtccccggaatcctgccctgtctctcgggccaagagcgtag

SEQ ID NO: 108215 - DNA, 2709 bp, Artificial Sequence
  derived and/or modified sequence
atgagcggccagtggttctacgaggccaaggccaagagacacagagacaagatccacggcgccgacatcatcagagccagcatgagaaagaagagaccccagatcgccgccgagcagagcaaggacagagagaacggcgccaaggagagctgggtgaacaacgtgaacaaggacgccttcctgccccccgagctggccggcgtggtggaggagcccgaggaggacgccgcccccgccagccccagcagcagcgtggtgaaccccgccagcagcgtgatcgacatgagccaggagaacaccagaaagcccaacgtgagccccgagaagagaaagaaccccttcaacagcagcaagctgcccgagggccacagcagccagcagaccaagaacgagcagagcaagaacggcagaaccggcctgttccagaccagcaaggaggacgagctgagcgagagcaaggagaagagcaccgtggccgacaccagcatccagaagctggagaagagcaagcagaccctgcccggcctgagcaacggcagccagatcaaggcccccatccccaaggccagaaagatgatctacaagagcaccgacctgaacaaggacgacaaccagagcttccccagacagagaaccgacagcctgaaggccagaggcgcccccagaggcatcctgaagagaaacagcagcagcagcagcaccgacagcgagaccctgagatacaaccacaacttcgagcccaagagcaagatcgtgagccccggcctgaccatccacgagagaatcagcgagaaggagcacagcctggaggacaacagcagccccaacagcctggagcccctgaagcacgtgagattcagcgccgtgaaggacgagctgccccagagccccggcctgatccacggcagagaggtgggcgagttcagcgtgctggagagcgacagactgaagaacggcatggaggacgccggcgacaccgaggagttccagagcgaccccaagcccagccagtacagaaagcccagcctgttccaccagagcaccagcagcccctacgtgagcaagagcgagacccaccagcccatgaccagcggcagcttccccatcaacggcctgcacagccacagcgaggtgctgaccgccagaccccagagcatggagaacagccccaccatcaacgagcccaaggacaagagcagcgagctgaccagactggagagcgtgctgcccagaagccccgccgacgagctgagccactgcgtggagcccgagcccagccaggtgcccggcggcagcagcagagacagacagcagggcagcgaggaggagcccagccccgtgctgaagaccctggagagaagcgccgccagaaagatgcccagcaagagcctggaggacatcagcagcgacagcagcaaccaggccaaggtggacaaccagcccgaggagctggtgagaagcgccgaggacgacgagaagcccgaccagaagcccgtgaccaacgagtgcgtgcccagaatcagcaccgtgcccacccagcccgacaaccccttcagccaccccgacaagctgaagagaatgagcaagagcgtgcccgccttcctgcaggacgagagcgacgacagagagaccgacaccgccagcgagagcagctaccagctgagcagacacaagaagagccccagcagcctgaccaacctgagcagcagcagcggcatgaccagcctgagcagcgtgagcggcagcgtgatgagcgtgtacagcggcgacttcggcaacctggaggtgaagggcaacatccagttcgccatcgagtacgtggagagcctgaaggagctgcacgtgttcgtggcccagtgcaaggacctggccgccgccgacgtgaagaagcagagaagcgacccctacgtgaaggcctacctgctgcccgacaagggcaagatgggcaagaagaagaccctggtggtgaagaagaccctgaaccccgtgtacaacgagatcctgagatacaagatcgagaagcagatcctgaagacccagaagctgaacctgagcatctggcacagagacaccttcaagagaaacagcttcctgggcgaggtggagctggacctggagacctgggactgggacaacaagcagaacaagcagctgagatggtaccccctgaagagaaagaccgcccccgtggccctggaggccgagaacagaggcgagatgaagctggccctgcagtacgtgcccgagcccgtgcccggcaagaagctgcccaccaccggcgaggtgcacatctgggtgaaggagtgcctggacctgcccctgctgagaggcagccacctgaacagcttcgtgaagtgcaccatcctgcccgacaccagcagaaagagcagacagaagaccagagccgtgggcaagaccaccaaccccatcttcaaccacaccatggtgtacgacggcttcagacccgaggacctgatggaggcctgcgtggagctgaccgtgtgggaccactacaagctgaccaaccagttcctgggcggcctgagaatcggcttcggcaccggcaagagctacggcaccgaggtggactggatggacagcaccagcgaggaggtggccctgtgggagaagatggtgaacagccccaacacctggatcgaggccaccctgcccctgagaatgctgctgatcgccaagatcagcaagtag

SEQ ID NO: 108216 - DNA, 2709 bp, Artificial Sequence
  derived and/or modified sequence
atgagtggccagtggttctacgaagctaaagcaaagagacatcgtgacaagatccatggcgctgacatcatccgcgcttctatgcggaaaaaaagaccgcagatagccgcagaacaatcgaaggatcgagaaaatggagccaaggaatcatgggtgaacaatgtgaataaagacgcttttctaccaccagaactggccggggtggtggaagaacccgaagaggacgcagcacctgccagcccctcgagttccgtcgtgaaccccgcttcaagtgtcattgatatgtcgcaagagaacactagaaagcctaacgtctcccccgagaagagaaaaaatccctttaactcatcaaaactgccggagggccattcatctcagcagacaaagaacgagcagtcgaagaatggtagaactggcctgttccagactagtaaagaggacgagttaagtgagtccaaggaaaagtcaaccgtcgctgatactagtattcagaaactcgaaaaaagcaaacaaacactccctggcctgtccaatggcagccagatcaaagctccaattccgaaggctcgaaagatgatttacaagtcaacagatctaaataaagatgacaaccagtctttccctcgtcagagaacagatagcctcaaggctcgcggcgcaccccggggcattctgaaaagaaattccagtagctcttcaaccgacagcgaaactttgcggtacaaccataacttcgaacctaagtcgaaaatcgttagccctggcctgaccatccacgagagaatcagtgaaaaggagcatagcctagaagataattctagcccaaattccctggagcccctgaagcacgtgcgttttagcgctgtgaaggacgagctgcctcaaagtcccggcctaatccatggcagagaagtgggtgaattcagtgtgctggagtctgaccggctgaagaacgggatggaagatgcaggggacacagaggaattccagtccgaccctaagcccagtcagtaccgaaagccgtctctttttcaccagtccacatcaagcccctatgtttctaagagcgagacccaccagcctatgacatctggaagttttcccattaatggactccattcccactcggaagtgctgaccgccaggcctcagagtatggaaaactctcccaccatcaatgaaccaaaggataaatccagtgagctgacacgcctcgagagcgtgctcccccggtcaccagccgatgagctgtctcattgtgtggaaccggagcctagccaggtgccaggtggcagttctagggataggcaacaaggctctgaggaggaaccatcccccgtgctgaagacactggagaggagtgccgcccgcaaaatgcccagcaagtcattagaagatatttctagcgacagttcaaatcaggccaaggtggataaccaaccagaagagcttgtccgttccgccgaagatgacgaaaaacccgatcagaaaccagtaacaaatgaatgcgtgccgaggatttcaacagtacctactcaacctgataatccattctctcaccccgacaaacttaagaggatgtctaagtctgtgcctgcctttctgcaggacgagtcggatgaccgggagacggacactgccagcgagagcagctatcagctgagtagacacaaaaagtccccaagcagcctcaccaatctgagcagttcctctgggatgacttctctatccagcgtatctgggtcggtcatgtcagtttattctggcgatttcggcaacctggaggtgaaagggaacatacaattcgccatcgagtatgttgagtctcttaaagagctacatgtctttgtggcacaatgtaaagacctggccgcagccgatgtcaagaagcagaggtcggatccctacgtgaaagcctaccttctgccggacaaaggcaagatggggaagaagaaaactttggtcgttaagaaaactctgaaccccgtctacaatgaaattcttagatataagatagaaaagcagatcttgaaaacccagaaactgaatttaagtatttggcatagggacacctttaagaggaactccttcttgggtgaagtagaattagatttggaaacatgggattgggacaacaaacaaaataaacagctcaggtggtacccgttaaaacggaagaccgcaccagttgcactggaggctgaaaataggggagagatgaaactcgccctccagtatgtccccgagccagtgcctgggaaaaagctgcctaccaccggggaagtccatatctgggttaaagaatgcctggatctcccacttctacgaggcagtcacctgaattcctttgttaagtgcaccatcctgccagacacaagtcgcaagtcacgccagaagacccgggcagtggggaagaccaccaatccaatcttcaaccacacaatggtgtacgacggttttcgtccagaggacttaatggaggcttgcgttgaactgaccgtgtgggaccattacaagctgaccaaccaattcttggggggtctgaggattggctttggcacaggaaaatcctatggaacagaggttgattggatggatagtacatcagaggaagtagcgctgtgggaaaagatggttaacagtccaaacacatggatcgaagccacgctaccactcagaatgctgctgattgccaaaatctctaaatag

SEQ ID NO: 108217 - DNA, 2709 bp, Artificial Sequence
  derived and/or modified sequence
atgagcggccagtggttctatgaggccaaggccaagaggcaccgggacaagatccatggagctgacatcatccgggcctccatgaggaagaagaggccccagattgctgctgagcagagcaaggaccgggagaatggagccaaggagagctgggtgaacaacgtgaacaaggatgccttcctgcccccagagctggccggcgtggtggaggagcctgaggaggatgctgccccagccagccccagcagctctgtggtgaacccagccagctctgtgattgacatgagccaggagaacaccaggaagcccaacgtgtccccagagaagaggaagaaccccttcaacagcagcaagctgcctgagggccacagcagccagcagaccaagaatgagcagagcaagaatggaagaacaggcctcttccagaccagcaaggaggatgagctgtctgagagcaaggagaagagcacagtggccgacaccagcatccagaagctggagaagagcaagcagaccctgcccggcctgagcaatggcagccagatcaaggcccccatccccaaggccaggaagatgatctacaagagcacagacctgaacaaggatgacaaccagagcttcccccggcagaggacagacagcctgaaggcccggggggccccccggggcatcctgaagaggaacagcagcagcagcagcacagacagcgagaccctgcgctacaaccacaactttgagcccaagagcaagatcgtgtccccaggcctgaccatccacgagcgcatcagcgagaaggagcacagcctggaggacaacagcagccccaacagcctggagcccctgaagcacgtgcgcttctctgctgtgaaggatgagctgccccagagccctggcctcatccacggccgggaggtgggggagttctctgtgctggagagtgaccggctgaagaatggcatggaggatgctggggacacagaggagttccagagcgaccccaagcccagccagtacaggaagcccagcctcttccaccagagcaccagcagcccctacgtgtccaagtctgagacccaccagcccatgaccagcggcagcttccccatcaatggcctgcacagccacagcgaggtgctgacagcccggccccagagcatggagaacagccccaccatcaatgagcccaaggacaagagcagcgagctgacccggctggagagcgtgctgcccaggagccctgcagatgagctgagccactgtgtggagcctgagcccagccaggtgcctgggggcagcagccgggaccggcagcagggcagcgaggaggagcccagccctgtgctgaagaccctggagaggtctgctgccaggaagatgcccagcaagagcctggaggacatcagcagtgacagcagcaaccaggccaaggtggacaaccagcctgaggagctggtgcgctctgcagaagatgatgagaagccagaccagaagcctgtgaccaatgaatgtgtgccccgcatcagcacagtgcccacccagcctgacaaccccttcagccacccagacaagctgaagaggatgagcaagtctgtgcctgccttcctgcaggatgaaagtgatgaccgggagacagacacagccagcgagagcagctaccagctgagccgccacaagaagagccccagcagcctgaccaacctgagcagcagcagcggcatgaccagcctgagctctgtgtctggctctgtgatgtctgtgtacagcggggactttggaaacctggaggtgaagggcaacatccagtttgccatcgagtatgtggagagcctgaaggagctgcacgtgtttgtggcccagtgcaaggacctggccgctgctgatgtgaagaagcagaggagtgacccctacgtgaaggcctacctgctgcctgacaagggcaagatgggcaagaagaagaccctggtggtgaagaagaccctgaaccctgtgtacaatgagatcctgcgctacaagattgagaagcagatcctgaagacccagaagctgaacctgagcatctggcaccgggacaccttcaagaggaacagcttcctgggggaggtggagctggacctggagacctgggactgggacaacaagcagaacaagcagctgcgctggtaccccctgaagaggaagacagcccctgtggccctggaggctgaaaatagaggagagatgaagctggccctgcagtatgtgcctgagcctgtgcctgggaagaagctgcccaccactggagaggtgcacatctgggtgaaggagtgcctggacctgcccctgctgcggggcagccacctgaacagctttgtgaagtgcaccatcctgcctgacaccagcaggaagagccggcagaagaccagggctgtgggcaagaccaccaaccccatcttcaaccacaccatggtgtatgatggcttccggcctgaggacctgatggaggcctgtgtggagctgactgtgtgggaccactacaagctgaccaaccagttcctgggcggcctgcgcatcggcttcggcaccgggaagagctatggaacagaggtggactggatggacagcaccagcgaggaggtggccctgtgggagaagatggtgaacagccccaacacctggattgaggccaccctgcccctgaggatgctgctgattgccaagatcagcaagtag

SEQ ID NO: 108218 - DNA, 2709 bp, Artificial Sequence
  derived and/or modified sequence
atgagcggccagtggttctacgaggccaaggccaagcggcaccgggataaaattcacggcgccgacataattagagcctccatgaggaaaaagaggccccagattgctgccgagcagagcaaggacagggagaacggggccaaagagtcctgggtgaataatgtcaataaggatgctttcttgccaccagagctggctggagtggtggaagaaccggaagaggatgccgcccccgccagtccctcatcgtccgtggtcaatcccgcctccagcgtcatcgatatgagccaggagaatacaagaaaacccaacgtgagcccagagaaacgcaaaaatcccttcaactcctctaaactacccgaaggacacagctctcagcagacgaaaaatgaacagtccaagaacggaaggaccgggttgttccaaacatctaaagaggacgaattgtcggagtccaaggaaaagagtacagtagccgacacaagcatccagaagttggaaaagtccaaacagactctgcccgggttaagcaatggatctcagatcaaagccccgatccccaaggctcgcaagatgatctacaaatccacagatctgaataaagatgataatcagtccttccccagacagcgaaccgacagtctgaaagcacggggcgcacctcgtggtatattgaaacgcaacagcagtagctcttcaaccgattctgagaccctccgttacaaccacaattttgaaccgaagtccaagatcgtaagtccaggcctgaccatccacgagcgaatctctgagaaagagcattcactggaagataacagctcccctaatagcttagagcctcttaagcacgtccgcttctccgctgtgaaggatgaactaccacagagccccggcctcattcacggccgcgaagtgggcgaattctcagtgctcgagagtgaccgcctgaagaacggtatggaggatgcaggggatacagaggagttccagtccgaccctaagccttctcaataccgaaagccctcgctgttccaccagagcacaagttcaccatacgtcagtaagagtgaaacccaccagccaatgaccagcgggagttttcctattaatggcctgcacagccactctgaggtcctcaccgcgagaccacagtcaatggaaaacagccccacgatcaacgagcccaaagacaaatcctcggaacttacacggcttgagagcgtgctccctagatcacctgcagacgagttatcacactgcgtggagccagagccctctcaggtgccaggcgggtcctcccgggaccgacagcaaggtagcgaagaggagccttctccagtcctgaaaaccctagagcgctcagcggcccggaaaatgccctccaaatcacttgaagacataagtagcgattcctctaaccaggctaaggtggataatcaacccgaggaactggtccgctcggccgaggacgacgagaaacctgaccagaagccagtgaccaacgagtgcgttccgagaatttcaactgtgccaactcagccagacaaccccttctctcaccccgacaaactgaaacgaatgagcaaatctgtccctgcatttctgcaggacgagtccgatgatcgagagaccgacaccgccagcgagtcttcctatcaattaagtcgtcacaagaaatccccctccagcctgacaaatctgagctcttcctctggcatgacttccctcagttccgtcagcggcagcgtgatgtccgtctattcaggcgacttcggcaacctggaagtgaaaggaaacatccagttcgccattgagtatgtcgaatccctgaaagagctgcacgtgttcgtggctcagtgtaaagatttagctgcggccgatgttaagaagcagaggtcagacccctacgtaaaggcgtatttgctgcctgacaagggcaagatgggtaagaagaaaaccctcgtagtcaaaaaaacgcttaatcctgtctacaacgaaatcctgcgttataagatcgaaaagcagattctgaaaacacagaaactgaacttaagtatctggcacagagatacctttaaacgcaatagttttctgggcgaagtggagctggacttggagacttgggattgggataacaaacagaacaaacaacttcgctggtacccgctgaaacgtaagaccgccccagtcgccctcgaggcagaaaacagaggagagatgaagctggctctacaatacgtgcccgagcccgtacctgggaaaaagctgcccactaccggagaggtccatatttgggttaaggaatgtctggacctgccgctcctgcggggttcccatctgaactcatttgttaaatgcacaatcctgcccgacacatcccgaaagagccgtcagaaaacacgagctgtgggcaaaaccacaaaccccatattcaatcatacaatggtttacgacgggtttcggcctgaagacctgatggaagcctgtgtggaactgacggtctgggatcattacaagttgaccaatcagttcctgggcggtcttcgcatagggtttggaacagggaagagctacggcactgaagtggattggatggattcgacctccgaagaggtggcactttgggaaaagatggtaaactctcctaatacatggatcgaagctacacttcctctccgcatgctcctgattgccaaaattagcaaatag

SEQ ID NO: 108219 - DNA, 2709 bp, Artificial Sequence
  derived and/or modified sequence
atgtccgggcagtggttctacgaggcaaaggccaagaggcaccgggacaaaatccatggcgctgacataatcagggccagcatgagaaagaagcggccacaaatcgcagccgaacagtccaaagatagagaaaacggagcaaaggaatcttgggtcaataacgtgaacaaagacgctttcctaccacctgaactggcgggagttgtagaagagcctgaagaggatgccgctccagcctcgccttcgtcaagtgttgtgaatcccgcttcatcggtgattgatatgagccaggagaacacacggaagcctaacgtgtccccagagaagcgaaaaaatccgttcaacagctcaaagctacccgaaggccatagttctcaacaaactaagaatgaacagtcaaagaacggaagaacaggactcttccagacttccaaagaggatgaattgagcgaatctaaggagaagagcacagtggctgacacatccatccagaagctggagaaatcaaaacagaccctccccggactctccaatgggtcacagatcaaggcacccatccccaaggctcggaaaatgatttataagagcaccgatctgaacaaggatgacaatcaaagcttcccccgtcaacggacagacagccttaaagcacgcggagctcctcgcggtatcttaaagagaaactccagctccagctcaaccgactccgaaacactgaggtacaaccacaacttcgagccaaagtccaaaatcgtatcccccggactcaccatacacgagcggatctcagaaaaagagcattctcttgaagacaacagttcaccaaactccttggagcccctaaagcacgtccggttcagcgccgtaaaggatgagctgcctcagtcacccggtctcattcatggacgcgaggtgggcgaattttccgtgctagaaagtgacaggctgaagaacggaatggaggacgccggtgacacagaagaatttcagtctgacccgaaaccgtctcaataccgtaaaccaagtctgttccaccagagcacctcttccccctatgtgagtaagtcagagactcaccagcccatgacttccggttcatttccgatcaatggcctccattcgcacagcgaagtgctgactgctcgtcctcagtcgatggagaacagtccaactattaatgaacccaaggacaagagttccgaactcactagactggaatccgtcctgccacgtagccccgctgatgaactcagtcactgcgtcgaaccggagccatcccaggtgccaggcggatcctcccgcgaccgtcagcagggatcagaggaagagcctagtccggtgcttaagacattagagcgctccgctgcccgtaagatgccttcgaagtctctggaggatatcagcagcgacagctcaaatcaggccaaggtcgataatcagcccgaagaactggtgaggagtgctgaagatgacgaaaaacctgaccagaagcccgtgacaaatgagtgtgtgcctcgaataagtacagtccctacccagccggataatcccttcagccaccccgacaaactgaagcgaatgtcaaagagcgtgccagccttcttacaagacgaaagcgacgacagggagacagatacagcttcagagtcttcttatcaactttctcgacacaagaaatccccatcttcacttaccaacctgtcatcaagctccggtatgacatctctgtcgtcagtatccggctcagtgatgagtgtgtactccggggatttcgggaatctggaagtaaagggaaacatccagtttgccatcgaatatgtggagagtctcaaagagcttcacgtcttcgtcgcccaatgtaaggacctcgcagcagcagacgtgaaaaagcagaggtcagatccttacgtcaaggcttaccttctgcctgacaaagggaaaatgggtaagaaaaagacactcgtcgtcaagaaaacactgaacccagtttacaacgaaattctccgttataagatagaaaagcagatcctgaagacgcagaagttgaatctgtccatatggcatcgcgacacctttaaaagaaactctttccttggcgaggtcgagctcgacctcgaaacatgggactgggataataagcagaataagcaacttaggtggtatccattgaagcgaaagactgctccagtggccctggaggctgagaataggggggaaatgaagttggctctgcaatacgtaccagaacctgtgcccggaaagaaactgccgaccaccggagaagttcacatctgggtgaaagagtgtctcgacctgccgctgctgagaggaagccaccttaactccttcgtcaagtgtaccattttgcctgacacgtctcggaagagtcgtcagaaaacccgagctgtgggaaagaccaccaacccgatctttaatcacacgatggtttacgacggcttccgaccggaggatctgatggaggcttgtgtggagttaaccgtgtgggatcactacaaactgaccaatcagttcttgggcggactgaggatcgggttcggtaccgggaagtcgtatggaaccgaagtagactggatggactcaacttccgaggaagtcgccctctgggaaaagatggtcaatagtcccaacacttggatcgaggctacacttcctctccggatgctgcttatcgccaaaatcagcaagtag

SEQ ID NO: 108220 - DNA, 633 bp, Artificial Sequence
  derived and/or modified sequence
gcagaactctttgtaaaggcaggaagagtggagtgaattcctgggttaagttattcttctgtttgattctcaagtctcagcatttagatctctctgggcacaactggtaaaatcttaaattcaaaggaaagagtcccagaacaagggtgggaaatcgtgcctctgcttatataaataactaaatatagacagagggtgaagttgattctgaatataatggagccagaagatcttgaagcttgtcagtggatcagatgagaaaccagatcagaagccagttacaaatgaatgcgtaccaagaatgaaggtgctgaactttggcacatgacttgacaaattcttaagaactgcctaggaaagaagagagtccaggcttcagctctttttccacagtgcctacacaacctgataatccattttctcaccctgacaaactcaaaaggatgagcaagtctgttccagcatttctccaagatgagagtgatgacagagaaacagatacagcatcagaaagcagttaccagctcagcagacacaagaagagcccgagctctttaaccaatcttagcagctcctctggcatgacgtccttgtcttctgtgagtggcagtgtgatgagtgtttatagtggag

SEQ ID NO: 108221 - DNA, 2727 bp, Artificial Sequence
  derived and/or modified sequence
tttaaccattctaactttgccttgggatattgaaaattctgaatcagtgaggtatctaaataatttatattttcaaaaaataatgtttattttataattctgagtgtaaaacactatcagaaaagtaatcctcatgctcactaaacaaacctactctaagacactcaacaaccagaacagttttattattgagttgtgtacaaaaatcttgactgtccagatgaaatagtttttcagcctgcagtgtgttagtgatatatctcaaggagatgaaccaataaagtacagactttgtggtctgaagctctgttgtgaaaaaataagctaaaccaattcacactgacagtataatttgattcaagtgcagctccagttcaataaaaactaatgtttttaaaattaactttgttttgtatttggttcaactccttgctagttctctctctatataatttataaaaactgcatgttgctaatctcatgatcctgtgcatgtggactactctgcctttaacttttttacaaaaacatgtttgttcatagattaaataaaagtatgttttcaacttaatgtctaatgttttctgacaattgtaagaataattttgaaatggaaatgctgctgtttagtttccacagtgcctacacaacctgataatccattttctcaccctgacaaactcaaaaggatgagcaagtctgttccagcatttctccaagatgagagtgatgacagagaaacagatacagcatcagaaagcagttaccagctcagcagacacaagaagagcccgagctctttaaccaatcttagcagctcctctggcatgacgtccttgtcttctgtgagtggcagtgtgatgagtgtttatagtggagactttggcaatctggaagttaaaggaaatattcagtttgcaattgaatatgtggagtcactgaaggagttgcatgtttttgtggcccagtgtaaggacttagcagcagcggatgtaaaaaaacagcgttcagacccatatgtaaaggcctatttgctaccagacaaaggcaaaatgggcaagaagaaaacactcgtagtgaagaaaaccttgaatcctgtgtataacgaaatactgcggtataaaattgaaaaacaaatcttaaagacacagaaattgaacctgtccatttggcatcgggatacatttaagcgcaatagtttcctaggggaggtggaacttgatttggaaacatgggactgggataacaaacagaataaacaattgagatggtaccctctgaagcggaagacagcaccagttgcccttgaagcagaaaacagaggtgaaatgaaactagctctccagtatgtcccagagccagtccctggtaaaaagcttcctacaactggagaagtgcacatctgggtgaaggaatgccttgatctaccactgctaaggggaagtcatctaaattcttttgttaaatgtaccatccttccagatacaagtaggaaaagtcgccagaagacaagagctgtagggaaaaccaccaaccctatcttcaaccacactatggtgtatgatgggttcaggcctgaagatctgatggaagcctgtgtagagcttactgtctgggaccattacaaattaaccaaccaatttttgggaggtcttcgtattggctttggaacaggtaaaagttatgggactgaagtggactggatggactctacttcagaggaagttgctctctgggagaagatggtaaactcccccaatacttggattgaagcaacactgcctctcagaatgcttttgattgccaagatttccaaatgagcccaaattccactggctcctccactgaaaactactaaaccggtggaatctgatcttgaaaatctgagtaggtggacaaatatcctcactttctatctattgcacctaaggaatactacacagcatgtaaaagtcaatctgcatgtgcttctttgattacaaggcccaagggatttaaatataacaaaatgtgtaatttgtgactctaatattaaataagatatttgaacaagctaggaaaattgaatttctgctgctgcttcaaagaaaaagctgccccagagcattaaacatggggtattgttaagaagcaaaatgttcttgtttgccatcatgtgtttcacaccacaattctgtgccacagttaagagggtctggtacccttgcaggacctttgtaggttgtgggaaaaagtcgcagaaagatactcaaagtggagcagggaatggagacagacatcagtgatgataaaaaaaaaaatggaccttaagaaactatttactctgtaatctctaataaaatatggaattccatattagggcaatgagactgaaactactggtgtttttctgccttgagaaaacaaacagttaaaacaagcctcaaatgtattttagtgccacccactggccataggtacaattcagttgttggcttgttttgacttaattctaaaataggtctcaagcctgtatttttatgagtttatttttttaaaaccctgcatatatatgattgtttttcttataactttactatatgaaagcagcataagagtagtcacaaacatgttttgcaacaaagttttaattagaatgtaagttgctcagttatactgttcttcttatgtatgtaaaattttcgtattttgtaaaaacccttagaataaattatcatttgatttaaa

SEQ ID NO: 108222 - DNA, 711 bp, Artificial Sequence
  derived and/or modified sequence
ctcaagtctcagcatttagatctctctgggcacaactggtaaaatcttaaattcaaaggaaagagtcccagaacaagggtgggaaatcgtgcctctgcttatataaataactaaatatagacagagggtgaagttgattctgaatataatggagccagaagatcttgaagcttgtcagtggatcagtttccacagtgcctacacaacctgataatccattttctcaccctgacaaactcaaaaggatgagcaagtctgttccagcatttctccaagatgagagtgatgacagagaaacagatacagcatcagaaagcagttaccagctcagcagacacaagaagagcccgagctctttaaccaatcttagcagctcctctggcatgacgtccttgtcttctgtgagtggcagtgtgatgagtgtttatagtggagactttggcaatctggaagttaaaggaaatattcagtttgcaattgaatatgtggagtcactgaaggagttgcatgtttttgtggcccagtgtaaggacttagcagcagcggatgtaaaaaaacagcgttcagacccatatgtaaaggcctatttgctaccagacaaaggcaaaatgggcaagaagaaaacactcgtagtgaagaaaaccttgaatcctgtgtataacgaaatactgcggtataaaattgaaaaacaaatcttaaagacacagaaat

SEQ ID NO: 108223 - DNA, 1910 bp, Artificial Sequence
  derived and/or modified sequence
gtgctttctcctgctgctggccgattgcttgctctgaactaaccctctaacccttgggagtctgtgtgcagcagtgatgtgagctgcatccgggctgaaatgggagctcccgctatggcactggctcaaggagctaatctaaagagaaaatcaagcaaaagtagataatcagccagaagaattagtgcgtagtgctgaagatgatgagaaaccagatcagaagccagttacaaatgaatgcgtaccaagaatttccacagtgcctacacaacctgataatccattttctcaccctgacaaactcaaaaggatgagcaagtctgttccagcatttctccaagatgagagtgatgacagagaaacagatacagcatcagaaagcagttaccagctcagcagacacaagaagagcccgagctctttaaccaatcttagcagctcctctggcatgacgtccttgtcttctgtgagtggcagtgtgatgagtgtttatagtggagactttggcaatctggaagttaaaggaaatattcagtttgcaattgaatatgtggagtcactgaaggagttgcatgtttttgtggcccagtgtaaggacttagcagcagcggatgtaaaaaaacagcgttcagacccatatgtaaaggcctatttgctaccagacaaaggcaaaatgggcaagaagaaaacactcgtagtgaagaaaaccttgaatcctgtgtataacgaaatactgcggtataaaattgaaaaacaaatcttaaagacacagaaattgaacctgtccatttggcatcgggatacatttaagcgcaatagtttcctaggggaggtggaacttgatttggaaacatgggactgggataacaaacagaataaacaattgagatggtaccctctgaagcggaagacagcaccagttgcccttgaagcagaaaacagaggtgaaatgaaactagctctccagtatgtcccagagccagtccctggtaaaaagcttcctacaactggagaagtgcacatctgggtgaaggaatgccttgatctaccactgctaaggggaagtcatctaaattcttttgttaaatgtaccatccttccagatacaagtaggaaaagtcgccagaagacaagagctgtagggaaaaccaccaaccctatcttcaaccacactatggtgtatgatgggttcaggcctgaagatctgatggaagcctgtgtagagcttactgtctgggaccattacaaattaaccaaccaatttttgggaggtcttcgtattggctttggaacaggtaaaagttatgggactgaagtggactggatggactctacttcagaggaagttgctctctgggagaagatggtaaactcccccaatacttggattgaagcaacactgcctctcagaatgcttttgattgccaagatttccaaatgagcccaaattccactggctcctccactgaaaactactaaaccggtggaatctgatcttgaaaatctgagtaggtggacaaatatcctcactttctatctattgcacctaaggaatactacacagcatgtaaaagtcaatctgcatgtgcttctttgattacaaggcccaagggatttaaatataacaaaatgtgtaatttgtgactctaatattaaataagatatttgaacaagctaggaaaattgaatttctgctgctgcttcaaagaaaaagctgccccagagcattaaacatggggtattgttaagaagcaaaatgttcttgtttgccatcatgtgtttcacaccacaattctgtgccacagttaagagggtctggtacccttgcaggacctttgtaggttgtgggaaaaagtcgcagaaagatactcaaagtggagcagggaatggagacagacatcagtgatgat

SEQ ID NO: 108224 - DNA, 583 bp, Artificial Sequence
  derived and/or modified sequence
ataaaccctaggcactgggggtatgaagataatgatacacatgtctaccctcagggccacaatattttaaataataatttcccaacagtctttggatatgctaatagggcttaatgaggaaagcagctaaacggaggagccattagatagaaaaccaatgtgctgatggctaaaagtcagtgacatgtagtgggaaacctgaaactttgcttatgaggtcctcctgccagcagtgaaggtgctgaactttggcacatgacttgacaaattcttaagaactgcctaggaaagaagagagtccaggcttcagctctttttccacagtgcctacacaacctgataatccattttctcaccctgacaaactcaaaaggatgagcaagtctgttccagcatttctccaagatgagagtgatgacagagaaacagatacagcatcagaaagcagttaccagctcagcagacacaagaagagcccgagctctttaaccaatcttagcagctcctctggcatgacgtccttgtcttctgtgagtggcagtgtgatgagtgtttatagtggagactttggcaatctggaagt

SEQ ID NO: 108225 - protein, 335 aa, Artificial Sequence
  derived and/or modified sequence
MGKVKVGVNGFGRIGRLVTRAAFNSGKVDIVAINDPFIDLNYMVYMFQYDSTHGKFHGTVKAENGKLVINGNPITIFQERDPSKIKWGDAGAEYVVESTGVFTTMEKAGAHLQGGAKRVIISAPSADAPMFVMGVNHEKYDNSLKIISNASCTTNCLAPLAKVIHDNFGIVEGLMTTVHAITATQKTVDGPSGKLWRDGRGALQNIIPASTGAAKAVGKVIPELNGKLTGMAFRVPTANVSVVDLTCRLEKPAKYDDIKKVVKQASEGPLKGILGYTEHQVVSSDFNSDTHSSTFDAGAGIALNDHFVKLISWYDNEFGYSNRVVDLMAHMASKE

SEQ ID NO: 108226 - protein, 215 aa, Artificial Sequence
  derived and/or modified sequence
MGKVKVGVNGFGRIGRLVTRAAFNSGKVDIVAINDPFIDLNYMVYMFQYDSTHGKFHGTVKAENGKLVINGNPITIFQERDPSKIKWGDAGAEYVVESTGVFTTMEKAGAHLQGGAKRVIISAPSADAPMFVMGVNHEKYDNSLKIISNASCTTNCLAPLAKVIHDNFGIVEGLMTTVHAITATQREAHWHGLPCPHCQRVSGGPDLPSRKTCQI

SEQ ID NO: 108227 - DNA, 1008 bp, Artificial Sequence
  derived and/or modified sequence
atgggcaaggtgaaagtgggcgtgaacggatttggaaggatcggcaggctggtgacaagagccgcttttaattcaggtaaggtggatattgtggccattaacgatcctttcatagatctgaattatatggtttatatgttccagtacgactccacacatggaaagtttcatggcacagtgaaggccgaaaacggcaagctggtgattaatggtaatcctatcactattttccaggaaagagatccaagcaaaatcaagtggggggacgccggtgctgagtacgtcgtcgagtctacaggtgtgtttactacaatggagaaggctggggctcatctacagggtggcgcaaagagggtcattatcagtgctccctcagcggacgcccctatgttcgtaatgggtgtgaatcacgagaagtatgacaactctctgaagataatttcaaatgcgagctgcacgactaactgcctcgctcctcttgctaaggttatccacgataattttggcattgtcgagggacttatgaccaccgtacatgcaataaccgctactcaaaaaacagtcgatggaccaagcggaaagctgtggcgcgatggccgtggtgctttgcagaatatcatcccagcctcaaccggtgccgcaaaggccgtaggcaaggtgatccctgagttgaatggcaagctcaccggcatggccttccgggttcctactgccaatgttagcgtggttgaccttacgtgtcggctggagaagcccgctaagtatgatgacattaaaaaggtggtaaagcaggctagcgagggccctctcaaaggtatcttaggttacactgagcatcaggtcgtgtcctctgacttcaattcagacacacactctagtacctttgatgctggtgcgggtatcgcgctcaatgatcacttcgttaagctcataagttggtacgacaacgagtttggttatagcaaccgcgtggtagaccttatggcacacatggcttcaaaggagtag

SEQ ID NO: 108228 - DNA, 1008 bp, Artificial Sequence
  derived and/or modified sequence
atgggcaaggtgaaggtgggcgtgaacggcttcggcagaatcggcagactggtgaccagagccgccttcaacagcggcaaggtggacatcgtggccatcaacgaccccttcatcgacctgaactacatggtgtacatgttccagtacgacagcacccacggcaagttccacggcaccgtgaaggccgagaacggcaagctggtgatcaacggcaaccccatcaccatcttccaggagagagaccccagcaagatcaagtggggcgacgccggcgccgagtacgtggtggagagcaccggcgtgttcaccaccatggagaaggccggcgcccacctgcagggcggcgccaagagagtgatcatcagcgcccccagcgccgacgcccccatgttcgtgatgggcgtgaaccacgagaagtacgacaacagcctgaagatcatcagcaacgccagctgcaccaccaactgcctggcccccctggccaaggtgatccacgacaacttcggcatcgtggagggcctgatgaccaccgtgcacgccatcaccgccacccagaagaccgtggacggccccagcggcaagctgtggagagacggcagaggcgccctgcagaacatcatccccgccagcaccggcgccgccaaggccgtgggcaaggtgatccccgagctgaacggcaagctgaccggcatggccttcagagtgcccaccgccaacgtgagcgtggtggacctgacctgcagactggagaagcccgccaagtacgacgacatcaagaaggtggtgaagcaggccagcgagggccccctgaagggcatcctgggctacaccgagcaccaggtggtgagcagcgacttcaacagcgacacccacagcagcaccttcgacgccggcgccggcatcgccctgaacgaccacttcgtgaagctgatcagctggtacgacaacgagttcggctacagcaacagagtggtggacctgatggcccacatggccagcaaggagtag

SEQ ID NO: 108229 - DNA, 1008 bp, Artificial Sequence
  derived and/or modified sequence
atgggtaaagtgaaagtcggagtcaacggcttcggcaggattgggcgcttggtgacgcgggcagcctttaactctggcaaggtggatattgtggcaatcaacgacccatttatcgatctgaattatatggtctatatgtttcaatacgatagcactcacggtaaattccacgggaccgtcaaggccgaaaacggaaagctggtgatcaatggcaatcctattacaatcttccaagagagagatccgtccaagatcaagtggggggatgctggggcggaatacgtggtggaatccaccggagtttttactacaatggaaaaagcaggcgcccacttacagggcggggcaaagcgagtgattatttcggccccttccgccgatgcccccatgttcgtgatgggtgtgaatcacgaaaagtacgataatagtctcaagatcattagcaatgcctcatgcaccacgaattgtttggcccctctcgctaaggtgatacatgataacttcgggattgtcgaggggctgatgacgactgtgcacgcaatcactgccacgcaaaagaccgttgatggccccagcggcaagctctggagagacggtaggggggccctgcaaaacatcatcccagcctctactggcgctgcaaaagctgtgggaaaagtcatcccagagctcaacgggaaactcacgggcatggcctttcgcgttcccaccgctaatgtgagcgtagtggacttgacatgtaggctggaaaagcctgcgaagtacgatgatatcaaaaaggtggtgaaacaggccagtgaaggcccacttaagggaatcctcggttatacggaacatcaggtcgtaagcagtgatttcaacagtgatacgcactcctccacttttgacgctggggctggtattgcccttaacgatcactttgtaaagctgatttcttggtacgataatgaattcggatactccaatagggtggtcgatctgatggcccacatggctagtaaggagtag

SEQ ID NO: 108230 - DNA, 1008 bp, Artificial Sequence
  derived and/or modified sequence
atgggcaaggtgaaggtgggcgtgaatggatttggccgcatcggccgcctggtgaccagggctgccttcaacagcggcaaggtggacatcgtggccatcaatgaccccttcatcgacctgaactacatggtgtacatgttccagtatgacagcacccacggcaagttccatggaacagtgaaggcagaaaatggcaagctggtgatcaatggaaaccccatcaccatcttccaggagcgggaccccagcaagatcaagtggggagatgctggagcagaatatgtggtggagagcactggagtcttcaccaccatggagaaggccggggcccacctgcagggcggggccaagagggtcatcatcagcgcccccagcgcagatgcccccatgtttgtgatgggcgtgaaccacgagaagtatgacaacagcctgaagatcatcagcaatgccagctgcaccaccaactgcctggcccccctggccaaggtgattcatgacaactttggcatcgtggagggcctgatgaccaccgtgcacgccatcacagccacccagaagacagtggatggccccagcggcaagctgtggagagatggccgcggggccctgcagaacatcatcccagccagcactggagctgccaaggctgtgggcaaggtgattcctgagctgaatggcaagctgaccggcatggccttccgggtgcccacagccaacgtgtctgtggtggacctgacctgccgcctggagaagccagccaagtatgatgacatcaagaaggtggtgaagcaggccagcgagggccccctgaagggcatcctgggctacacagagcaccaggtggtgtccagtgacttcaacagcgacacccacagcagcacctttgatgctggagctggcatcgccctgaatgaccactttgtgaagctgatctcctggtatgacaatgaatttggctacagcaacagagtggtggacctgatggcccacatggccagcaaggagtag

SEQ ID NO: 108231 - DNA, 1008 bp, Artificial Sequence
  derived and/or modified sequence
atgggcaaggtgaaggtgggcgtgaacggcttcggccggatcggccgccttgtaacccgcgcagccttcaattctggtaaggtcgacattgtggcaataaacgatccctttatagatctcaattacatggtttacatgtttcagtacgacagcacccatgggaagttccacggcaccgtcaaggctgagaacggcaagcttgtgattaacggcaaccctattaccatttttcaagaacgagatcccagcaagataaaatggggcgatgcaggggccgaatacgtcgtggagtccacaggagtatttaccactatggaaaaggccggtgcgcacctgcaagggggagcaaagagggtgattatatccgccccatcagccgatgctccaatgtttgtaatgggcgtgaatcacgaaaagtatgacaacagtctgaaaatcatctccaatgcaagctgtaccaccaactgcttagctccattggccaaagtaattcacgacaactttggcatagtcgaaggcctcatgaccactgtccatgctattaccgccactcagaaaacagtggacggaccctctggcaagctgtggagagatggcagaggggcgctgcagaacattataccagcatccaccggggccgccaaagctgttggaaaggtgattcccgagctgaatggcaaacttactggaatggcctttcgtgtgcccacggctaacgtttctgtcgtcgatttaacctgccgattggaaaagccagccaagtacgacgacatcaaaaaggtggttaagcaggcatccgaaggccccttaaagggtatcctgggatatactgaacaccaggtagtgtcatcggattttaatagcgacactcacagcagcacttttgacgccggggccgggattgctctgaacgaccacttcgtgaaactgatctcatggtacgataatgagtttggctattctaacagggtagttgacctaatggcacatatggcaagtaaggagtag

SEQ ID NO: 108232 - DNA, 1008 bp, Artificial Sequence
  derived and/or modified sequence
atgggcaaagtaaaagtgggggtgaacggcttcggccggataggcagattggtaacaagagccgccttcaatagcggaaaggtcgacattgtcgccattaatgatccattcatcgacctcaattacatggtgtatatgttccagtacgacagtacccacgggaagttccacgggacggtgaaggccgagaatggaaagctggttataaatggaaaccctatcaccattttccaggaaagggatcccagcaagattaagtggggggatgccggagccgagtacgttgtggagtccacaggtgtatttacaacaatggagaaggccggggcccacctgcaaggcggagcaaaaagagtgataattagcgctccaagtgcagatgccccaatgttcgtcatgggcgtgaaccacgagaaatatgataactcattgaagataatcagcaacgccagctgtactactaattgtctggcacccctcgccaaagttatccacgataatttcggcatcgtcgagggcctgatgactacagtgcatgcaatcacagcaacccaaaaaacagtggatgggcccagtggaaagctgtggagagatgggcggggggccctgcagaacatcatccccgcatctaccggagccgctaaagcagttggtaaggtgattccagaactgaatgggaagctcactggaatggctttccgcgtgcctacagcgaacgtaagcgtcgtcgacctaacctgccgactggaaaagcccgccaagtatgatgatatcaagaaagtggtgaagcaagcctccgagggccctctgaaaggaatattgggatatacggagcaccaggtggtctcttctgacttcaattcagacacacactcaagcacgttcgatgcaggtgcaggcatagctctcaacgaccactttgttaagttgatttcatggtatgacaatgagtttgggtattctaatcgagtggttgatttgatggcccatatggcctctaaggaatag

SEQ ID NO: 108233 - DNA, 1008 bp, Artificial Sequence
  derived and/or modified sequence
atgggtaaggtgaaagtgggggtaaatggctttggtagaatcggacgcttggtgactcgcgccgccttcaacagcgggaaggttgatatcgtagccattaatgacccttttattgatctgaattacatggtctatatgttccagtacgattcaacgcacggtaaatttcacgggactgtgaaagccgagaacggtaagctcgttattaacggaaaccccatcactatctttcaagagcgcgatccgagcaagatcaaatggggagacgcaggggctgagtacgtggtcgaaagcactggagtgtttacaacaatggagaaggccggcgcccacctccaaggaggggcaaagcgagtcatcatcagtgccccctccgctgacgcaccaatgttcgtgatgggcgttaaccatgagaaatatgataacagtttgaagatcatttccaatgcttcttgcaccacaaattgcctcgcaccccttgctaaggtgatccatgacaattttgggattgtggagggccttatgactaccgtccacgccattacagccactcagaagaccgtagacggcccaagcggcaagttgtggagggacggccggggcgccctgcagaatataatccccgcttccacaggagcagctaaggccgtaggaaaggtgatccctgagttgaacggcaagctgaccggaatggcattccgggttccaaccgcaaacgtcagtgtagtggatttgacctgccggctggagaaacccgccaagtacgacgatatcaagaaggttgtgaagcaggcctcggagggccctctgaaaggcattcttggttatactgaacaccaggtggtgtcttcagattttaattctgacacgcactctagtacattcgatgcaggtgcgggcatcgctctgaatgaccacttcgtgaagcttatcagttggtatgataatgagttcgggtactccaacagggtagtggatctgatggcgcatatggcctcaaaggagtag

SEQ ID NO: 108234 - DNA, 648 bp, Artificial Sequence
  derived and/or modified sequence
atggggaaagtgaaggtgggggtgaatggcttcggtcggatcggccgacttgtcacacgggccgccttcaacagcggcaaagtcgatatcgtggctatcaacgatcccttcatagatctgaattatatggtttatatgttccagtacgactctacccacggaaagttccacggcacagtgaaagcagaaaacggaaagctagtcattaacggcaatcctattacaatctttcaggagcgcgacccttcgaagattaagtggggggatgctggtgcggagtacgtggtggagtctactggtgtgttcacaaccatggagaaagcgggagctcacctgcagggaggagccaaacgagttatcatttcggcgccatccgccgatgcgccaatgtttgttatgggggtgaatcacgaaaagtatgataactccctgaaaattatcagcaatgcgtcatgcaccactaattgcctcgcgccgttggcaaaagttatacatgacaacttcggcattgtcgagggcctcatgaccacggttcatgcgatcacagctacccagagagaagcacactggcatgggctgccttgtccccactgccagcgggtctcagggggcccggatctgccttcaagaaaaacatgccagatatag

SEQ ID NO: 108235 - DNA, 1875 bp, Artificial Sequence
  derived and/or modified sequence
gggggaagtgggggctgggaaggaaccacgggcccccgcccgaggcccatgggcccctcctaggcctttgcctgagcagtccggtgtcactaccgcagagcctcgaggagaagttccccaactttcccgcctctcagcctttgaaagaaagaaaggggagggggcaggccgcgtgcagccgcgagcggtgctgggctccggctccaattccccatctcagtcgttcccaaagtcctcctgtttcatccaagcgtgtaagggtccccgtccttgactccctagtgtcctgctgcccacagtccagtcctgggaaccagcaccgatcacctcccatcgggccaatctcagtcccttcccccctacgtcggggcccacacgctcggtgcgtgcccagttgaaccaggcggctgcggaaaaaaaaaagcggggagaaagtagggcccggctactagcggttttacgggcgcacgtagctcaggcctcaagaccttgggctgggactggctgagcctggcgggaggcggggtccgagtcaccgcctgccgccgcgcccccggtttctataaattgagcccgcagcctcccgcttcgctctctgctcctcctgttcgacagtcagccgcatcttcttttgcgtcgccagccgagccacatcgctcagacaccatggggaaggtgaaggtcggagtcaacggatttggtcgtattgggcgcctggtcaccagggctgcttttaactctggtaaagtggatattgttgccatcaatgaccccttcattgacctcaactacatggtttacatgttccaatatgattccacccatggcaaattccatggcaccgtcaaggctgagaacgggaagcttgtcatcaatggaaatcccatcaccatcttccaggagcgagatccctccaaaatcaagtggggcgatgctggcgctgagtacgtcgtggagtccactggcgtcttcaccaccatggagaaggctggggctcatttgcaggggggagccaaaagggtcatcatctctgccccctctgctgatgcccccatgttcgtcatgggtgtgaaccatgagaagtatgacaacagcctcaagatcatcagcaatgcctcctgcaccaccaactgcttagcacccctggccaaggtcatccatgacaactttggtatcgtggaaggactcatgaccacagtccatgccatcactgccacccagaagactgtggatggcccctccgggaaactgtggcgtgatggccgcggggctctccagaacatcatccctgcctctactggcgctgccaaggctgtgggcaaggtcatccctgagctgaacgggaagctcactggcatggccttccgtgtccccactgccaacgtgtcagtggtggacctgacctgccgtctagaaaaacctgccaaatatgatgacatcaagaaggtggtgaagcaggcgtcggagggccccctcaagggcatcctgggctacactgagcaccaggtggtctcctctgacttcaacagcgacacccactcctccacctttgacgctggggctggcattgccctcaacgaccactttgtcaagctcatttcctggtatgacaacgaatttggctacagcaacagggtggtggacctcatggcccacatggcctccaaggagtaagacccctggaccaccagccccagcaagagcacaagaggaagagagagaccctcactgctggggagtccctgccacactcagtcccccaccacactgaatctcccctcctcacagttgccatgtagaccccttgaagaggggaggggcctagggagccgcaccttgtcatgtaccatcaataaagtaccctgtgctcaacca

SEQ ID NO: 108236 - DNA, 1266 bp, Artificial Sequence
  derived and/or modified sequence
tgttcgacagtcagccgcatcttcttttgcgtcgccagccgagccacatcgctcagacaccatggggaaggtgaaggtcggagtcaacggatttggtcgtattgggcgcctggtcaccagggctgcttttaactctggtaaagtggatattgttgccatcaatgaccccttcattgacctcaactacatggtttacatgttccaatatgattccacccatggcaaattccatggcaccgtcaaggctgagaacgggaagcttgtcatcaatggaaatcccatcaccatcttccaggagtgagtggaagacagaatggaagaaatgcgagatccctccaaaatcaagtggggcgatgctggcgctgagtacgtcgtggagtccactggcgtcttcaccaccatggagaaggctggggctcatttgcaggggggagccaaaagggtcatcatctctgccccctctgctgatgcccccatgttcgtcatgggtgtgaaccatgagaagtatgacaacagcctcaagatcatcagcaatgcctcctgcaccaccaactgcttagcacccctggccaaggtcatccatgacaactttggtatcgtggaaggactcatgaccacagtccatgccatcactgccacccagaagactgtggatggcccctccgggaaactgtggcgtgatggccgcggggctctccagaacatcatccctgcctctactggcgctgccaaggctgtgggcaaggtcatccctgagctgaacgggaagctcactggcatggccttccgtgtccccactgccaacgtgtcagtggtggacctgacctgccgtctagaaaaacctgccaaatatgatgacatcaagaaggtggtgaagcaggcgtcggagggccccctcaagggcatcctgggctacactgagcaccaggtggtctcctctgacttcaacagcgacacccactcctccacctttgacgctggggctggcattgccctcaacgaccactttgtcaagctcatttcctggtatgacaacgaatttggctacagcaacagggtggtggacctcatggcccacatggcctccaaggagtaagacccctggaccaccagccccagcaagagcacaagaggaagagagagaccctcactgctggggagtccctgccacactcagtcccccaccacactgaatctcccctcctcacagttgccatgtagaccccttgaagaggggaggggcctagggagccgcaccttgtcatg

SEQ ID NO: 108237 - DNA, 1292 bp, Artificial Sequence
  derived and/or modified sequence
tgcaaccgggaaggaaatgaatgggcagccgttaggaaagcctgccggtgactaaccctgcgctcctgcctcgatgggtggagtcgcgtgtggcggggaagtcaggtggagcgaggctagctggcccgatttctcctccgggtgatgcttttcctagattattctctgatttggtcgtattgggcgcctggtcaccagggctgcttttaactctggtaaagtggatattgttgccatcaatgaccccttcattgacctcaactacatggtttacatgttccaatatgattccacccatggcaaattccatggcaccgtcaaggctgagaacgggaagcttgtcatcaatggaaatcccatcaccatcttccaggagcgagatccctccaaaatcaagtggggcgatgctggcgctgagtacgtcgtggagtccactggcgtcttcaccaccatggagaaggctggggctcatttgcaggggggagccaaaagggtcatcatctctgccccctctgctgatgcccccatgttcgtcatgggtgtgaaccatgagaagtatgacaacagcctcaagatcatcagcaatgcctcctgcaccaccaactgcttagcacccctggccaaggtcatccatgacaactttggtatcgtggaaggactcatgaccacagtccatgccatcactgccacccagaagactgtggatggcccctccgggaaactgtggcgtgatggccgcggggctctccagaacatcatccctgcctctactggcgctgccaaggctgtgggcaaggtcatccctgagctgaacgggaagctcactggcatggccttccgtgtccccactgccaacgtgtcagtggtggacctgacctgccgtctagaaaaacctgccaaatatgatgacatcaagaaggtggtgaagcaggcgtcggagggccccctcaagggcatcctgggctacactgagcaccaggtggtctcctctgacttcaacagcgacacccactcctccacctttgacgctggggctggcattgccctcaacgaccactttgtcaagctcatttcctggtatgacaacgaatttggctacagcaacagggtggtggacctcatggcccacatggcctccaaggagtaagacccctggaccaccagccccagcaagagcacaagaggaagagagagaccctcactgctggggagtccctgccacactcagtcccccaccacactgaatctcccctcctcacagttgccatgtagaccccttgaagaggggaggg

SEQ ID NO: 108238 - DNA, 1256 bp, Artificial Sequence
  derived and/or modified sequence
aggcgtgtgtgtcggccggggccactaggcgctcactgttctctccctccgcgcagccgagccacatcgctcagacaccatggggaaggtgaaggtcggagtcaacggatttggtcgtattgggcgcctggtcaccagggctgcttttaactctggtaaagtggatattgttgccatcaatgaccccttcattgacctcaactacatggtttacatgttccaatatgattccacccatggcaaattccatggcaccgtcaaggctgagaacgggaagcttgtcatcaatggaaatcccatcaccatcttccaggagcgagatccctccaaaatcaagtggggcgatgctggcgctgagtacgtcgtggagtccactggcgtcttcaccaccatggagaaggctggggctcatttgcaggggggagccaaaagggtcatcatctctgccccctctgctgatgcccccatgttcgtcatgggtgtgaaccatgagaagtatgacaacagcctcaagatcatcagcaatgcctcctgcaccaccaactgcttagcacccctggccaaggtcatccatgacaactttggtatcgtggaaggactcatgaccacagtccatgccatcactgccacccagaagactgtggatggcccctccgggaaactgtggcgtgatggccgcggggctctccagaacatcatccctgcctctactggcgctgccaaggctgtgggcaaggtcatccctgagctgaacgggaagctcactggcatggccttccgtgtccccactgccaacgtgtcagtggtggacctgacctgccgtctagaaaaacctgccaaatatgatgacatcaagaaggtggtgaagcaggcgtcggagggccccctcaagggcatcctgggctacactgagcaccaggtggtctcctctgacttcaacagcgacacccactcctccacctttgacgctggggctggcattgccctcaacgaccactttgtcaagctcatttcctggtatgacaacgaatttggctacagcaacagggtggtggacctcatggcccacatggcctccaaggagtaagacccctggaccaccagccccagcaagagcacaagaggaagagagagaccctcactgctggggagtccctgccacactcagtcccccaccacactgaatctcccctcctcacagttgccatgtagaccccttgaagaggggaggggcctagggagccgcaccttgtcat

SEQ ID NO: 108239 - DNA, 1348 bp, Artificial Sequence
  derived and/or modified sequence
ttcgacagtcagccgcatcttcttttgcgtcgccaggtgaagacgggcggagagaaacccgggaggctagggacggcctgaaggcggcaggggcgggcgcaggccggatgtgttcgcgccgctgcgggccgagccacatcgctcagacaccatggggaaggtgaaggtcggagtcaacggatttggtcgtattgggcgcctggtcaccagggctgcttttaactctggtaaagtggatattgttgccatcaatgaccccttcattgacctcaactacatggtttacatgttccaatatgattccacccatggcaaattccatggcaccgtcaaggctgagaacgggaagcttgtcatcaatggaaatcccatcaccatcttccaggagcgagatccctccaaaatcaagtggggcgatgctggcgctgagtacgtcgtggagtccactggcgtcttcaccaccatggagaaggctggggctcatttgcaggggggagccaaaagggtcatcatctctgccccctctgctgatgcccccatgttcgtcatgggtgtgaaccatgagaagtatgacaacagcctcaagatcatcagcaatgcctcctgcaccaccaactgcttagcacccctggccaaggtcatccatgacaactttggtatcgtggaaggactcatgaccacagtccatgccatcactgccacccagaagactgtggatggcccctccgggaaactgtggcgtgatggccgcggggctctccagaacatcatccctgcctctactggcgctgccaaggctgtgggcaaggtcatccctgagctgaacgggaagctcactggcatggccttccgtgtccccactgccaacgtgtcagtggtggacctgacctgccgtctagaaaaacctgccaaatatgatgacatcaagaaggtggtgaagcaggcgtcggagggccccctcaagggcatcctgggctacactgagcaccaggtggtctcctctgacttcaacagcgacacccactcctccacctttgacgctggggctggcattgccctcaacgaccactttgtcaagctcatttcctggtatgacaacgaatttggctacagcaacagggtggtggacctcatggcccacatggcctccaaggagtaagacccctggaccaccagccccagcaagagcacaagaggaagagagagaccctcactgctggggagtccctgccacactcagtcccccaccacactgaatctcccctcctcacagttgccatgtagaccccttgaagaggggaggggcctagggagccgcaccttgtcatgtaccatcaataaagtaccc

SEQ ID NO: 108240 - DNA, 926 bp, Artificial Sequence
  derived and/or modified sequence
ctctgctcctcctgttcgacagtcagccgcatcttcttttgcgtcgccagccgagccacatcgctcagacaccatggggaaggtgaaggtcggagtcaacggatttggtcgtattgggcgcctggtcaccagggctgcttttaactctggtaaagtggatattgttgccatcaatgaccccttcattgacctcaactacatggtttacatgttccaatatgattccacccatggcaaattccatggcaccgtcaaggctgagaacgggaagcttgtcatcaatggaaatcccatcaccatcttccaggagcgagatccctccaaaatcaagtggggcgatgctggcgctgagtacgtcgtggagtccactggcgtcttcaccaccatggagaaggctggggctcatttgcaggggggagccaaaagggtcatcatctctgccccctctgctgatgcccccatgttcgtcatgggtgtgaaccatgagaagtatgacaacagcctcaagatcatcagcaatgcctcctgcaccaccaactgcttagcacccctggccaaggtcatccatgacaactttggtatcgtggaaggactcatgaccacagtccatgccatcactgccacccaacgggaagctcactggcatggccttccgtgtccccactgccaacgtgtcagtggtggacctgacctgccgtctagaaaaacctgccaaatatgatgacatcaagaaggtggtgaagcaggcgtcggagggccccctcaagggcatcctgggctacactggggagtccctgccacactcagtcccccaccacactgaatctcccctcctcacagttgccatgtagaccccttgaagaggggaggggcctagggagccgcaccttgtcatgtaccatcaataaagtaccctgtgctcaacc

SEQ ID NO: 108241 - DNA, 648 bp, Artificial Sequence
  derived and/or modified sequence
atgggcaaggtgaaggtgggcgtgaatggatttggccgcatcggccgcctggtgaccagggctgccttcaacagcggcaaggtggacatcgtggccatcaatgaccccttcatcgacctgaactacatggtgtacatgttccagtatgacagcacccacggcaagttccatggaacagtgaaggcagaaaatggcaagctggtgatcaatggaaaccccatcaccatcttccaggagcgggaccccagcaagatcaagtggggagatgctggagcagaatatgtggtggagagcactggagtcttcaccaccatggagaaggccggggcccacctgcagggcggggccaagagggtcatcatcagcgcccccagcgcagatgcccccatgtttgtgatgggcgtgaaccacgagaagtatgacaacagcctgaagatcatcagcaatgccagctgcaccaccaactgcctggcccccctggccaaggtgattcatgacaactttggcatcgtggagggcctgatgaccaccgtgcacgccatcacagccacccagcgggaggcccactggcacggcctgccctgcccccactgccagagggtgtctgggggccctgacctgcccagcaggaagacctgccagatctag

SEQ ID NO: 108242 - DNA, 1008 bp, Artificial Sequence
  derived and/or modified sequence
atgggcaaggtgaaggtgggcgtgaacggcttcggccggatcggcaggctagtgacgagagcggcattcaatagtggcaaagtagacatagtggctattaacgacccatttattgatctgaactatatggtatacatgttccagtatgacagtacccatgggaaattccatggaacagtgaaagccgagaacggaaaacttgtgatcaacggtaacccaatcaccatatttcaagagcgcgaccctagcaagatcaagtggggagacgccggagccgagtacgttgtggagtctacgggggtctttacgaccatggaaaaggccggcgcccatctacagggaggagctaagagggtgattatctccgccccctcagctgatgcaccaatgtttgtgatgggcgtgaatcatgaaaagtatgataacagcttaaaaattatcagtaatgcttcctgtactaccaattgcctggctcccctggccaaagtcatccatgataatttcgggatcgttgaaggcctcatgaccacagtccatgccatcaccgctactcagaagacggtagacgggccatctggcaaactctggagagatggccgaggcgctctgcagaacatcatccctgcttctacaggcgccgccaaagctgtgggcaaggtaatcccagagttaaacgggaaactgaccggcatggcattcagagtcccaactgccaacgtcagcgtggtggacttgacttgccgacttgaaaaaccggcgaagtacgatgacattaaaaaggtggtaaagcaggcctcggagggaccattaaagggcattctcgggtacaccgagcaccaggtggtgtccagcgatttcaactctgatacacactcatcgaccttcgacgcaggggccgggatcgcattgaatgatcatttcgtgaagttaattagctggtatgataatgagttcgggtacagcaatagggtggttgatttaatggcccacatggcaagcaaagagtag

SEQ ID NO: 108243 - DNA, 1008 bp, Artificial Sequence
  derived and/or modified sequence
atgggcaaggtgaaggtgggcgtgaacggcttcggccggatcggccggttagttacccgtgccgcattcaactccggcaaagtagatatagtcgccatcaacgatcctttcatagatctgaactatatggtgtacatgttccagtatgacagcactcacgggaagtttcacgggacagtgaaagccgagaacgggaagctggtcattaacgggaaccccattacaatctttcaggagagggatccttcgaaaatcaagtggggcgatgccggcgccgaatatgtcgtggaaagtaccggcgtcttcacaaccatggaaaaggctggcgcccacttacagggcggggcgaaacgcgtgattatttctgcccccagtgcggatgccccaatgtttgtgatgggtgtgaaccacgaaaagtacgataacagcttgaagattatctctaacgcatcgtgtaccacgaactgtctggcacccctggcaaaagttatccatgataactttggcattgtggagggcttgatgaccactgtgcatgccataaccgccacccagaagacggtggacgggccttccgggaagctctggagagacggccggggggccttgcagaatatcatccctgccagcactggggcggctaaggcggtgggcaaggtaattcccgagctcaacggcaagctgaccgggatggcattccgggttcccaccgcaaacgtgtccgttgttgacctcacgtgtcgcctggaaaagcccgcgaagtacgatgacatcaagaaggtggtgaaacaggcttctgaagggcctttgaagggtatcctcggctatactgagcaccaggtggtgtcttcagactttaattcagatacacattcttccacatttgatgctggggccggcatcgcgctgaacgatcattttgtgaagctgattagttggtatgataacgaatttggctatagcaaccgagtggtcgacttaatggctcacatggcaagcaaagaatag

SEQ ID NO: 108244 - DNA, 648 bp, Artificial Sequence
  derived and/or modified sequence
atgggcaaggtgaaggtgggcgtgaacggcttcggccggatcggcaggctggtaactagagccgcctttaactccggtaaagtagacatcgtggcaattaacgaccccttcattgacctgaactatatggtctacatgttccagtacgactcaacgcacggaaagttccacggcacagtgaaggccgagaacggcaagttggttatcaacggcaacccaattacgatatttcaggaacgtgacccaagtaagatcaagtggggtgacgcgggagctgaatatgtggtggagtctaccggggttttcacaacaatggagaaggcaggagcccacctgcaaggcggagccaagagggtgataatatccgccccttccgccgacgctccgatgttcgtgatgggcgtcaaccacgagaaatatgacaattcacttaagatcatcagcaatgcctcttgtacaacaaactgtttggccccactggctaaggtgatccacgataattttggcatagtggaaggcctcatgacgacagtgcatgcaattacagccactcaacgcgaggcacattggcacggactcccttgtccgcactgtcagcgagtgagcggcggacccgaccttccatctagaaagacctgccaaatttag

SEQ ID NO: 108245 - DNA, 1008 bp, Artificial Sequence
  derived and/or modified sequence
atgggtaaagtaaaggtcggggttaatggctttggtcggatcggccgattggtgacacgggcagcttttaactcaggaaaagtcgacatagtagccattaatgatcctttcattgatctaaattatatggtttacatgttccagtatgattcaacgcacggaaagttccatggcacggtgaaagccgagaacggcaaacttgtgatcaacggaaaccccattactatcttccaggaacgcgaccctagcaagatcaagtggggcgatgctggtgcggaatatgtcgtcgaaagcacaggtgtttttactactatggagaaagccggagcccacttacaaggcggagctaagagagtgatcatttccgctccttccgctgatgccccaatgttcgtaatgggagtgaaccatgaaaaatacgacaattccttgaaaatcatctcaaacgcctcttgtactacgaactgtctggcgcctttagctaaagtaatccatgacaatttcggtattgtggaaggcctcatgactaccgtccacgctatcaccgccacccagaagaccgtggatgggccttcaggcaaattatggcgagatggcagaggtgctctgcaaaatatcatccctgcgagtactggcgcagccaaagcggttggcaaagttattccagaattaaacgggaagctgaccgggatggccttcagagttcctaccgctaatgtgtctgtggttgacctgacatgccgcctcgaaaagccggcaaagtatgacgatattaagaaggtggtcaaacaggcctccgaaggcccactcaaggggatcctcggatatactgagcaccaggtggtgtcttcagacttcaactctgatacgcactcttcaaccttcgacgccggtgcaggcattgcgttgaatgaccattttgtgaagctgatctcatggtacgacaacgagttcggatatagcaatagggtggttgatctaatggcccacatggcctctaaagaatag

SEQ ID NO: 108246 - DNA, 1008 bp, Artificial Sequence
  derived and/or modified sequence
atgggaaaggtgaaagttggcgtgaatggtttcggcaggattggcaggctcgtaactagagcggctttcaacagcggcaaggtcgatatcgtagccatcaatgatccttttatcgatctgaactacatggtgtacatgttccaatacgactcaactcacggcaaatttcacgggaccgtgaaagccgagaacggaaagctggtgatcaacggtaatcctattacaatatttcaggagagggacccctcgaagatcaagtggggggacgctggggcagagtatgtggtcgagagtacaggggtattcaccactatggagaaagcaggcgctcacttgcagggaggagccaagagggtgatcatttcagccccatccgccgacgcacctatgtttgtaatgggcgtgaaccatgaaaaatatgataattccttgaagatcataagtaatgcgtcttgcactaccaactgtctggcccctttggccaaagtgatacacgataattttggtattgtggagggccttatgaccaccgtgcacgcaattaccgctacccagaaaacagtggacggtccgtcaggaaagttgtggagagacgggaggggagccttgcagaacatcatcccagcttcaaccggtgctgcaaaagcggtgggaaaagtgatccccgaattgaacggcaagctgactggaatggcattccgcgtgcccactgcaaatgtttccgtggtggatctgacttgtcggctggagaagcccgctaaatacgatgatatcaagaaagttgttaaacaggcatccgagggcccactaaaaggcatactggggtataccgaacaccaggtcgttagctctgacttcaattctgacacacattcaagcacttttgacgctggcgcaggtatagctctgaacgaccactttgtgaagctcatttcttggtatgataatgagtttggttactccaatagggttgtggacctgatggcgcacatggcctccaaggagtag

SEQ ID NO: 108247 - DNA, 648 bp, Artificial Sequence
  derived and/or modified sequence
atggggaaggtcaaagtaggcgtgaatggctttggcagaatcggaaggctcgtgactagggccgctttcaactctgggaaggtggatatcgttgcaattaacgacccttttatcgacttgaactacatggtatacatgttccagtacgactcaacccatggaaagttccacggaacggtgaaggcggaaaatggcaagctggtgattaatggtaaccccatcaccatcttccaggagcgagatccgagtaaaattaaatggggagatgcaggggctgagtatgtcgtggaatccaccggagtttttacaaccatggagaaggctggcgctcatttgcagggtggagccaaaagggttattattagtgctcctagcgctgacgccccaatgttcgtgatgggagtcaaccatgaaaagtacgacaactcactcaaaataatcagtaacgcgtcttgcacaacgaattgtttggccccacttgcaaaagttattcacgacaattttgggatcgttgaggggctgatgacgacggttcacgcgatcacagcaactcagagagaagcacattggcacggcctgccatgtccccattgccagagagtgtctggaggacccgacctgccaagccggaaaacctgtcaaatttag

SEQ ID NO: 108248 - DNA, 648 bp, Artificial Sequence
  derived and/or modified sequence
atgggcaaggtgaaggtgggcgtgaacggcttcggcagaatcggcagactggtgaccagagccgccttcaacagcggcaaggtggacatcgtggccatcaacgaccccttcatcgacctgaactacatggtgtacatgttccagtacgacagcacccacggcaagttccacggcaccgtgaaggccgagaacggcaagctggtgatcaacggcaaccccatcaccatcttccaggagagagaccccagcaagatcaagtggggcgacgccggcgccgagtacgtggtggagagcaccggcgtgttcaccaccatggagaaggccggcgcccacctgcagggcggcgccaagagagtgatcatcagcgcccccagcgccgacgcccccatgttcgtgatgggcgtgaaccacgagaagtacgacaacagcctgaagatcatcagcaacgccagctgcaccaccaactgcctggcccccctggccaaggtgatccacgacaacttcggcatcgtggagggcctgatgaccaccgtgcacgccatcaccgccacccagagagaggcccactggcacggcctgccctgcccccactgccagagagtgagcggcggccccgacctgcccagcagaaagacctgccagatctag

SEQ ID NO: 108249 - protein, 410 aa, Artificial Sequence
  derived and/or modified sequence
MAHGKDFASRGIEMSEVRLNLDKMMEQKSTAVKALTGGIAHLFKQNKVVHVNGYGKITGKNQVTATKADGGTQVIDTKNILIATGSEVTPFPGITIDEDTIVSSTGALSLKKVPEKMVVIGAGVIGVELGSVWQRLGADVTAVEFLGHVGGVGIDMEISKNFQRILQKQGFKFKLNTKVTGATKKSDGKIDVSIEAASGGKAEVITCDVLLVCIGRRPFTKNLGLEELGIELDPRGRIPVNTRFQTKIPNIYAIGDVVAGPMLAHKAEDEGIICVEGMAGGAVHIDYNCVPSVIYTHPEVAWVGKSEEQLKEEGIEYKVGKFPFAANSRAKTNADTDGMVKILGQKSTDRVLGAHILGPGAGEMVNEAALALEYGASCEDIARVCHAHPTLSEAFREANLAASFGKSINF

SEQ ID NO: 108250 - DNA, 1233 bp, Artificial Sequence
  derived and/or modified sequence
atggcccacgggaaagattttgccagcagaggaattgaaatgtctgaggtgcgcctgaatctggacaaaatgatggaacagaaatccacagccgtgaaagcgctgaccggtgggatcgctcacctgttcaaacagaacaaggtcgtccatgtgaacggttacggcaaaattacagggaaaaaccaagtgacagccaccaaagcagacggcgggactcaggttatcgatactaagaacatcctgatcgccaccggaagtgaggttaccccttttccagggattacaattgatgaagataccattgtgagctccacaggcgcactgtcccttaaaaaggtgccagagaaaatggttgtgattggcgccggtgttatcggcgtcgagctgggttcggtgtggcaaagactgggcgctgatgtcactgcggttgagtttctgggccacgtaggcggagtgggaatcgatatggagatctctaaaaatttccaaagaattctgcagaagcagggattcaaatttaaactcaacaccaaagttaccggggcgactaagaagagcgatggtaaaatcgatgtctccatcgaggcggcttccggcggaaaggccgaggtgataacatgtgatgtgctgctcgtctgcattggtcggcgcccctttactaagaatctcgggctagaggaactgggaatagagctggacccccgggggaggattccggtgaacacacggtttcagacaaaaatccctaatatctatgctataggggacgtggtcgccggacccatgctcgcccacaaggctgaagatgagggcataatctgcgtcgaggggatggccgggggggcagtgcatatcgattacaactgcgtcccctcggtgatatacactcaccccgaggtggcatgggtcggaaagagcgaggaacagcttaaggaggaggggatcgagtataaggtagggaagtttcctttcgctgcgaattcaagggcaaaaactaacgccgacactgacggcatggtgaaaatcttggggcagaaaagtacagaccgcgttcttggggctcacatcctaggaccaggggctggcgaaatggtgaatgaagccgctttagctctcgaatacggcgctagctgtgaggacatcgctcgcgtgtgccatgcgcatccaactctatcagaagccttccgggaggccaatctggcggccagttttggaaaaagcattaacttttag

SEQ ID NO: 108251 - DNA, 1233 bp, Artificial Sequence
  derived and/or modified sequence
atggcccacggcaaggactttgccagccggggcatcgagatgtctgaggtgcggctgaacctggacaagatgatggagcagaagagcacagctgtgaaggccctgaccggcggcatcgcccacctgttcaagcagaacaaggtggtgcacgtgaatggctacggcaagatcaccgggaagaaccaggtgacagccaccaaggcagatggcggcacccaggtgattgacaccaagaacatcctgattgccaccggcagcgaggtgacccccttccctggcatcaccattgatgaggacaccatcgtgagcagcactggagccctgagcctgaagaaggtgcctgagaagatggtggtgattggagctggggtgattggagtggagctgggctctgtgtggcagaggctgggcgcagatgtgacagctgtggagttcctgggccacgtgggcggcgtgggcatcgacatggagatcagcaagaacttccagaggatcctgcagaagcagggcttcaagttcaagctgaacaccaaggtgactggagccaccaagaagagtgatggcaagattgatgtgtccattgaggccgccagcggcggcaaggccgaggtgatcacctgtgatgtgctgctggtgtgcatcggccggcggcccttcaccaagaacctgggcctggaggagctgggcatcgagctggacccccggggccgcatccctgtgaacacccgcttccagaccaagatccccaacatctatgccatcggagatgtggtggccggccccatgctggcccacaaggccgaggatgagggcatcatctgtgtggagggcatggccggcggcgctgtgcacatcgactacaactgtgtgcccagcgtcatctacacccaccctgaggtggcctgggtgggcaagtctgaggagcagctgaaggaggagggcatcgagtacaaggtgggcaagttcccctttgctgccaacagccgggccaagaccaatgctgacacagatggcatggtgaagatcctgggccagaagagcacagacagagtgctgggcgcccacatcctgggccctggagctggggagatggtgaatgaggccgccctggccctggagtatggagccagctgtgaagatattgcccgggtgtgccacgcccaccccaccctgtctgaggccttccgggaggccaacctggccgccagctttgggaagagcatcaacttctag

SEQ ID NO: 108252 - DNA, 1233 bp, Artificial Sequence
  derived and/or modified sequence
atggcccacggcaaggacttcgccagccggggcatcgagatgagcgaggtaaggctcaatttggacaagatgatggaacagaaaagcactgccgttaaggccctcacaggcggaatagcccacctgtttaagcagaataaggtagtgcacgttaacggctacgggaaaattaccgggaagaaccaggtcaccgcaaccaaggcagatgggggcacgcaggttatcgacactaaaaatatcctcatcgccacaggctccgaggttacacccttccccggcatcaccatcgatgaggataccatcgtctcctcaaccggcgcgctgtcactcaagaaagtccccgagaaaatggtggtgatcggtgcaggcgtcatcggcgtggagttgggttcagtgtggcaaagattgggggctgacgtcacagccgtcgaatttctaggccacgtgggtggcgtgggtatcgacatggaaatatccaagaatttccagcgtatcctccagaaacagggctttaaatttaagttgaatacaaaagtgactggcgcaactaaaaagtcggatggaaagattgatgtatcgatagaggccgcttcaggaggcaaagccgaagtcatcacctgcgacgtgcttctcgtctgtatcggacggagacctttcacaaaaaatctcggcctggaagagttgggtatcgagctggaccctcgcgggagaatcccggtgaacacccgcttccagaccaaaatccccaatatttacgcaataggggatgtggtcgctggtcccatgctggcccataaagccgaagatgagggtattatctgcgttgaggggatggccggtggcgccgttcatatagattacaattgtgtcccatccgtcatctatactcaccctgaggtcgcatgggttgggaaatcagaagaacagctaaaggaggaaggtattgagtacaaggtgggcaaatttccctttgccgctaacagcagggctaagacaaacgccgatactgacggcatggtgaaaattttaggacaaaagtcaaccgatcgagtgcttggagctcacatcctcgggcccggggccggggagatggtcaatgaggctgcattggctctggagtacggggctagctgcgaggatatcgccagagtttgccacgcccaccctactctctccgaggcttttcgggaagcaaatctggccgcatcattcggcaaaagcatcaatttctag

SEQ ID NO: 108253 - DNA, 1233 bp, Artificial Sequence
  derived and/or modified sequence
atggcccatggaaaggactttgcaagccgcggtattgagatgtctgaggtgcggttgaacttagataagatgatggaacaaaaatcaaccgcggtgaaagccctcaccggcggaatcgcgcatctgtttaagcagaacaaagtagtccacgtgaatggatacggcaagatcactggtaaaaatcaggtaaccgctaccaaggccgacggcggtacccaggttatcgatacaaaaaacatcctcattgccaccggctcagaagtgacaccttttccgggaattactattgatgaggacaccatagtttctagcacaggggcactcagcctgaaaaaggtccctgagaaaatggttgttattggtgctggggtgattggagtggaactggggtctgtctggcagagacttggagcagacgtgaccgcagtcgagtttcttggccatgttggaggcgtgggaatcgacatggagatcagtaagaacttccagaggattttacagaagcaggggttcaagttcaagctgaatacaaaagtaacaggagcgaccaagaagagcgatggaaagatcgatgtctccattgaggccgcttctgggggtaaggcagaggtgatcacatgtgacgtgctgctcgtctgcattggacgcaggcctttcacgaagaatctcggtctggaggagctgggcattgagttggatccgcgagggaggattcctgttaacacacgtttccagactaaaatacccaatatctacgcaataggagatgtcgtggcaggcccaatgctggcccacaaagctgaggatgagggaataatatgtgtagaaggaatggctggtggggctgtccacattgattacaactgtgtcccgtccgtgatctatacacaccctgaggttgcctgggtaggaaagagtgaggagcaattgaaggaggagggcatcgagtacaaggtcggaaaatttccctttgccgctaacagtcgggctaagacaaacgcagatacagatgggatggtgaagattttaggccaaaagtctaccgatcgtgtcctgggggcacacattctcggccctggagccggtgaaatggtcaatgaggcggctctggcgctagaatatggcgcatcctgcgaggatatcgcgagggtatgccacgcgcatccaacactcagcgaggcttttcgagaggcgaaccttgccgcaagctttggcaagagcattaatttctag

SEQ ID NO: 108254 - DNA, 1233 bp, Artificial Sequence
  derived and/or modified sequence
atggcccacggcaaggacttcgccagcagaggcatcgagatgagcgaggtgagactgaacctggacaagatgatggagcagaagagcaccgccgtgaaggccctgaccggcggcatcgcccacctgttcaagcagaacaaggtggtgcacgtgaacggctacggcaagatcaccggcaagaaccaggtgaccgccaccaaggccgacggcggcacccaggtgatcgacaccaagaacatcctgatcgccaccggcagcgaggtgacccccttccccggcatcaccatcgacgaggacaccatcgtgagcagcaccggcgccctgagcctgaagaaggtgcccgagaagatggtggtgatcggcgccggcgtgatcggcgtggagctgggcagcgtgtggcagagactgggcgccgacgtgaccgccgtggagttcctgggccacgtgggcggcgtgggcatcgacatggagatcagcaagaacttccagagaatcctgcagaagcagggcttcaagttcaagctgaacaccaaggtgaccggcgccaccaagaagagcgacggcaagatcgacgtgagcatcgaggccgccagcggcggcaaggccgaggtgatcacctgcgacgtgctgctggtgtgcatcggcagaagacccttcaccaagaacctgggcctggaggagctgggcatcgagctggaccccagaggcagaatccccgtgaacaccagattccagaccaagatccccaacatctacgccatcggcgacgtggtggccggccccatgctggcccacaaggccgaggacgagggcatcatctgcgtggagggcatggccggcggcgccgtgcacatcgactacaactgcgtgcccagcgtgatctacacccaccccgaggtggcctgggtgggcaagagcgaggagcagctgaaggaggagggcatcgagtacaaggtgggcaagttccccttcgccgccaacagcagagccaagaccaacgccgacaccgacggcatggtgaagatcctgggccagaagagcaccgacagagtgctgggcgcccacatcctgggccccggcgccggcgagatggtgaacgaggccgccctggccctggagtacggcgccagctgcgaggacatcgccagagtgtgccacgcccaccccaccctgagcgaggccttcagagaggccaacctggccgccagcttcggcaagagcatcaacttctag

SEQ ID NO: 108255 - protein, 486 aa, Artificial Sequence
  derived and/or modified sequence
MQSWSRVYCSLAKRGHFNRISHGLQGLSAVPLRTYADQPIDADVTVIGSGPGGYVAAIKAAQLGFKALLNNSHYYHMAHGKDFASRGIEMSEVRLNLDKMMEQKSTAVKALTGGIAHLFKQNKVVHVNGYGKITGKNQVTATKADGGTQVIDTKNILIATGSEVTPFPGITIDEDTIVSSTGALSLKKVPEKMVVIGAGVIGVELGSVWQRLGADVTAVEFLGHVGGVGIDMEISKNFQRILQKQGFKFKLNTKVTGATKKSDGKIDVSIEAASGGKAEVITCDVLLVCIGRRPFTKNLGLEELGIELDPRGRIPVNTRFQTKIPNIYAIGDVVAGPMLAHKAEDEGIICVEGMAGGAVHIDYNCVPSVIYTHPEVAWVGKSEEQLKEEGIEYKVGKFPFAANSRAKTNADTDGMVKILGQKSTDRVLGAHILGPGAGEMVNEAALALEYGASCEDIARVCHAHPTLSEAFREANLAASFGKSINF

SEQ ID NO: 108256 - DNA, 1461 bp, Artificial Sequence
  derived and/or modified sequence
atgcagtcgtggtcgagggtgtattgtagtcttgcaaagagaggtcactttaacaggattagccacggtctacaggggctcagtgccgtccccctgcgaacgtatgccgatcagcctattgacgctgacgtcactgtgatcggcagcgggcccggcggctacgtcgctgcaatcaaggcagcccagctggggttcaaagccctgctgaacaattcccactattaccacatggcccacggtaaggatttcgcctcccggggtattgagatgagcgaagtgagactgaacctggataagatgatggagcagaagtccaccgctgtgaaggctctgacggggggcatcgcccacttgttcaagcagaacaaggtggtccacgtgaacgggtatggcaagatcaccggcaaaaatcaggttactgctaccaaagcggacggcggaactcaggttatagacacaaaaaacatcctcatagccaccggttcagaagttacccccttccctggtatcacgatagatgaggataccattgtgagcagcaccggagccctgtcattgaagaaggtccctgagaaaatggtggtgattggagccggagtgatcggagtcgagctgggaagcgtgtggcagcgccttggcgctgacgtcaccgctgtcgagtttttaggacacgtcgggggcgttggcatagacatggagatcagcaaaaactttcagaggatactgcagaagcaggggtttaagttcaaacttaacacaaaggtcacaggtgcaacaaagaaatcggatgggaaaatcgatgtctccatagaggccgccagcggagggaaagctgaagtgattacttgcgatgtattgttagtgtgtattggcagacgaccattcacaaaaaacctggggctggaagagctcggaatcgagttagacccacggggccgaatcccagttaacactaggtttcagaccaagattcctaatatttacgccataggcgatgtagtcgcagggccaatgctggcccataaagccgaggatgaagggatcatttgtgtggaaggaatggctgggggggcagtgcatattgattacaactgcgtaccttccgtcatatatacccaccccgaggtggcatgggtggggaagtcagaggaacagctgaaagaggagggaattgaatataaggtcggtaaatttccgttcgcagcaaatagtcgcgccaaaaccaacgccgacacagacggtatggtgaagattttgggacagaagagtactgacagggttctcggagcacatattctgggcccaggcgccggcgaaatggtcaatgaggcggctctggccctggagtatggtgcctcgtgcgaagacatagcccgggtatgtcatgcccaccctacactttccgaggcttttagggaagctaacttggcggctagttttggaaaatccattaacttctag

SEQ ID NO: 108257 - DNA, 1461 bp, Artificial Sequence
  derived and/or modified sequence
atgcagagctggagccgggtgtactgcagcctggccaagaggggccacttcaaccgcatcagccacggcctgcagggcctgtctgctgtgcccctgcggacctacgccgaccagcccattgatgctgatgtgacagtgattggcagcggccctgggggctacgtggccgccatcaaggccgcccagctgggcttcaaggccctgctgaacaacagccactactaccacatggcccacggcaaggactttgccagccggggcatcgagatgtctgaggtgcggctgaacctggacaagatgatggagcagaagagcacagctgtgaaggccctgaccggcggcatcgcccacctgttcaagcagaacaaggtggtgcacgtgaatggctacggcaagatcaccgggaagaaccaggtgacagccaccaaggcagatggcggcacccaggtgattgacaccaagaacatcctgattgccaccggcagcgaggtgacccccttccctggcatcaccattgatgaggacaccatcgtgagcagcactggagccctgagcctgaagaaggtgcctgagaagatggtggtgattggagctggggtgattggagtggagctgggctctgtgtggcagaggctgggcgcagatgtgacagctgtggagttcctgggccacgtgggcggcgtgggcatcgacatggagatcagcaagaacttccagaggatcctgcagaagcagggcttcaagttcaagctgaacaccaaggtgactggagccaccaagaagagtgatggcaagattgatgtgtccattgaggccgccagcggcggcaaggccgaggtgatcacctgtgatgtgctgctggtgtgcatcggccggcggcccttcaccaagaacctgggcctggaggagctgggcatcgagctggacccccggggccgcatccctgtgaacacccgcttccagaccaagatccccaacatctatgccatcggagatgtggtggccggccccatgctggcccacaaggccgaggatgagggcatcatctgtgtggagggcatggccggcggcgctgtgcacatcgactacaactgtgtgcccagcgtcatctacacccaccctgaggtggcctgggtgggcaagtctgaggagcagctgaaggaggagggcatcgagtacaaggtgggcaagttcccctttgctgccaacagccgggccaagaccaatgctgacacagatggcatggtgaagatcctgggccagaagagcacagacagagtgctgggcgcccacatcctgggccctggagctggggagatggtgaatgaggccgccctggccctggagtatggagccagctgtgaagatattgcccgggtgtgccacgcccaccccaccctgtctgaggccttccgggaggccaacctggccgccagctttgggaagagcatcaacttctag

SEQ ID NO: 108258 - DNA, 1461 bp, Artificial Sequence
  derived and/or modified sequence
atgcagagctggagccgggtgtactgcagcctggccaagcggggccactttaacagaatcagccacggtctgcagggactgtccgctgtcccactccggacatacgccgaccagccaatcgatgctgatgttaccgtgatcggatcaggacccggaggttacgtcgcagccatcaaggctgcccagctggggttcaaggctctgctcaacaattctcactactaccatatggctcacggtaaagactttgcatcgcgaggcattgaaatgtccgaagtccgactcaatttagacaaaatgatggagcagaaaagtaccgctgttaaagccctcacaggcggaatcgctcacctgtttaaacaaaacaaagtcgtgcacgtgaatggctatgggaaaattacgggtaagaatcaggtgactgcaaccaaggcagacggcgggacccaggtgatcgataccaagaatatattaatcgcaactggttctgaagtcacccccttccccggaattaccatcgatgaggacactattgtctcttcaacaggcgccctgagtctgaagaaagtcccagaaaaaatggttgtgatcggggctggcgtgatcggagtcgagctgggctccgtctggcagcgactgggtgccgacgtaacagcagtggaattcctcggccacgtgggaggagtcgggatcgacatggagatatctaagaattttcagcgcatcctacagaagcagggtttcaagtttaagttaaacacgaaagtcaccggtgccacaaaaaagtccgatggcaagatcgatgtttcaatcgaggctgcctcaggtggaaaagcagaagtgatcacttgtgatgtgctgttggtctgtatcgggcggcgtcctttcactaagaacttaggccttgaggaactgggcattgagctcgacccacgcggacgcattcccgtgaacacccgctttcagaccaagatcccaaacatttatgccataggagacgtagtcgcgggcccaatgcttgcccacaaagcagaagacgagggaatcatatgtgtcgaaggaatggcaggcggcgccgtgcacattgattacaactgtgttccctcagtcatttatacacacccggaggtggcctgggtagggaaatcagaggaacaactcaaagaggaaggtatagaatacaaagtaggaaaattcccattcgctgctaattctagagctaagaccaacgccgacactgacggtatggtgaagattttgggtcagaagtcaacggatcgggtcctgggcgcccatatcctcgggcccggcgctggggaaatggtaaacgaagcagctctcgccttggaatacggcgccagttgtgaggatattgcccgggtctgccatgcacacccaacgttatcggaagcctttcgggaagcaaacctggctgcaagtttcgggaagagtatcaatttctag

SEQ ID NO: 108259 - DNA, 1461 bp, Artificial Sequence
  derived and/or modified sequence
atgcaaagctggtccagggtgtactgttctctggcaaagcggggacattttaatcgaatctctcacgggctccaaggcttgtctgccgtgccactccgtacttacgctgaccaacctatagacgctgatgtcacagtcattggaagcggacccggtggctacgtggcagcaattaaagccgcacaactgggctttaaggccctgctgaataattcgcattactaccacatggctcatggtaaagatttcgccagcaggggaattgagatgagcgaagttcgactgaatctggacaagatgatggagcagaaatccactgccgtgaaggcactgacgggcggtatcgcccacctcttcaagcaaaacaaggtggttcacgttaatggttatgggaagatcaccgggaagaaccaggtcaccgctacaaaggccgacgggggtacccaggtgattgataccaaaaacatcctgatcgctaccggatccgaagtgactcctttccctgggatcactatcgacgaggacacaattgtttcctctaccggagcgctcagcctgaaaaaggtgcctgaaaagatggtcgttatcggagctggtgtgatcggggtggagctgggctctgtttggcaacgccttggggcagacgtaaccgcggtggaattcctcgggcacgtgggaggagtgggaatcgatatggaaataagtaagaattttcaacggatcctccagaagcaaggtttcaagtttaaactgaacactaaggtgaccggcgcaaccaagaagtctgacggcaagattgacgtgtccatcgaggcagcctccggagggaaagcagaagtcattacatgcgatgtcctgctcgtatgcattggacgccgaccattcactaagaatctcgggctcgaggagctaggtatagagcttgatccacggggtcgtatcccggttaatacgaggtttcagacaaagatccccaacatttacgccatcggtgacgtggtggcgggacccatgctggctcataaggcagaggacgaaggtatcatctgtgtggaggggatggcaggcggagccgttcatatcgactacaattgcgtgccttctgtcatttacactcatcccgaagtagcctgggtgggaaagtccgaagaacaattaaaggaagagggcattgaatacaaagtcgggaagttcccttttgctgctaatagccgcgctaaaaccaatgctgacactgacggtatggttaaaatcctgggacagaaatcgaccgaccgagtgctgggggcacatatcctcgggccaggcgcaggtgagatggtcaacgaggccgcactggctttggagtacggggcatcatgcgaggacattgcacgggtgtgccacgcgcacccaactctgagtgaagcgttcagggaagcgaacttggccgcaagcttcggcaagtctatcaacttttag

SEQ ID NO: 108260 - DNA, 1461 bp, Artificial Sequence
  derived and/or modified sequence
atgcagagctggagcagagtgtactgcagcctggccaagagaggccacttcaacagaatcagccacggcctgcagggcctgagcgccgtgcccctgagaacctacgccgaccagcccatcgacgccgacgtgaccgtgatcggcagcggccccggcggctacgtggccgccatcaaggccgcccagctgggcttcaaggccctgctgaacaacagccactactaccacatggcccacggcaaggacttcgccagcagaggcatcgagatgagcgaggtgagactgaacctggacaagatgatggagcagaagagcaccgccgtgaaggccctgaccggcggcatcgcccacctgttcaagcagaacaaggtggtgcacgtgaacggctacggcaagatcaccggcaagaaccaggtgaccgccaccaaggccgacggcggcacccaggtgatcgacaccaagaacatcctgatcgccaccggcagcgaggtgacccccttccccggcatcaccatcgacgaggacaccatcgtgagcagcaccggcgccctgagcctgaagaaggtgcccgagaagatggtggtgatcggcgccggcgtgatcggcgtggagctgggcagcgtgtggcagagactgggcgccgacgtgaccgccgtggagttcctgggccacgtgggcggcgtgggcatcgacatggagatcagcaagaacttccagagaatcctgcagaagcagggcttcaagttcaagctgaacaccaaggtgaccggcgccaccaagaagagcgacggcaagatcgacgtgagcatcgaggccgccagcggcggcaaggccgaggtgatcacctgcgacgtgctgctggtgtgcatcggcagaagacccttcaccaagaacctgggcctggaggagctgggcatcgagctggaccccagaggcagaatccccgtgaacaccagattccagaccaagatccccaacatctacgccatcggcgacgtggtggccggccccatgctggcccacaaggccgaggacgagggcatcatctgcgtggagggcatggccggcggcgccgtgcacatcgactacaactgcgtgcccagcgtgatctacacccaccccgaggtggcctgggtgggcaagagcgaggagcagctgaaggaggagggcatcgagtacaaggtgggcaagttccccttcgccgccaacagcagagccaagaccaacgccgacaccgacggcatggtgaagatcctgggccagaagagcaccgacagagtgctgggcgcccacatcctgggccccggcgccggcgagatggtgaacgaggccgccctggccctggagtacggcgccagctgcgaggacatcgccagagtgtgccacgcccaccccaccctgagcgaggccttcagagaggccaacctggccgccagcttcggcaagagcatcaacttctag

SEQ ID NO: 108261 - DNA, 1993 bp, Artificial Sequence
  derived and/or modified sequence
gaggggagaccttggcggagcggcggaggcgcccagcggaggtgaaagtattggcggaaaggaaaatacagcggaaaaatgcagagctggagtcgtgtgtactgctccttggccaagagaggccatttcaatcgaatatctcatggcctacagggactttctgcagtgcctctgagaacttacgcagatcagccgattgatgctgatgtaacagttataggttctggtcctggaggatatgttgctgctattaaagctgcccagttaggcttcaaggctttattgaacaactctcattattaccatatggcccatggaaaagattttgcatctagaggaattgaaatgtccgaagttcgcttgaatttagacaagatgatggagcagaagagtactgcagtaaaagctttaacaggtggaattgcccacttattcaaacagaataaggttgttcatgtcaatggatatggaaagataactggcaaaaatcaagtcactgctacgaaagctgatggcggcactcaggttattgatacaaagaacattcttatagccacgggttcagaagttactccttttcctggaatcacgatagatgaagatacaatagtgtcatctacaggtgctttatctttaaaaaaagttccagaaaagatggttgttattggtgcaggagtaataggtgtagaattgggttcagtttggcaaagacttggtgcagatgtgacagcagttgaatttttaggtcatgtaggtggagttggaattgatatggagatatctaaaaactttcaacgcatccttcaaaaacaggggtttaaatttaaattgaatacaaaggttactggtgctaccaagaagtcagatggaaaaattgatgtttctattgaagctgcttctggtggtaaagctgaagttatcacttgtgatgtactcttggtttgcattggccgacgaccctttactaagaatttgggactagaagagctgggaattgaactagatcccagaggtagaattccagtcaataccagatttcaaactaaaattccaaatatctatgccattggtgatgtagttgctggtccaatgctggctcacaaagcagaggatgaaggcattatctgtgttgaaggaatggctggtggtgctgtgcacattgactacaattgtgtgccatcagtgatttacacacaccctgaagttgcttgggttggcaaatcagaagagcagttgaaagaagagggtattgagtacaaagttgggaaattcccatttgctgctaacagcagagctaagacaaatgctgacacagatggcatggtgaagatccttgggcagaaatcgacagacagagtactgggagcacatattcttggaccaggtgctggagaaatggtaaatgaagctgctcttgctttggaatatggagcatcctgtgaagatatagctagagtctgtcatgcacatccgaccttatcagaagcttttagagaagcaaatcttgctgcgtcatttggcaaatcaatcaacttttgaattagaagattatatatatttttttctgaaatttcctgggagcttttgtagaagtcacattcctgaacaggatattctcacagctccaagaatttctaggactgaattatgaaacttttggaaggtatttaataggtttggacaaaatggaatactcttatatctatattttacataaatttagtattttgtttcagtgcactaatgtgtaagacaaaaagctacttattgtagcatcctggaatatctccgtcaactcatattttcatgctgttcatgaaagattcaatgcccctgaatttaaatagcttttttctctgatacagaaaagttgaattttacatggctggagctagaatttgatatgtgaacagttgtgtttgaagcacagtgatcaagttatttttaatttggttttcacattggaaacaagtcagtcattcagatatgattc

SEQ ID NO: 108262 - protein, 461 aa, Artificial Sequence
  derived and/or modified sequence
MQSWSRVYCSLAKRGHFNRISHGLQGLSAVPLRTYADQPIDADVTVIGSGPGGYVAAIKAAQLGFKTVCIEKNETLGGTCLNVGCIPSKALLNNSHYYHMAHGKDFASRGIEMSEVRLNLDKMMEQKSTAVKALTGGIAHLFKQNKIDEDTIVSSTGALSLKKVPEKMVVIGAGVIGVELGSVWQRLGADVTAVEFLGHVGGVGIDMEISKNFQRILQKQGFKFKLNTKVTGATKKSDGKIDVSIEAASGGKAEVITCDVLLVCIGRRPFTKNLGLEELGIELDPRGRIPVNTRFQTKIPNIYAIGDVVAGPMLAHKAEDEGIICVEGMAGGAVHIDYNCVPSVIYTHPEVAWVGKSEEQLKEEGIEYKVGKFPFAANSRAKTNADTDGMVKILGQKSTDRVLGAHILGPGAGEMVNEAALALEYGASCEDIARVCHAHPTLSEAFREANLAASFGKSINF

SEQ ID NO: 108263 - DNA, 1386 bp, Artificial Sequence
  derived and/or modified sequence
atgcagagctggagtcgcgtgtattgttcactcgccaaacgcgggcattttaatcgaatttcacacgggttgcagggtctgagcgccgttccccttagaacctatgcagaccagccaatagatgctgacgtcacagtgatcggttcaggccccggtggatatgtcgctgccattaaggccgctcaacttggcttcaaaaccgtttgtatcgaaaagaatgagactttggggggtacttgtcttaatgtgggatgcatcccctctaaggccttactcaacaacagtcactattatcatatggctcatggcaaagattttgcctctagggggattgagatgagcgaagtaagactcaaccttgacaaaatgatggaacagaagtccactgccgtcaaagctttgactggcggcattgcacacctgtttaaacagaataagatcgatgaggatactatagtgagttcgacgggagccctctcactgaagaaggtgccagaaaagatggtagtaatcggcgctggtgtaattggagtggaattaggctctgtgtggcaacggctcggcgctgacgtcaccgctgtagaattcctcggacatgttggaggcgttgggatcgacatggagataagtaaaaatttccagcggatattgcaaaaacaggggttcaagtttaagttgaacacaaaggtgaccggagcaaccaagaagagcgacgggaagattgatgttagcattgaggctgccagcggcggcaaggcggaggtgataacctgtgacgttctgttagtctgcatcgggcgtcggccttttacaaaaaacctggggctggaagaactggggattgagctggaccctcgcggccgcatacctgtgaacactaggtttcagacaaaaattcccaacatatacgcgatcggcgacgtcgttgctggaccaatgcttgcccacaaggccgaagacgaggggatcatctgcgtggagggcatggcgggcggcgccgtacatatcgactacaactgcgtaccatcggttatctacacacatcctgaagtcgcttgggtgggcaagtcagaggagcagctcaaagaagaagggattgagtataaggttgggaagttcccatttgcagctaatagtcgggcaaagacaaacgccgacacagatggcatggtgaagatacttgggcagaagagtaccgacagggtcctcggagcacacatcttgggaccaggcgccggggaaatggtgaatgaggcagctctggcactcgagtacggcgcaagttgtgaagacatcgccagggtctgccacgcacacccgactctgtccgaagcatttcgagaggctaatctagccgcctcattcggcaaatcaattaacttttag

SEQ ID NO: 108264 - DNA, 1386 bp, Artificial Sequence
  derived and/or modified sequence
atgcagagctggagccgggtgtactgcagcctggccaagaggggccacttcaaccgcatcagccacggcctgcagggcctgtctgctgtgcccctgcggacctacgccgaccagcccattgatgctgatgtgacagtgattggcagcggccctgggggctacgtggccgccatcaaggccgcccagctgggcttcaagacagtgtgcatcgagaagaatgagaccctgggcggcacctgcctgaatgtgggctgcatccccagcaaggccctgctgaacaacagccactactaccacatggcccacggcaaggactttgccagccggggcatcgagatgtctgaggtgcggctgaacctggacaagatgatggagcagaagagcacagctgtgaaggccctgactggaggcatcgcccacctgttcaagcagaacaagattgatgaggacaccatcgtgagcagcactggagccctgagcctgaagaaggtgcctgagaagatggtggtgattggagctggggtcatcggcgtggagctgggctctgtgtggcagaggctgggcgcagatgtgacagctgtggagttcctgggccacgtgggcggcgtgggcatcgacatggagatcagcaagaacttccagaggatcctgcagaagcagggcttcaagttcaagctgaacaccaaggtgactggagccaccaagaagagtgatggcaagattgatgtgtccattgaagctgccagcggcggcaaggccgaggtgatcacctgtgatgtgctgctggtgtgcattggaagaagacccttcaccaagaacctgggcctggaggagctgggcatcgagctggacccccggggccgcatccctgtgaacacccgcttccagaccaagatccccaacatctatgccatcggagatgtggtggccggccccatgctggcccacaaggcagaagatgagggcatcatctgtgtggagggcatggccggcggcgctgtgcacatcgactacaactgtgtgcccagcgtcatctacacccaccctgaggtggcctgggtgggcaagtctgaggagcagctgaaggaggagggcatcgagtacaaggtgggcaagttcccctttgctgccaacagccgggccaagaccaatgctgacacagatggcatggtgaagatcctgggccagaagagcacagacagagtgctgggcgcccacatcctgggccctggggccggggagatggtgaatgaagctgccctggccctggagtatggagccagctgtgaggacatcgcccgggtgtgccacgcccaccccaccctgtctgaggccttccgggaggccaacctggccgccagctttgggaagagcatcaacttctag

SEQ ID NO: 108265 - DNA, 1386 bp, Artificial Sequence
  derived and/or modified sequence
atgcagagctggagccgggtgtactgcagcctggccaagcggggccacttcaaccgtatctcacacggattgcagggcctcagcgccgttccacttcggacctatgccgatcagcccattgacgcggacgtgaccgtgatcggcagcggacccgggggatacgtggccgcaataaaggcagctcagctaggattcaagacagtgtgcattgaaaaaaacgaaactctggggggcacttgtctgaacgtgggctgtattccttctaaagccctcctcaacaacagccattactaccacatggcacacggcaaagattttgcttcccggggcatcgagatgtcagaagtaagactgaatctcgataagatgatggagcaaaaatctacagccgtgaaagcactgactggggggatcgcacatctcttcaaacagaataagatagacgaggatacaatcgtcagttcaaccggggcactttccctcaaaaaggtcccggagaagatggtggtgatcggtgccggcgtaatcggcgtggaactcgggtcagtctggcagcgcctgggagcagacgtgacggcggtggagtttctcggccacgtcggcggggtcggcatcgatatggagatctcaaaaaactttcagagaatcctccagaaacagggtttcaaattcaagctcaacaccaaggtgaccggggctactaaaaagtccgacggtaaaatagatgtgtcaatcgaggccgcgtccggtgggaaagccgaagtaatcacatgcgacgttctgctggtgtgtatcggccgtcggccatttaccaaaaacctgggcctcgaggagctgggcatagagctcgatccaaggggccggatacctgttaatactaggttccaaactaagattcccaacatctatgcaataggagatgtagtggcaggccccatgctggctcacaaagctgaggacgaagggatcatctgtgttgagggaatggcaggaggggctgtacacattgattacaattgtgtcccaagtgttatatatactcatccagaagtcgcctgggttggcaagagcgaagaacaactgaaggaggaaggaattgaatacaaggtgggtaagttcccatttgcagccaatagccgagcgaagaccaatgccgatactgacggcatggtgaaaatcctcggccagaagagtacggaccgggtgctcggtgcacatattctgggacctggcgccggggaaatggtgaacgaagctgccctggccctggagtatggcgcctcgtgtgaagacattgcgcgggtgtgtcacgcgcatcccacgctgtcagaggccttccgcgaggctaacctggctgcctcatttgggaaaagcattaatttttag

SEQ ID NO: 108266 - DNA, 1386 bp, Artificial Sequence
  derived and/or modified sequence
atgcagagttggagcagggtttattgttctctggccaaaaggggccattttaaccgcatctcacacggacttcagggtctatctgccgtgcctctccggacttacgcagaccaacctattgatgccgacgttaccgtgataggcagcggacccggtggttacgttgccgcaattaaggccgctcaattaggatttaagacagtgtgcatagagaagaacgagactctgggcggaacttgccttaacgtgggctgcataccttcaaaggcgctgctgaataatagccattactatcatatggcacacgggaaggatttcgcttcgagaggcatcgagatgagtgaagtacgtcttaaccttgataaaatgatggaacagaagtccaccgctgtcaaggcccttaccggaggaattgctcacttatttaagcagaataaaatagacgaggacactatagtttcctcgaccggtgcactgtctctcaagaaggtcccagagaagatggttgtgataggagcgggtgttattggagttgagctgggcagcgtgtggcaacggttgggggctgacgtgaccgctgttgaattcctgggtcacgtggggggagtaggaatcgatatggaaatatccaagaactttcagcgcattctgcagaagcaggggttcaagttcaagctgaacaccaaagtcaccggagcaacaaagaagtctgacgggaagatagacgtgtcaatcgaagctgcgtccgggggaaaggcggaagtgattacatgtgatgtgctgctggtctgcattgggaggcgaccgtttacaaaaaatctgggcctggaggaactgggcatcgaactagatccaagaggacggatcccagttaacacaagatttcagactaagatcccaaacatctacgccataggggatgtggtcgccggtccaatgttagcacacaaagccgaagacgaagggattatctgtgttgagggcatggctggcggagccgtgcatatcgattataattgtgtcccctcagtcatctatactcacccagaagttgcctgggtgggaaaaagtgaagaacagctgaaagaggaagggatcgaatataaggttggcaagttcccttttgccgctaactcgagagcgaagacgaatgccgatactgatggcatggtgaagatccttggacagaagtcgactgaccgcgtgttaggggctcacatcctcggcccaggtgctggagaaatggtgaatgaggccgcactggcattggagtatggcgctagctgcgaagacatcgcccgagtatgtcatgctcaccctacactgtccgaagcctttcgcgaggcgaacttagctgccagttttggcaagagtattaatttctag

SEQ ID NO: 108267 - DNA, 1386 bp, Artificial Sequence
  derived and/or modified sequence
atgcagagctggagcagagtgtactgcagcctggccaagagaggccacttcaacagaatcagccacggcctgcagggcctgagcgccgtgcccctgagaacctacgccgaccagcccatcgacgccgacgtgaccgtgatcggcagcggccccggcggctacgtggccgccatcaaggccgcccagctgggcttcaagaccgtgtgcatcgagaagaacgagaccctgggcggcacctgcctgaacgtgggctgcatccccagcaaggccctgctgaacaacagccactactaccacatggcccacggcaaggacttcgccagcagaggcatcgagatgagcgaggtgagactgaacctggacaagatgatggagcagaagagcaccgccgtgaaggccctgaccggcggcatcgcccacctgttcaagcagaacaagatcgacgaggacaccatcgtgagcagcaccggcgccctgagcctgaagaaggtgcccgagaagatggtggtgatcggcgccggcgtgatcggcgtggagctgggcagcgtgtggcagagactgggcgccgacgtgaccgccgtggagttcctgggccacgtgggcggcgtgggcatcgacatggagatcagcaagaacttccagagaatcctgcagaagcagggcttcaagttcaagctgaacaccaaggtgaccggcgccaccaagaagagcgacggcaagatcgacgtgagcatcgaggccgccagcggcggcaaggccgaggtgatcacctgcgacgtgctgctggtgtgcatcggcagaagacccttcaccaagaacctgggcctggaggagctgggcatcgagctggaccccagaggcagaatccccgtgaacaccagattccagaccaagatccccaacatctacgccatcggcgacgtggtggccggccccatgctggcccacaaggccgaggacgagggcatcatctgcgtggagggcatggccggcggcgccgtgcacatcgactacaactgcgtgcccagcgtgatctacacccaccccgaggtggcctgggtgggcaagagcgaggagcagctgaaggaggagggcatcgagtacaaggtgggcaagttccccttcgccgccaacagcagagccaagaccaacgccgacaccgacggcatggtgaagatcctgggccagaagagcaccgacagagtgctgggcgcccacatcctgggccccggcgccggcgagatggtgaacgaggccgccctggccctggagtacggcgccagctgcgaggacatcgccagagtgtgccacgcccaccccaccctgagcgaggccttcagagaggccaacctggccgccagcttcggcaagagcatcaacttctag

SEQ ID NO: 108268 - DNA, 1859 bp, Artificial Sequence
  derived and/or modified sequence
aggggagaccttggcggagcggcggaggcgcccagcggaggtgaaagtattggcggaaaggaaaatacagcggaaaaatgcagagctggagtcgtgtgtactgctccttggccaagagaggccatttcaatcgaatatctcatggcctacagggactttctgcagtgcctctgagaacttacgcagatcagccgattgatgctgatgtaacagttataggttctggtcctggaggatatgttgctgctattaaagctgcccagttaggcttcaagacagtctgcattgagaaaaatgaaacacttggtggaacatgcttgaatgttggttgtattccttctaaggctttattgaacaactctcattattaccatatggcccatggaaaagattttgcatctagaggaattgaaatgtccgaagttcgcttgaatttagacaagatgatggagcagaagagtactgcagtaaaagctttaacaggtggaattgcccacttattcaaacagaataagatagatgaagatacaatagtgtcatctacaggtgctttatctttaaaaaaagttccagaaaagatggttgttattggtgcaggagtaataggtgtagaattgggttcagtttggcaaagacttggtgcagatgtgacagcagttgaatttttaggtcatgtaggtggagttggaattgatatggagatatctaaaaactttcaacgcatccttcaaaaacaggggtttaaatttaaattgaatacaaaggttactggtgctaccaagaagtcagatggaaaaattgatgtttctattgaagctgcttctggtggtaaagctgaagttatcacttgtgatgtactcttggtttgcattggccgacgaccctttactaagaatttgggactagaagagctgggaattgaactagatcccagaggtagaattccagtcaataccagatttcaaactaaaattccaaatatctatgccattggtgatgtagttgctggtccaatgctggctcacaaagcagaggatgaaggcattatctgtgttgaaggaatggctggtggtgctgtgcacattgactacaattgtgtgccatcagtgatttacacacaccctgaagttgcttgggttggcaaatcagaagagcagttgaaagaagagggtattgagtacaaagttgggaaattcccatttgctgctaacagcagagctaagacaaatgctgacacagatggcatggtgaagatccttgggcagaaatcgacagacagagtactgggagcacatattcttggaccaggtgctggagaaatggtaaatgaagctgctcttgctttggaatatggagcatcctgtgaagatatagctagagtctgtcatgcacatccgaccttatcagaagcttttagagaagcaaatcttgctgcgtcatttggcaaatcaatcaacttttgaattagaagattatatatatttttttctgaaatttcctgggagcttttgtagaagtcacattcctgaacaggatattctcacagctccaagaatttctaggactgaattatgaaacttttggaaggtatttaataggtttggacaaaatggaatactcttatatctatattttacataaatttagtattttgtttcagtgcactaatgtgtaagacaaaaagctacttattgtagcatcctggaatatctccgtcaactcatattttcatgctgttcatgaaagattcaatgcccctgaatttaaatagcttttttctctgatacagaaaagttgaattttacatggctggagctagaatttgatatgtgaacagttgtgtttgaagcacagtgatc

SEQ ID NO: 108269 - DNA, 936 bp, Artificial Sequence
  derived and/or modified sequence
atgtaccacctggacaaccaccccgagaagcagttcagcaccgacgtgctgaagcaggccatcgagctgagccccgacaaccagtacgtgaaggtgctgctgggcctgaagctgcagaagatgaacaaggaggccgagggcgagcagttcgtggaggaggccctggagaagagcccctgccagaccgacgtgctgagaagcgccgccaagttctacagaagaaagggcgacctggacaaggccatcgagctgttccagagagtgctggagagcacccccaacaacggctacctgtaccaccagatcggctgctgctacaaggccaaggtgagacagatgcagaacaccggcgagagcgaggccagcggcaacaaggagatgatcgaggccctgaagcagtacgccatggactacagcaacaaggccctggagaagggcctgaaccccctgaacgcctacagcgacctggccgagttcctggagaccgagtgctaccagacccccttcaacaaggaggtgcccgacgccgagaagcagcagagccaccagagatactgcaacctgcagaagtacaacggcaagagcgaggacaccgccgtgcagcacggcctggagggcctgagcatcagcaagaagagcaccgacaaggaggagatcaaggaccagccccagaacgtgagcgagaacctgctgccccagaacgcccccaactactggtacctgcagggcctgatccacaagcagaacggcgacctgctgcaggccgccaagtgctacgagaaggagctgggcagactgctgagagacgcccccagcggcatcggcagcatcttcctgagcgccagcgagctggaggacggcagcgaggagatgggccagggcgccgtgagcagcagccccagagagctgctgagcaacagcgagcagctgaactag

SEQ ID NO: 108270 - DNA, 936 bp, Artificial Sequence
  derived and/or modified sequence
atgtaccatctcgataatcaccccgaaaaacagttttccaccgatgtcctcaaacaggctatagaactctcaccagacaatcagtacgttaaggtcttgctggggctgaaactgcaaaagatgaataaggaagccgagggcgagcagtttgtagaggaggccctggagaagagtccttgccaaactgacgtattgagatccgcagcgaagttttatcgtaggaaaggggatctagataaggcaattgagctattccaacgtgtgctcgaatccacccccaataatggatatctgtatcaccagattgggtgctgctataaggctaaggtgcgccaaatgcagaatacaggagaatctgaggccagtggcaataaggagatgatcgaggccttgaaacaatatgcaatggactattctaataaagcactagaaaaaggtctgaatcccttgaacgcctacagcgaccttgctgaattcctggagacggaatgctaccagaccccatttaataaggaggtgcctgatgctgaaaaacagcagtcccaccagcggtactgcaatctgcagaagtacaatggcaaaagcgaagatacggccgtacaacacggcctcgaggggctgagtatctccaaaaagtccacagacaaggaggagatcaaggaccaacctcagaatgtgtccgagaatctgcttccacaaaacgcacccaattactggtatctacagggactgatccataagcagaacggcgatctactccaagctgccaaatgttacgaaaaggagttggggaggctactaagggacgcaccgagcggtatcggaagcatcttcctgtcagcttccgagctagaggatggcagcgaggagatgggacagggagctgtgtcttcttcaccacgggagctgttgtccaatagcgagcaactgaattag

SEQ ID NO: 108271 - DNA, 936 bp, Artificial Sequence
  derived and/or modified sequence
atgtaccacctggacaaccaccctgagaagcagttcagcacagatgtgctgaagcaggccatcgagctgagcccagacaaccagtatgtgaaggtgctgctgggcctgaagctgcagaagatgaacaaggaggccgagggggagcagtttgtggaggaggccctggagaagagcccctgccagacagatgtgctgcggtctgctgccaagttctacagaagaaaaggagacctggacaaggccatcgagctgttccagagggtgctggagagcacccccaacaacggctacctgtaccaccagatcggctgctgctacaaggccaaggtgcggcagatgcagaacacaggagagagcgaggccagcggcaacaaggagatgattgaggccctgaagcagtatgccatggactacagcaacaaggccctggagaagggcctgaaccccctgaatgcctacagcgacctggccgagttcctggagacagagtgctaccagacccccttcaacaaggaggtgcctgatgctgagaagcagcagagccaccagcgctactgcaacctgcagaagtacaacgggaagtctgaggacacagctgtgcagcacggcctggagggcctgagcatcagcaagaagagcacagacaaggaggagatcaaggaccagccccagaatgtgtctgagaacctgctgccccagaatgcccccaactactggtacctgcagggcctcatccacaagcagaatggagacctgctgcaggccgccaagtgctatgagaaggagctgggccgcctgctgagagatgcccccagcggcatcggcagcatcttcctgagcgccagcgagctggaggatggcagcgaggagatgggccagggcgctgtgagcagcagcccccgggagctgctgagcaacagcgagcagctgaactag

SEQ ID NO: 108272 - DNA, 936 bp, Artificial Sequence
  derived and/or modified sequence
atgtaccacctggacaaccaccccgagaagcagttcagcaccgacgttcttaagcaggccattgagctttcaccagataatcagtatgttaaagtgctgttaggcttgaagctacaaaaaatgaacaaggaggccgagggtgagcagttcgtggaagaggctctcgaaaaaagcccatgccaaacagacgtgctcagaagtgccgcaaagttctacaggcggaagggcgaccttgacaaggccattgagctctttcagagagtgttagagagcaccccaaataacggctatttgtaccaccagatcgggtgttgttataaagccaaggtacgccagatgcagaatacaggagagagtgaggccagcggcaataaagaaatgattgaggcactcaagcagtacgctatggattactcaaacaaagcgctggagaagggtcttaacccacttaatgcatacagtgatttagctgagttcctggagaccgagtgttaccagacacccttcaataaagaagtgccagacgctgagaaacagcagagtcaccagaggtactgcaatttgcaaaagtacaacgggaaatcagaagatactgccgttcaacatggccttgaaggcttatctatatccaagaagtctaccgacaaagaggagattaaggaccagccacagaacgtttccgaaaatcttcttccacaaaacgcgcctaactactggtatctgcagggtttgattcacaagcaaaacggagaccttctccaggcagccaagtgctatgagaaggagttaggccgcctgctccgagatgccccaagcgggattggcagcatcttcctgagtgcctctgaattagaagatggaagcgaggagatgggacagggtgccgtcagttcctctccccgagaacttctgtctaattcggaacagctgaactag

SEQ ID NO: 108273 - DNA, 936 bp, Artificial Sequence
  derived and/or modified sequence
atgtaccacttggacaaccacccagagaagcaattctcgactgacgtactaaaacaagctattgagctctcgcccgataatcagtatgtgaaggttttgttgggtctgaaactccagaagatgaacaaggaggcggaaggcgagcagtttgtcgaagaggccctcgaaaaatccccctgtcagaccgacgtcctgaggtccgcagcgaagttctatcgcaggaagggggacttggataaagcgatagaattgttccaacgagtgcttgaaagtactccgaacaatgggtacctgtaccaccagataggctgttgctacaaggcaaaagtcaggcaaatgcaaaatacaggggagagtgaagctagtggaaataaagaaatgatcgaggcccttaagcagtacgctatggattatagtaacaaagcccttgagaaaggtttaaatccgctgaatgcatattccgacctagccgaatttttagagaccgagtgttatcagactcctttcaataaagaggtgcctgatgccgaaaaacaacagtcccaccagagatactgcaatctgcagaaatacaacgggaaatctgaagatacggcagttcagcatggcttagagggcctaagtatctcgaagaaatcaaccgacaaggaggagatcaaggaccagcctcagaacgttagcgagaacctgctgccgcaaaacgctcctaattattggtacttgcagggactcattcataaacagaacggggatcttctgcaggccgcaaagtgctacgagaaggagctgggacgattgctgcgcgatgcaccttcaggtatcgggagcatctttctgagcgcaagtgaacttgaagacggaagtgaagagatgggacagggcgctgtgtcctctagtccaagggagttactctctaacagtgagcagctcaactag

SEQ ID NO: 108274 - DNA, 1735 bp, Artificial Sequence
  derived and/or modified sequence
cccctttcataaaagcacagacctaacagcaccctgggtggaaacctcttcagcatttgcttggaatcagtaagctaaaaacaaaatcaaccgggaccccagcttttcagaactgcagggaaacagccatcatgagtgaggtcaccaagaattccctggagaaaatccttccacagctgaaatgccatttcacctggaacttattcaaggaagacagtgtctcaagggatctagaagatagagtgtgtaaccagattgaatttttaaacactgagttcaaagctacaatgtacaacttgttggcctacataaaacacctagatggtaacaacgaggcagccctggaatgcttacggcaagctgaagagttaatccagcaagaacatgctgaccaagcagaaatcagaagtctagtcacttggtgaaacaaacctgcaagaaattttcaaatccatacagtattgagtattctgaacttgactgtgaggaagggtggacacaactgaagtgtggaagaaatgaaagggcgaaggtgtgttttgagaaggctctggaagaaaagcccaacaacccagaattctcctctggactggcaattgcgatgtaccatctggataatcacccagagaaacagttctctactgatgttttgaagcaggccattgagctgagtcctgataaccaatacgtcaaggttctcttgggcctgaaactgcagaagatgaataaagaagctgaaggagagcagtttgttgaagaagccttggaaaagtctccttgccaaacagatgtcctccgcagtgcagccaaattttacagaagaaaaggtgacctagacaaagctattgaactgtttcaacgggtgttggaatccacaccaaacaatggctacctctatcaccagattgggtgctgctacaaggcaaaagtaagacaaatgcagaatacaggagaatctgaagctagtggaaataaagagatgattgaagcactaaagcaatatgctatggactattcgaataaagctcttgagaagggactgaatcctctgaatgcatactccgatctcgctgagttcctggagacggaatgttatcagacaccattcaataaggaagtccctgatgctgaaaagcaacaatcccatcagcgctactgcaaccttcagaaatataatgggaagtctgaagacactgctgtgcaacatggtttagagggtttgtccataagcaaaaaatcaactgacaaggaagagatcaaagaccaaccacagaatgtatctgaaaatctgcttccacaaaatgcaccaaattattggtatcttcaaggattaattcataagcagaatggagatctgctgcaagcagccaaatgttatgagaaggaactgggccgcctgctaagggatgccccttcaggcataggcagtattttcctgtcagcatctgagcttgaggatggtagtgaggaaatgggccagggcgcagtcagctccagtcccagagagctcctctctaactcagagcaactgaactgagacagaggaggaaaacagagcatcagaagcctgcagtggtggttgtgacgggtaggacgataggaagacagggggccccaacctgggattgctgagcagggaagctttgcatgttgctctaaggtacatttttaaagagttgttttttggccgggcgcagtggctcatgcctgtaatcccagcactttgggaggccga

SEQ ID NO: 108275 - protein, 319 aa, Artificial Sequence
  derived and/or modified sequence
MLFWVLGLLILCGFLWTRKGKLKIEDITDKYIFITGCDSGFGNLAARTFDKKGFHVIAACLTESGSTALKAETSERLRTVLLDVTDPENVKRTAQWVKNQVGEKGLWGLINNAGVPGVLAPTDWLTLEDYREPIEVNLFGLISVTLNMLPLVKKAQGRVINVSSVGGRLAIVGGGYTPSKYAVEGFNDSLRRDMKAFGVHVSCIEPGLFKTNLADPVKVIEKKLAIWEQLSPDIKQQYGEGYIEKSLDKLKGNKSYVNMDLSPVVECMDHALTSLFPKTHYAAGKDAKIFWIPLSHMPAALQDFLLLKQKAELANPKAV

SEQ ID NO: 108276 - protein, 379 aa, Artificial Sequence
  derived and/or modified sequence
MPEGRSHCACSITSLTLLVSLTRVTLDILQKLDPPQPAHWRHHLLVLYKKGVYLSHTGGKMLFWVLGLLILCGFLWTRKGKLKIEDITDKYIFITGCDSGFGNLAARTFDKKGFHVIAACLTESGSTALKAETSERLRTVLLDVTDPENVKRTAQWVKNQVGEKGLWGLINNAGVPGVLAPTDWLTLEDYREPIEVNLFGLISVTLNMLPLVKKAQGRVINVSSVGGRLAIVGGGYTPSKYAVEGFNDSLRRDMKAFGVHVSCIEPGLFKTNLADPVKVIEKKLAIWEQLSPDIKQQYGEGYIEKSLDKLKGNKSYVNMDLSPVVECMDHALTSLFPKTHYAAGKDAKIFWIPLSHMPAALQDFLLLKQKAELANPKAV

SEQ ID NO: 108277 - protein, 66 aa, Artificial Sequence
  derived and/or modified sequence
MLFWVLGLLILCGFLWTRKGKLKIEDITDKYIFITGCDSGFGNLAARTFDKKGFHVIAACLTESGS

SEQ ID NO: 108278 - DNA, 1140 bp, Artificial Sequence
  derived and/or modified sequence
atgccagaaggacgctcacactgcgcctgttctattaccagtctcacactcctggtcagcctcacccgcgtgacactggatatcctgcagaaattggatcctcctcagcctgctcattggcgacaccacctgctggtactgtacaagaaaggggtctacctgagtcatactggaggaaagatgctattttgggtgctgggtctactcatcctctgcggattcttgtggacccgtaaaggaaagctgaagattgaggacattacagacaaatacatattcatcacaggatgcgatagtgggtttgggaacctggcagccagaacctttgataaaaaaggatttcacgtcatcgccgcctgcctcactgagtctggcagcaccgctctgaaagccgagacctctgaacgcctcagaaccgttctcctggacgtaactgaccccgaaaatgtcaagaggacggcccagtgggttaagaatcaggtaggagagaagggcttatggggcctaattaacaacgccggtgtcccaggcgtgctggcccccacagactggctaacactggaagactatagggaacccatcgaggtcaacctgtttggcttgatttctgttaccctgaatatgctcccactggtcaagaaagcccaggggagggttataaacgtgagttccgtgggaggcagactagcaattgtgggagggggctatacaccttccaagtatgccgtggaggggttcaacgactctctgcggcgggatatgaaggcttttggggtccacgttagttgcattgagccagggctgttcaaaacaaacttggctgatcctgttaaagtgatcgagaagaagctcgctatttgggagcagctgtctcccgatatcaagcagcagtatggagaaggctacattgagaaatctctcgacaaattgaagggcaacaaatcatatgtcaatatggatttgagtcctgttgtggagtgtatggatcacgctctgacaagcctttttccaaagactcactacgctgctggtaaggacgcgaagatcttttggatcccactgtcgcacatgcctgcagcccttcaggattttctgctccttaagcagaaagccgaactggccaatcctaaagccgtttag

SEQ ID NO: 108279 - DNA, 1140 bp, Artificial Sequence
  derived and/or modified sequence
atgcctgagggccgcagccactgtgcctgcagcatcaccagcctgaccctgctggtgtccctgaccagggtgaccctggacatcctgcagaagctggaccccccccagcctgcccactggaggcaccacctgctggtgctgtacaagaagggcgtgtacctgagccacactggaggcaagatgctgttctgggtgctgggcctgctgatcctgtgtggcttcctgtggaccaggaagggcaagctgaagattgaggacatcacagacaagtacatcttcatcaccggctgtgacagcggctttggaaacctggccgcccggacctttgacaagaagggcttccacgtgattgctgcctgcctgacagagagcggcagcacagccctgaaggccgagaccagcgagcggctgaggacagtgctgctggatgtgacagatcctgaaaatgtgaagaggacagcccagtgggtgaagaaccaggtgggggagaagggcctgtggggcctcatcaacaatgccggcgtgcctggggtgctggcccccacagactggctgaccctggaggactaccgggagcccatcgaggtgaacctgtttggcctcatctctgtgaccctgaacatgctgcccctggtgaagaaggcccagggccgggtcatcaacgtgtcctctgtgggcggccgcctggccatcgtgggcggcggctacacccccagcaaatatgctgtggagggcttcaatgacagcctgcggcgggacatgaaggcctttggagtgcacgtgtcctgcatcgagcccggcctcttcaagaccaacctggccgaccctgtgaaggtgattgagaagaagctggccatctgggagcagctgagcccagacatcaagcagcagtacggggagggctacatcgagaagagcctggacaagctgaagggcaacaagagctatgtgaacatggacctgagccctgtggtggagtgcatggaccacgccctgaccagcctcttccccaagacccactacgccgccggcaaggatgccaagatcttctggatccccctgagccacatgcctgctgccctgcaggacttcctgctgctgaagcagaaggccgagctggccaaccccaaggctgtgtag

SEQ ID NO: 108280 - DNA, 1140 bp, Artificial Sequence
  derived and/or modified sequence
atgcccgagggccggagccactgcgcctgcagcatcaccagcctgacactattagtgtccctaacaagggtaacactcgatattctgcaaaaattagacccacctcaaccagctcattggagacaccaccttctagtcctatacaagaagggcgtgtatctcagccacaccggcggaaagatgcttttctgggtcctcggtcttctcattctgtgcggttttctgtggaccaggaagggtaagctcaagatagaagatattaccgataaatatatcttcatcaccggctgcgactcaggctttggcaacctggcagcaaggacgttcgataaaaaaggctttcacgtgatcgctgcatgtctgactgaaagcgggtctacagctctgaaggcagagacttctgagaggttaagaacagtccttctggacgtgaccgatcctgagaacgtgaagcgaacagcccagtgggtgaaaaatcaggtgggcgaaaagggtctttggggcttgattaataatgcaggcgtacccggggttctggcacctaccgactggctcacactggaggattacagggaaccaatcgaagtcaatttgtttgggctcatcagcgtgaccttgaacatgcttccattggtcaagaaggcccaaggccgggtgattaatgtgtcttctgtcggagggaggctggcaatcgttgggggaggatacactccgtctaagtacgcggttgagggcttcaacgactctctgcggcgggacatgaaggcgtttggtgtgcacgttagctgtattgaacctggactctttaaaaccaatcttgctgaccccgtgaaggtgatcgaaaagaaactggccatctgggagcaactttcccccgatattaagcaacagtatggagaaggttacatcgaaaagagcctagacaagctgaagggcaacaaaagctacgtgaatatggatctgtcgcctgtggtggagtgcatggaccacgcgttaacatcactgtttcccaagacacattatgcagccggaaaagacgctaagatcttttggattcctctgagtcacatgccggcagcattgcaggattttctacttctgaaacaaaaggccgagctggctaacccaaaagccgtctag

SEQ ID NO: 108281 - DNA, 1140 bp, Artificial Sequence
  derived and/or modified sequence
atgccagagggaaggtcacattgcgcatgctccattacttctctcacacttctcgtctctcttaccagggtgaccctggacatccttcagaaactcgaccctcctcaaccggctcactggcgacatcacctactggtgctgtataagaagggagtgtatctaagccacactggagggaagatgctgttttgggttctgggcctgctgatcctatgcggattcctatggactcgtaaaggcaaattgaagattgaggatatcacagataaatatatatttatcactggatgcgatagcggatttggaaacctggcagccagaacgtttgataagaaggggttccacgtaatagcagcatgtctcactgagagtggctctacagccctaaaggcagagacatccgagcggctgagaaccgtgctgttagatgtgaccgatccagaaaacgttaagcgcactgctcagtgggtgaagaaccaggtaggagagaaagggctttggggactaattaataacgcaggcgtcccaggggtactggcccctactgactggttaactctagaagattatagagaaccaatcgaggtaaacctgtttgggttaatcagtgtcacgctgaacatgctgcctttagtgaagaaggctcagggaagggtgattaatgtgagttccgtgggcggacgactggcgatcgtaggtggtggttatacacccagtaagtatgctgtcgaaggattcaacgactcgctccggcgagatatgaaggcttttggcgtgcatgtaagctgtattgagccaggcctttttaagaccaatttggctgaccctgtcaaggttattgaaaagaaactcgccatttgggagcagctctcacctgatatcaagcagcagtatggggagggatacatcgagaaatctttggacaaattaaaaggaaataaaagctatgtcaatatggatctgagtccggtcgtggagtgcatggaccatgcactgactagtctgtttcctaaaacccactacgccgctggtaaggatgccaagatcttctggatcccgctgtctcacatgccagcagccctgcaagactttctgctattgaagcagaaagctgagctggctaaccctaaggccgtctag

SEQ ID NO: 108282 - DNA, 1140 bp, Artificial Sequence
  derived and/or modified sequence
atgcccgagggcagaagccactgcgcctgcagcatcaccagcctgaccctgctggtgagcctgaccagagtgaccctggacatcctgcagaagctggaccccccccagcccgcccactggagacaccacctgctggtgctgtacaagaagggcgtgtacctgagccacaccggcggcaagatgctgttctgggtgctgggcctgctgatcctgtgcggcttcctgtggaccagaaagggcaagctgaagatcgaggacatcaccgacaagtacatcttcatcaccggctgcgacagcggcttcggcaacctggccgccagaaccttcgacaagaagggcttccacgtgatcgccgcctgcctgaccgagagcggcagcaccgccctgaaggccgagaccagcgagagactgagaaccgtgctgctggacgtgaccgaccccgagaacgtgaagagaaccgcccagtgggtgaagaaccaggtgggcgagaagggcctgtggggcctgatcaacaacgccggcgtgcccggcgtgctggcccccaccgactggctgaccctggaggactacagagagcccatcgaggtgaacctgttcggcctgatcagcgtgaccctgaacatgctgcccctggtgaagaaggcccagggcagagtgatcaacgtgagcagcgtgggcggcagactggccatcgtgggcggcggctacacccccagcaagtacgccgtggagggcttcaacgacagcctgagaagagacatgaaggccttcggcgtgcacgtgagctgcatcgagcccggcctgttcaagaccaacctggccgaccccgtgaaggtgatcgagaagaagctggccatctgggagcagctgagccccgacatcaagcagcagtacggcgagggctacatcgagaagagcctggacaagctgaagggcaacaagagctacgtgaacatggacctgagccccgtggtggagtgcatggaccacgccctgaccagcctgttccccaagacccactacgccgccggcaaggacgccaagatcttctggatccccctgagccacatgcccgccgccctgcaggacttcctgctgctgaagcagaaggccgagctggccaaccccaaggccgtgtag

SEQ ID NO: 108283 - DNA, 2864 bp, Artificial Sequence
  derived and/or modified sequence
atctgaaaaattaataattccttaattatcaaatatccattatttaaatttataattgtgtcataaatattgtcataaatagatttgctgttttaaagcttgttccttcattttctctgttttgttttagataaacattgtcataaatagatttgttgttttaaagcttgttccttcattttctctgattgttttgttttagattcagaggttacttatgcttgtttgttacatggatgttacatgtgtaatgggggatattggacttctagtgtactcatcacccatatactgaacactgtactcaaaagggattgaaagaaactaggaaacttggcaggaagatcattcttaagccaggaaaaaaatttttaatgctcacatgtgaacatgtgatggtcataccagaaggagcacccacctccctccctctgtgacagacacattttcttagccttcacctttccttctttcaagttgctgaaaatccacagtgtttctgttcatttgttactttcattctcacctatcttctctcttgctccatctaccagaacaataattccccatataatacttctcacttcacttttcaacgcaggacctcttgttgggtctgatctgtttgtctgtccgctttatcaatattatcagatgtaagtttacatgaatacacacacatattcactaaactgaggggaaaaaatgccttgtaggtcataaaaaagcagggaaattcccaacaattcatatttgatccctggatccaggggtggcagcaataagcctgctttagatatttactccccattttatgatccggtggtttggtttttcaaatgatgatatggctcctttcgcaatgacttgatgtttaggaggtgtgcttcaataaatacattttaaaatcaacaatcaagttagagttgtacaaatggctctgaaatgtcccactacactgttagaccaagggcacagattgtgcttctgtactatttatcctagtatccctcggcatatattaactgctctaaaaatctccttggctacacgctgcatcaaatcaaagttaaatgttataccacctttctattctatttttaatattcaaagagggtgctcagattttagaacaaatttcaatgtttaagtacacacaaaaaaatcattaactcatatatttcaagagtaggaaatgggaactggtgttaaaactcttataacaaatgtcactgtcttaagggacagtgtttaaaaacgcatacctggccgggcgcggtggctcatgcctgtaatcccagcactttgggaggccgaggccggcggatcacaaggaaaacaaactcaggaagaaaaagaaaagcagaagtgatcaaggagagcgctcgagttgcaatattttcctttggctgctgacaggcagttactataaagcattgtgcatggacaccatcttcttgtattatacaagaaaggagtgtacctatcacacacagggggaaaaatgctcttttgggtgctaggcctcctaatcctctgtggttttctgtggactcgtaaaggaaaactaaagattgaagacatcactgataagtacatttttatcactggatgtgactcgggctttggaaacttggcagccagaacttttgataaaaagggatttcatgtaatcgctgcctgtctgactgaatcaggatcaacagctttaaaggcagaaacctcagagagacttcgtactgtgcttctggatgtgaccgacccagagaatgtcaagaggactgcccagtgggtgaagaaccaagttggggagaaaggtctctggggtctgatcaataatgctggtgttcccggcgtgctggctcccactgactggctgacactagaggactacagagaacctattgaagtgaacctgtttggactcatcagtgtgacactaaatatgcttcctttggtcaagaaagctcaagggagagttattaatgtctccagtgttggaggtcgccttgcaatcgttggagggggctatactccatccaaatatgcagtggaaggtttcaatgacagcttaagacgggacatgaaagcttttggtgtgcacgtctcatgcattgaaccaggattgttcaaaacaaacttggcagatccagtaaaggtaattgaaaaaaaactcgccatttgggagcagctgtctccagacatcaaacaacaatatggagaaggttacattgaaaaaagtctagacaaactgaaaggcaataaatcctatgtgaacatggacctctctccggtggtagagtgcatggaccacgctctaacaagtctcttccctaagactcattatgccgctggaaaagatgccaaaattttctggatacctctgtctcacatgccagcagctttgcaagactttttattgttgaaacagaaagcagagctggctaatcccaaggcagtgtgactcagctaaccacaaatgtctcctccaggctatgaaattggccgatttcaagaacacatctccttttcaaccccattccttatctgctccaacctggactcatttagatcgtgcttatttggattgcaaaagggagtcccaccatcgctggtggtatcccagggtccctgctcaagttttctttgaaaaggagggctggaatggtacatcacataggcaagtcctgccctgtatttaggctttgcctgcttggtgtgatgtaagggaaattgaaagacttgcccattcaaaatgatctttaccgtggcctgccccatgcttatggtccccagcatttacagtaacttgtgaatgttaagtatcatctcttatctaaatattaaaagataagtcaaacatt

SEQ ID NO: 108284 - DNA, 1917 bp, Artificial Sequence
  derived and/or modified sequence
aggaagaaaatataaagtacacttttaaaacatgaagtcttcatagcagcttatagtcgttcagagaaacatgttccactgagaatgacttgagagagaggattacatcattatgccagaaggaagaagccactgtgcatgctctatcaccagcctcaccctcctggtcagccttacaagagtgacactggatatactccagaagttggacccaccacagcctgcacactggacttcttggcttttatgagctattcaagagatatttagtcatcacgttgtgtcacaatgggagtgactcacagagcaaggagagaacctgaggattcctcacacatgtagtactcagagctctacggaaacccaggcacctcgacctcaagaggatcagcctggccagggtggcacaactcttccttccccgtgcacagcaggaaagctgccatcagctgagcaagtccaccaacagtttctgtgtcccacttcatctttaataaggacaccatcttcttgtattatacaagaaaggagtgtacctatcacacacagggggaaaaatgctcttttgggtgctaggcctcctaatcctctgtggttttctgtggactcgtaaaggaaaactaaagattgaagacatcactgataagtacatttttatcactggatgtgactcgggctttggaaacttggcagccagaacttttgataaaaagggatttcatgtaatcgctgcctgtctgactgaatcaggatcaacagctttaaaggcagaaacctcagagagacttcgtactgtgcttctggatgtgaccgacccagagaatgtcaagaggactgcccagtgggtgaagaaccaagttggggagaaaggtctctggggtctgatcaataatgctggtgttcccggcgtgctggctcccactgactggctgacactagaggactacagagaacctattgaagtgaacctgtttggactcatcagtgtgacactaaatatgcttcctttggtcaagaaagctcaagggagagttattaatgtctccagtgttggaggtcgccttgcaatcgttggagggggctatactccatccaaatatgcagtggaaggtttcaatgacagcttaagacgggacatgaaagcttttggtgtgcacgtctcatgcattgaaccaggattgttcaaaacaaacttggcagatccagtaaaggtaattgaaaaaaaactcgccatttgggagcagctgtctccagacatcaaacaacaatatggagaaggttacattgaaaaaagtctagacaaactgaaaggcaataaatcctatgtgaacatggacctctctccggtggtagagtgcatggaccacgctctaacaagtctcttccctaagactcattatgccgctggaaaagatgccaaaattttctggatacctctgtctcacatgccagcagctttgcaagactttttattgttgaaacagaaagcagagctggctaatcccaaggcagtgtgactcagctaaccacaaatgtctcctccaggctatgaaattggccgatttcaagaacacatctccttttcaaccccattccttatctgctccaacctggactcatttagatcgtgcttatttggattgcaaaagggagtcccaccatcgctggtggtatcccagggtccctgctcaagttttctttgaaaaggagggctggaatggtacatcacataggcaagtcctgccctgtatttaggctttgcctgcttggtgtgatgtaagggaaattgaaagacttgcccattcaaaatgatctttaccgtggcctgccccatgcttatggtccccagcatttacagtaacttgtgaatgttaagtatcatctcttatctaaatattaaaagataagtcaaacatt

SEQ ID NO: 108285 - DNA, 1465 bp, Artificial Sequence
  derived and/or modified sequence
agattttaagcccattctgcagtggaatttcatgaactagcaagaggacaccatcttcttgtattatacaagaaaggagtgtacctatcacacacagggggaaaaatgctcttttgggtgctaggcctcctaatcctctgtggttttctgtggactcgtaaaggaaaactaaagattgaagacatcactgataagtacatttttatcactggatgtgactcgggctttggaaacttggcagccagaacttttgataaaaagggatttcatgtaatcgctgcctgtctgactgaatcaggatcaacagctttaaaggcagaaacctcagagagacttcgtactgtgcttctggatgtgaccgacccagagaatgtcaagaggactgcccagtgggtgaagaaccaagttggggagaaaggtctctggggtctgatcaataatgctggtgttcccggcgtgctggctcccactgactggctgacactagaggactacagagaacctattgaagtgaacctgtttggactcatcagtgtgacactaaatatgcttcctttggtcaagaaagctcaagggagagttattaatgtctccagtgttggaggtcgccttgcaatcgttggagggggctatactccatccaaatatgcagtggaaggtttcaatgacagcttaagacgggacatgaaagcttttggtgtgcacgtctcatgcattgaaccaggattgttcaaaacaaacttggcagatccagtaaaggtaattgaaaaaaaactcgccatttgggagcagctgtctccagacatcaaacaacaatatggagaaggttacattgaaaaaagtctagacaaactgaaaggcaataaatcctatgtgaacatggacctctctccggtggtagagtgcatggaccacgctctaacaagtctcttccctaagactcattatgccgctggaaaagatgccaaaattttctggatacctctgtctcacatgccagcagctttgcaagactttttattgttgaaacagaaagcagagctggctaatcccaaggcagtgtgactcagctaaccacaaatgtctcctccaggctatgaaattggccgatttcaagaacacatctccttttcaaccccattccttatctgctccaacctggactcatttagatcgtgcttatttggattgcaaaagggagtcccaccatcgctggtggtatcccagggtccctgctcaagttttctttgaaaaggagggctggaatggtacatcacataggcaagtcctgccctgtatttaggctttgcctgcttggtgtgatgtaagggaaattgaaagacttgcccattcaaaatgatctttaccgtggcctgccccatgcttatggtccccagcatttacagtaacttgtgaatgttaagtatcatctcttatctaaatattaaaagataagtcaaacatt

SEQ ID NO: 108286 - DNA, 1678 bp, Artificial Sequence
  derived and/or modified sequence
atgtagtactcagagctctacggaaacccaggcacctcgacctcaagaggatcagcctggccagggtggcacaactcttccttccccgtgcacagcaggaaagctgccatcagctgagcaagtccaccaacagtttctgtgtcccacttcatctttaataagtttgaagataattgggagtctgacagaacaattaaaattgaattattgtttctaatagattttaagcccattctgcagtggaatttcatgaactagcaagaggacaccatcttcttgtattatacaagaaaggagtgtacctatcacacacagggggaaaaatgctcttttgggtgctaggcctcctaatcctctgtggttttctgtggactcgtaaaggaaaactaaagattgaagacatcactgataagtacatttttatcactggatgtgactcgggctttggaaacttggcagccagaacttttgataaaaagggatttcatgtaatcgctgcctgtctgactgaatcaggatcaacagctttaaaggcagaaacctcagagagacttcgtactgtgcttctggatgtgaccgacccagagaatgtcaagaggactgcccagtgggtgaagaaccaagttggggagaaaggtctctggggtctgatcaataatgctggtgttcccggcgtgctggctcccactgactggctgacactagaggactacagagaacctattgaagtgaacctgtttggactcatcagtgtgacactaaatatgcttcctttggtcaagaaagctcaagggagagttattaatgtctccagtgttggaggtcgccttgcaatcgttggagggggctatactccatccaaatatgcagtggaaggtttcaatgacagcttaagacgggacatgaaagcttttggtgtgcacgtctcatgcattgaaccaggattgttcaaaacaaacttggcagatccagtaaaggtaattgaaaaaaaactcgccatttgggagcagctgtctccagacatcaaacaacaatatggagaaggttacattgaaaaaagtctagacaaactgaaaggcaataaatcctatgtgaacatggacctctctccggtggtagagtgcatggaccacgctctaacaagtctcttccctaagactcattatgccgctggaaaagatgccaaaattttctggatacctctgtctcacatgccagcagctttgcaagactttttattgttgaaacagaaagcagagctggctaatcccaaggcagtgtgactcagctaaccacaaatgtctcctccaggctatgaaattggccgatttcaagaacacatctccttttcaaccccattccttatctgctccaacctggactcatttagatcgtgcttatttggattgcaaaagggagtcccaccatcgctggtggtatcccagggtccctgctcaagttttctttgaaaaggagggctggaatggtacatcacataggcaagtcctgccctgtatttaggctttgcctgcttggtgtgatgtaagggaaattgaaagacttgcccattcaaaatgatctttaccgtggcctgccccatgcttatggtccccagcatttacagtaacttgtgaatgttaagtatcatctcttatctaaatattaaaagataagtcaa

SEQ ID NO: 108287 - DNA, 1402 bp, Artificial Sequence
  derived and/or modified sequence
atagcagcttatagtcgttcagagaaacatgttccactgagaatgacttgagagagaggattacatcattatgccagaaggaagaagccactgtgcatgctctatcaccagcctcaccctcctggtcagccttacaagagtgacactggatatactccagaagttggacccaccacagcctgcacactggagacaccatcttcttgtattatacaagaaaggagtgtacctatcacacacagggggaaaaatgctcttttgggtgctaggcctcctaatcctctgtggttttctgtggactcgtaaaggaaaactaaagattgaagacatcactgataagtacatttttatcactggatgtgactcgggctttggaaacttggcagccagaacttttgataaaaagggatttcatgtaatcgctgcctgtctgactgaatcaggatcaacagctttaaaggcagaaacctcagagagacttcgtactgtgcttctggatgtgaccgacccagagaatgtcaagaggactgcccagtgggtgaagaaccaagttggggagaaaggtctctggggtctgatcaataatgctggtgttcccggcgtgctggctcccactgactggctgacactagaggactacagagaacctattgaagtgaacctgtttggactcatcagtgtgacactaaatatgcttcctttggtcaagaaagctcaagggagagttattaatgtctccagtgttggaggtcgccttgcaatcgttggagggggctatactccatccaaatatgcagtggaaggtttcaatgacagcttaagacgggacatgaaagcttttggtgtgcacgtctcatgcattgaaccaggattgttcaaaacaaacttggcagatccagtaaaggtaattgaaaaaaaactcgccatttgggagcagctgtctccagacatcaaacaacaatatggagaaggttacattgaaaaaagtctagacaaactgaaaggcaataaatcctatgtgaacatggacctctctccggtggtagagtgcatggaccacgctctaacaagtctcttccctaagactcattatgccgctggaaaagatgccaaaattttctggatacctctgtctcacatgccagcagctttgcaagactttttattgttgaaacagaaagcagagctggctaatcccaaggcagtgtgactcagctaaccacaaatgtctcctccaggctatgaaattggccgatttcaagaacacatctccttttcaaccccattccttatctgctccaacctggactcatttagatcgtgcttatttggattgcaaaagggagtcccaccatcgctggtggtatcccagggtccctgctcaagttttctttgaaaagga

SEQ ID NO: 108288 - DNA, 1817 bp, Artificial Sequence
  derived and/or modified sequence
atttatttttaagaaacagaggaaggtgaataagagaagtgaaattaaataatcctattttaacttttttactaggaaaacaaactcaggaagaaaaagaaaagcagaagtgatcaaggagagcgctcgagttgcaatattttcctttggctgctgacaggcagttactataaagcattgtgcatggtaggaaaatggaggctaagaaaagttaatttgtccgagggccctctgatgatagtgaaactgggatggaacctctgcctgcttgcttctgaggtctgggctcctaactactgctctactgcctcgagccaagagatttacgccctattaagcaatttgttgtgcgataaattggaagacacagcagataagcaaacaactcaagcaaccaggacaccatcttcttgtattatacaagaaaggagtgtacctatcacacacagggggaaaaatgctcttttgggtgctaggcctcctaatcctctgtggttttctgtggactcgtaaaggaaaactaaagattgaagacatcactgataagtacatttttatcactggatgtgactcgggctttggaaacttggcagccagaacttttgataaaaagggatttcatgtaatcgctgcctgtctgactgaatcaggatcaacagctttaaaggcagaaacctcagagagacttcgtactgtgcttctggatgtgaccgacccagagaatgtcaagaggactgcccagtgggtgaagaaccaagttggggagaaaggtctctggggtctgatcaataatgctggtgttcccggcgtgctggctcccactgactggctgacactagaggactacagagaacctattgaagtgaacctgtttggactcatcagtgtgacactaaatatgcttcctttggtcaagaaagctcaagggagagttattaatgtctccagtgttggaggtcgccttgcaatcgttggagggggctatactccatccaaatatgcagtggaaggtttcaatgacagcttaagacgggacatgaaagcttttggtgtgcacgtctcatgcattgaaccaggattgttcaaaacaaacttggcagatccagtaaaggtaattgaaaaaaaactcgccatttgggagcagctgtctccagacatcaaacaacaatatggagaaggttacattgaaaaaagtctagacaaactgaaaggcaataaatcctatgtgaacatggacctctctccggtggtagagtgcatggaccacgctctaacaagtctcttccctaagactcattatgccgctggaaaagatgccaaaattttctggatacctctgtctcacatgccagcagctttgcaagactttttattgttgaaacagaaagcagagctggctaatcccaaggcagtgtgactcagctaaccacaaatgtctcctccaggctatgaaattggccgatttcaagaacacatctccttttcaaccccattccttatctgctccaacctggactcatttagatcgtgcttatttggattgcaaaagggagtcccaccatcgctggtggtatcccagggtccctgctcaagttttctttgaaaaggagggctggaatggtacatcacataggcaagtcctgccctgtatttaggctttgcctgcttggtgtgatgtaagggaaattgaaagacttgcccattcaaaatgatctttaccgtggcctgccccatgcttatggtccccagcatttacagtaacttgtgaatgttaagtatcatctcttatctaaatattaaaagataagtcaaacatt

SEQ ID NO: 108289 - DNA, 524 bp, Artificial Sequence
  derived and/or modified sequence
tactcagagctctacggaaacccaggcacctcgacctcaagaggatcagcctggccagggtggcacaactcttccttccccgtgcacagcaggaaagctgccatcagctgagcaagtccaccaacagtttctgtgtcccacttcatctttaataaggaaaacaaactcaggaagaaaaagaaaagcagaagtgatcaaggagagcgctcgagttgcaatattttcctttggctgctgacaggcagttactataaagcattgtgcatggacaccatcttcttgtattatacaagaaaggagtgtacctatcacacacagggggaaaaatgctcttttgggtgctaggcctcctaatcctctgtggttttctgtggactcgtaaaggaaaactaaagattgaagacatcactgataagtacatttttatcactggatgtgactcgggctttggaaacttggcagccagaacttttgataaaaagggatttcatgtaatcgctgcctgtctgactgaatcaggatca

SEQ ID NO: 108290 - protein, 175 aa, Artificial Sequence
  derived and/or modified sequence
MDIAIHHPWIRRPFFPFHSPSRLFDQFFGEHLLESDLFPTSTSLSPFYLRPPSFLRAPSWFDTGLSEMRLEKDRFSVNLDVKHFSPEELKVKVLGDVIEVHGKHEERQDEHGFISREFHRKYRIPADVDPLTITSSLSSDGVLTVNGPRKQVSGPERTIPITREEKPAVTAAPKK

SEQ ID NO: 108291 - protein, 174 aa, Artificial Sequence
  derived and/or modified sequence
MDIAIHHPWIRRPFFPFHSPSRLFDQFFGEHLLESDLFPTSTSLSPFYLRPPSFLRAPSWFDTGLSEMRLEKDRFSVNLDVKHFSPEELKVKVLGDVIEVHGKHEERQDEHGFISREFHRKYRIPADVDPLTITSSLSSDGVLTVNGPRKQVSGPERTIPITREEKPAVTAAPK

SEQ ID NO: 108292 - protein, 77 aa, Artificial Sequence
  derived and/or modified sequence
MDIAIHHPWIRRPFFPFHSPSRLFDQFFGEHLLESDLFPTSTSLSPFYLRPPSFLRAPSWFDTGLSEMRLEKDRFSV

SEQ ID NO: 108293 - protein, 130 aa, Artificial Sequence
  derived and/or modified sequence
MDIAIHHPWIRRPFFPFHSPSRLFDQFFGEHLLESDLFPTSTSLSPFYLRPPSFLRAPSWFDTGLSEMRLEKDRFSVNLDVKHFSPEELKVKVLGDVIEVHGKHEERQDEHGFISREFHRKYRIPADVDP

SEQ ID NO: 108294 - protein, 69 aa, Artificial Sequence
  derived and/or modified sequence
MDIAIHHPWIRRPFFPFHSPSRLFDQFFGEHLLESDLFPTSTSLSPFYLRPPSFLRAPSWFDTGLSEMR

SEQ ID NO: 108295 - DNA, 528 bp, Artificial Sequence
  derived and/or modified sequence
atggacatcgccatccaccacccctggatcagaagacccttcttccccttccacagccccagcagactgttcgaccagttcttcggcgagcacctgctggagagcgacctgttccccaccagcaccagcctgagccccttctacctgagaccccccagcttcctgagagcccccagctggttcgacaccggcctgagcgagatgagactggagaaggacagattcagcgtgaacctggacgtgaagcacttcagccccgaggagctgaaggtgaaggtgctgggcgacgtgatcgaggtgcacggcaagcacgaggagagacaggacgagcacggcttcatcagcagagagttccacagaaagtacagaatccccgccgacgtggaccccctgaccatcaccagcagcctgagcagcgacggcgtgctgaccgtgaacggccccagaaagcaggtgagcggccccgagagaaccatccccatcaccagagaggagaagcccgccgtgaccgccgcccccaagaagtag

SEQ ID NO: 108296 - DNA, 1119 bp, Artificial Sequence
  derived and/or modified sequence
ggcgcagggagcagggagatgtagacctcattgacctctgtgtccaaatgtcggccaccccgaggtgcttccaggtttaagatgccatcatgggagagagcagctcggactcgccaggggtcgacatcagcaggcaggacataggtgcggcagaactctcgggacacgaagccgtggcggtccaggcgctgggggtgccgggcagacacctccagcaggttatccacagtcctcacagtcacctcgtctgggctcagtgagtactgggtatgtgtcacattgccaaatcccggatcacaagtctccatgaactgctggtgagctaggataataaaacccctgacatcaccattccagaagcttcacaagactgcatatataaggggctggctgtagctgcagctgaaggagctgaccagccagctgacccctcacactcacctagccaccatggacatcgccatccaccacccctggatccgccgccccttctttcctttccactcccccagccgcctctttgaccagttcttcggagagcacctgttggagtctgatcttttcccgacgtctacttccctgagtcccttctaccttcggccaccctccttcctgcgggcacccagctggtttgacactggactctcagagatgcgcctggagaaggacaggttctctgtcaacctggatgtgaagcacttctccccagaggaactcaaagttaaggtgttgggagatgtgattgaggtgcatggaaaacatgaagagcgccaggatgaacatggtttcatctccagggagttccacaggaaataccggatcccagctgatgtagaccctctcaccattacttcatccctgtcatctgatggggtcctcactgtgaatggaccaaggaaacaggtctctggccctgagcgcaccattcccatcacccgtgaagagaagcctgctgtcaccgcagcccccaagaaatagatgccctttcttgaattgcattttttaaaacaagaaagtttccccaccagtgaatgaaagtcttgtgactagtgctgaagcttattaatgctaagggcaggcccaaattatcaagctaataaaatatcattcagcaacaga

SEQ ID NO: 108297 - DNA, 887 bp, Artificial Sequence
  derived and/or modified sequence
aacagggagcactgaatttgctcagtgagtactgggtatgtgtcacattgccaaatcccggatcacaagtctccatgaactgctggtgagctaggataataaaacccctgacatcaccattccagaagcttcacaagactgcatatataaggggctggctgtagctgcagctgaaggagctgaccagccagctgacccctcacactcacctagccaccatggacatcgccatccaccacccctggatccgccgccccttctttcctttccactcccccagccgcctctttgaccagttcttcggagagcacctgttggagtctgatcttttcccgacgtctacttccctgagtcccttctaccttcggccaccctccttcctgcgggcacccagctggtttgacactggactctcagagatgcgcctggagaaggacaggttctctgtcaacctggatgtgaagcacttctccccagaggaactcaaagttaaggtgttgggagatgtgattgaggtgcatggaaaacatgaagagcgccaggatgaacatggtttcatctccagggagttccacaggaaataccggatcccagctgatgtagaccctctcaccattacttcatccctgtcatctgatggggtcctcactgtgaatggaccaaggaaacaggtctctggccctgagcgcaccattcccatcacccgtgaagagaagcctgctgtcaccgcagcccccaagaaatagatgccctttcttgaattgcattttttaaaacaagaaagtttccccaccagtgaatgaaagtcttgtgactagtgctgaagcttattaatgctaagggcaggcccaaattatcaagctaataaaatatcattcagcaacaga

SEQ ID NO: 108298 - DNA, 1017 bp, Artificial Sequence
  derived and/or modified sequence
gggtgccattgggtgtggacagaaagctagtgaaacaagaccatgacaagtcactggccggctcagacgtgtttgtgtctctcttttcttagctcagtgagtactgggtatgtgtcacattgccaaatcccggatcacaagtctccatgaactgctggtgagctaggataataaaacccctgacatcaccattccagaagcttcacaagactgcatatataaggggctggctgtagctgcagctgaaggagctgaccagccagctgacccctcacactcacctagccaccatggacatcgccatccaccacccctggatccgccgccccttctttcctttccactcccccagccgcctctttgaccagttcttcggagagcacctgttggagtctgatcttttcccgacgtctacttccctgagtcccttctaccttcggccaccctccttcctgcgggcacccagctggtttgacactggactctcagagatgcgcctggagaaggacaggttctctgtcaacctggatgtgaagcacttctccccagaggaactcaaagttaaggtgttgggagatgtgattgaggtgcatggaaaacatgaagagcgccaggatgaacatggtttcatctccagggagttccacaggaaataccggatcccagctgatgtagaccctctcaccattacttcatccctgtcatctgatggggtcctcactgtgaatggaccaaggaaacaggtctctggccctgagcgcaccattcccatcacccgtgaagagaagcctgctgtcaccgcagcccccaagaaatagatgccctttcttgaattgcattttttaaaacaagaaagtttccccaccagtgaatgaaagtcttgtgactagtgctgaagcttattaatgctaagggcaggcccaaattatcaagctaataaaatatcattcagcaacagataactgtcttgtgtttgaatattccacacacttttaaataaatatacagataccacag

SEQ ID NO: 108299 - DNA, 528 bp, Artificial Sequence
  derived and/or modified sequence
atggatattgccattcatcatccatggatccggagacctttcttccctttccattctccttctaggctatttgatcagttcttcggcgagcacctcctcgaatccgatctttttcccacctccacgagtcttagtcccttctatttacgccctccgagttttctccgtgcacctagctggttcgatacaggattgagcgagatgagacttgagaaagatcgctttagcgtgaatctcgacgtgaagcatttctctccagaggagttaaaggtgaaggtgctgggcgatgtgattgaggtccacggcaagcatgaggaaagacaagatgagcacggattcatctccagagagtttcatagaaaatacaggatccctgctgacgtagaccctttgacaattacttccagcttaagctcagatggagtgctgactgttaatgggcctaggaagcaggtcagcggaccagagcgaacaattccgataactagagaggaaaaaccagctgtcacagcagctcccaagaagtag

SEQ ID NO: 108300 - DNA, 528 bp, Artificial Sequence
  derived and/or modified sequence
atggacattgcaatacaccacccgtggattcgcaggcccttctttccctttcattctccctctagactcttcgatcaattctttggggaacaccttctcgaaagcgatctgttccctacatccacctcactgtcacctttttatcttcggccgccttcctttctgcgcgccccgagctggttcgatacaggcttaagtgaaatgaggctggagaaggatagattcagcgttaatctagacgtcaaacattttagcccagaggaactgaaggtaaaggttcttggagacgtgattgaggtccacgggaaacacgaagagaggcaggatgaacatggctttatcagtcgagagtttcatcgtaaatacaggatccccgccgatgttgacccattgaccatcacttcctcactcagctctgatggcgtacttaccgtgaacggtccgaggaaacaggtgagcgggccagaaagaactattccaatcactagagaggagaagccagccgttaccgctgcaccaaagaaatag

SEQ ID NO: 108301 - DNA, 528 bp, Artificial Sequence
  derived and/or modified sequence
atggatatcgctatccatcacccttggattcgccggcccttctttcccttccatagcccctcccgcttgtttgaccagttctttggcgagcatttgttagagtctgatctgtttcctacgtcaacatccctttcgcccttttacctgagacccccctcctttctgcgagccccatcctggttcgacacaggcctttctgagatgcgcctggaaaaggacaggtttagcgtcaaccttgatgttaagcatttttcacctgaggagttgaaagttaaagttctcggagacgtcatcgaggtgcacggaaaacatgaggagcgccaggatgaacacgggtttatttccagggaatttcataggaaatacagaataccagcagatgtcgaccccctgacgataacctcatccctctctagtgacggagtacttactgtgaacggccctcgaaaacaggtctctggacctgaaaggacgatcccaattactagagaggagaagcccgccgtgacagccgcgcctaagaaatag

SEQ ID NO: 108302 - DNA, 528 bp, Artificial Sequence
  derived and/or modified sequence
atggatatcgcaattcaccatccatggatccgtagaccgttctttcctttccacagtccctcccgactctttgatcagttttttggcgagcatctcctggagagtgatctgttccccacctctacaagcctcagtcctttctatctgaggccgccttcgttcctgcgggcccccagctggttcgatactggcctgtcggaaatgagactggaaaaagatcgcttcagcgtcaaccttgatgtcaagcactttagccctgaggaattgaaggtgaaggtgttgggggacgtcattgaggtccatggtaagcacgaggaacgccaggacgaacacgggtttatcagtcgcgaatttcaccgtaaatataggatccctgccgacgtggaccctctgaccatcacatcttcactgtcctccgacggtgtgctcaccgttaacggtccaagaaagcaggtgagcggacccgaaaggaccatccccatcactcgtgaggagaaaccagccgtaactgccgcaccaaaaaagtag

SEQ ID NO: 108303 - DNA, 528 bp, Artificial Sequence
  derived and/or modified sequence
atggacatcgccatccaccacccctggatcagaagacccttcttccccttccacagccccagccggctgtttgaccagttcttcggggagcacctgctggagagtgacctcttccccaccagcaccagcctgagccccttctacctgcggcccccatccttcctgcgggcccccagctggtttgacaccggcctgtctgagatgaggctggagaaggaccgcttctctgtgaacctggatgtgaagcacttcagccctgaggagctgaaggtgaaggtgctgggagatgtgattgaggtgcacggcaagcatgaggagcggcaggatgaacatggcttcatcagccgggagttccacaggaagtaccgcatcccagcagatgtggaccccctgaccatcaccagcagcctgagcagtgatggagtgctgactgtgaatggccccaggaagcaggtgtctggccctgagaggaccatccccatcacccgggaggagaagccagctgtgacagctgcccccaagaagtag

SEQ ID NO: 108304 - DNA, 528 bp, Artificial Sequence
  derived and/or modified sequence
atggacatcgccatccaccacccctggatccggcggcccttcttcccttttcacagcccatctcgcctcttcgaccagtttttcggtgagcatctactagaatcggacttattcccaacctctacgagcctgtccccgttctatctccgacccccctcatttctgagagcaccctcatggttcgacaccggcctgtccgagatgagacttgagaaggaccggttctccgtgaatcttgacgttaagcacttcagccctgaggagcttaaagttaaggtattgggagacgtaatagaggtgcacggcaagcacgaggaacggcaggacgagcacggctttatcagccgtgagtttcatcggaagtatcgtatcccggccgatgtggacccactgactattacctcttccttgagtagcgacggcgtgttgaccgtgaatggtccgagaaagcaggtgtcagggccggagaggactatccctatcactcgggaggagaagccagcggtcaccgccgctccaaagaagtag

SEQ ID NO: 108305 - DNA, 528 bp, Artificial Sequence
  derived and/or modified sequence
atggacatcgccatccaccacccctggatccggcggcccttcttcccgtttcatagtcccagtagattgtttgatcagttcttcggcgagcaccttttggaatctgacctgttccctactagtacatccttgtcgccgttttatttgcgcccgccaagtttcctgagggccccttcctggtttgatactggcctgtccgagatgaggctcgagaaggacagatttagcgtgaatctggacgtgaaacacttcagcccagaggaactcaaagtgaaggtgctgggggatgtgatcgaggtccatggcaaacacgaggagcgccaagacgagcacggtttcatttcccgagaattccaccggaagtacagaattcccgcagatgtggatccgctgacgatcactagttccctgtccagcgatggagtgctcaccgtgaacgggccaagaaagcaagtgtcaggccccgagagaacaattcctattacccgggaggagaagcctgctgtgacagctgctccaaagaagtag

SEQ ID NO: 108306 - DNA, 528 bp, Artificial Sequence
  derived and/or modified sequence
atggacatcgccatccaccacccctggatccggcggcccttcttcccctttcactcccccagcaggctgtttgatcagtttttcggggagcacttgctggaatccgacctgtttcctacctccacgtctctgtcgcctttctatttgaggccgcctagctttctccgcgcacctagttggtttgatactggtctgtcagaaatgcgcctcgagaaggatcggttttccgtgaacctcgatgtgaaacacttttcccccgaagaactcaaagtgaaggtgctcggggacgtgatcgaggtccacgggaagcacgaagagcggcaggatgagcacggattcatctcgcgagaattccatagaaaatatcgtatccctgctgatgtggatcctttgacgattacctccagcttgtcttcagacggggtcctgacagttaatggacctaggaaacaggtcagtgggcctgagcgcacaatacctattacaagggaggaaaagcctgctgttaccgcagcacctaagaagtag

SEQ ID NO: 108307 - DNA, 528 bp, Artificial Sequence
  derived and/or modified sequence
atggacatcgccatccaccacccctggatccggcggcccttcttccccttccatagcccaagtaggttgttcgaccagttttttggggagcacctgctcgagagtgacctatttccaacgtcaacttcactgagtccgttttacctgagacctccctcatttctgagagcgcccagctggttcgacacaggactgagcgagatgcgcttggaaaaggatcggttctccgtgaatcttgacgtcaaacacttttcaccagaagagcttaaagtgaaggtgcttggagacgtcatcgaagtccacgggaagcacgaagaaaggcaggacgagcacggcttcatctcgagggagtttcatagaaagtaccgtatccctgcagacgttgacccactgactattacttcgtctctgagttctgacggtgtactgacagtgaacggtccacggaaacaggtatcggggcccgagcgaacgatccctatcacaagagaggagaaacctgccgtgaccgccgccccaaagaagtag

SEQ ID NO: 108308 - DNA, 528 bp, Artificial Sequence
  derived and/or modified sequence
atggatatcgccatacaccacccttggattcgcaggccgttttttccttttcactctcccagtaggctgttcgatcagtttttcggggaacacttacttgaaagcgatctctttcccacttccacatctctatcacccttctatctccgacctccctccttcctcagagctcctagctggtttgatacggggctaagcgaaatgcgtttggagaaagatcggtttagcgtgaatttagacgtcaaacacttcagccccgaagaattgaaagtcaaagtcttgggcgatgttatcgaggtgcatgggaagcatgaagagcgccaagatgaacacggctttattagcagagaattccacaggaagtaccgaatcccagccgatgtcgatcctctgaccatcacatcatcccttagcagtgacggggtcttgactgtgaatgggccacgcaagcaagtctctggtcccgagaggacaatacctatcacaagagaggaaaaaccggctgtgaccgccgcacccaagaaatag

SEQ ID NO: 108309 - DNA, 528 bp, Artificial Sequence
  derived and/or modified sequence
atggatattgctattcaccacccatggatccgacgacccttcttccctttccactcgccttcccgtctgttcgatcagttcttcggcgagcacctcttagagtccgatctgtttccgacgtccacatcccttagcccattctacctacgtcccccttcctttcttcgggctcccagctggttcgatacaggcttgtccgagatgcgcctagagaaggataggttcagcgtgaacctagacgtaaagcatttcagtcctgaagaactaaaggttaaggtgcttggggacgtgatcgaggtgcacggaaagcatgaggagcgccaggatgaacacggctttatcagccgcgaattccacaggaagtatcgaattcctgccgacgtcgatccgctcacaatcacctcaagtttatcatcagacggtgtcctgactgtgaacgggccaagaaagcaggtgtcaggccctgaacgtacaattccaattaccagggaagagaagcctgcggtaacagcagcaccgaagaaatag

SEQ ID NO: 108310 - DNA, 528 bp, Artificial Sequence
  derived and/or modified sequence
atggatattgctatccatcatccctggatcaggagacctttctttccctttcacagcccatcccggctgttcgatcaattttttggcgagcaccttcttgaatcagacctattccccactagcacctccctatctccattttacctcaggccaccctcgttcctgagagccccatcctggttcgataccggactttcagagatgagactcgagaaggatagattttcagtcaatcttgatgtaaagcactttagccccgaggagttaaaagtgaaagtgctgggggatgtcattgaagtccacggtaaacacgaagaaagacaggatgagcacgggtttattagtagagagttccacagaaagtacaggatccccgcagatgtggatcctctgactatcactagctcattatccagcgacggggtgcttacagtcaacggcccacgcaagcaggtctccggaccagagagaaccatacctataacccgagaggaaaagccagctgtgacagctgcgcctaagaaatag

SEQ ID NO: 108311 - DNA, 528 bp, Artificial Sequence
  derived and/or modified sequence
atggatatagctatacatcatccatggatacggcgtcccttctttcctttccactctcccagcagactgtttgaccagtttttcggtgagcatttgctggagagcgacttgttccccacctctacgtccctgagccccttctacctgagaccacctagtttccttcgcgcaccaagctggtttgatacgggtctgtctgaaatgcgcttagagaaagatagattttcagttaacctcgatgtgaagcacttcagtcctgaggagctcaaagttaaggtcttgggtgatgtgattgaggttcacgggaaacatgaagagcggcaggacgagcacggtttcataagtcgcgagtttcacagaaaataccggatccccgctgatgtcgaccccttgactatcacctccagtctgtcctctgatggtgtccttactgtcaacggcccacgaaagcaagtgtccggtcccgagcgcacaattcccataactcgcgaagaaaaaccagctgtgactgctgcacctaagaaatag

SEQ ID NO: 108312 - DNA, 528 bp, Artificial Sequence
  derived and/or modified sequence
atggacatcgctatccaccatccatggattcgccggcctttcttcccttttcattcccctagtagactgtttgatcagttttttggcgaacacttattagaaagcgacctttttcctacgtctaccagcctatcaccattctacctccgacctcctagcttcttgcgtgcccctagttggtttgatacggggttgagcgagatgcgactggaaaaagacagattttctgtgaatctcgacgtgaaacacttttcccctgaagagctgaaggtcaaggtgctcggcgacgtgattgaggtgcacgggaaacatgaagagcgccaggacgagcatggatttatctctcgcgagttccatcggaagtacaggattcccgcagatgtcgaccctttgaccattacatccagcctgtccagcgacggagtgctgactgtaaatggcccaagaaagcaggtgagcggaccggagcgcacaatcccaatcacacgggaggaaaagcctgcggtaaccgctgctccgaagaagtag

SEQ ID NO: 108313 - DNA, 525 bp, Artificial Sequence
  derived and/or modified sequence
atggatatcgccatacaccacccctggatccgccggccattcttcccttttcactcacccagcagactctttgaccagtttttcggggaacatctgctggagagcgatctgtttccaactagcacgtccctaagtccattttatctaagaccgccgtcattcctgcgggcaccgagttggtttgacacaggcctgtctgagatgaggctggaaaaagaccggttttctgtgaacctcgatgtcaagcatttttcccctgaagaactcaaggtcaaggtcctcggcgacgtcatcgaggtccacggcaaacacgaagagagacaagacgaacatggatttatcagcagagagttccatagaaagtatcgaattcccgcagacgtagatccactcacaattacttcttccctctctagtgatggcgtcctaactgttaacggccccagaaagcaggtatctgggcctgagagaactatccccataactagagaggagaagcctgccgtgactgccgctccgaagtag

SEQ ID NO: 108314 - DNA, 528 bp, Artificial Sequence
  derived and/or modified sequence
atggatattgctatccatcatccttggattcggaggcctttctttccgtttcatagcccctctcggctcttcgaccaattcttcggagagcacctgctggagagcgacctgttccccactagcaccagcctctctcccttctatcttcggccccctagctttctcagagctcccagttggtttgatacaggactgagtgaaatgaggctagaaaaagatcgcttcagtgtcaatctcgatgtgaagcatttcagccctgaagaactcaaggtgaaggtcctgggagacgtgattgaggtccacggtaaacatgaggagaggcaggatgagcatggctttattagccgggagtttcaccgaaaataccgtatccccgcggatgtcgatccccttactattacaagctcactgtctagcgatggagtgctgaccgtcaatggccccaggaagcaggtcagcggcccggagaggacaataccaatcacacgagaggagaaacccgccgttaccgccgcaccgaagaaatag

SEQ ID NO: 108315 - DNA, 234 bp, Artificial Sequence
  derived and/or modified sequence
atggacatcgcgattcatcatccctggattaggcgtcctttcttcccattccactctcccagtaggctgttcgaccagttctttggagagcatctgctggagtctgatctgttcccaacatctacctctctaagccccttctaccttaggccaccgtcatttctacgggcgcccagttggttcgacactggactatctgaaatgcgcctggagaaggaccgtttctcagtgtag

SEQ ID NO: 108316 - DNA, 393 bp, Artificial Sequence
  derived and/or modified sequence
atggacatcgccattcatcacccttggatcaggcgaccgttcttccccttccacagtcccagcaggctgttcgatcagttttttggcgagcacctcttagagtctgatctctttccaacgagcacgtctctgagcccattttacctgcgaccgccatcgttcctgcgcgcaccaagttggtttgacactgggctttccgaaatgagactcgaaaaggaccgattctccgttaacttggatgtgaagcatttctcccccgaggagctgaaggttaaagtgctcggcgatgtgatagaggtgcacggtaaacacgaggaaaggcaggatgaacatggctttatctcccgtgaattccatcgaaaatatagaattccagctgacgtagacccttag

SEQ ID NO: 108317 - DNA, 528 bp, Artificial Sequence
  derived and/or modified sequence
atggatattgccattcaccacccctggatccgaagacctttctttcccttccactctccttcccgcctgtttgaccagttcttcggagaacacttgctggagagtgatcttttccccacatcaacgagtctgtccccattctacctgaggcctccatcgtttctgagagctccgagctggtttgatacgggcctgtccgagatgcgactggaaaaagacaggttttccgtcaacttggacgtaaaacatttttcaccagaagagctgaaagtgaaggtgctcggcgatgtcatcgaagtccatggaaaacacgaggaacggcaggatgagcacggctttataagccgagagtttcacaggaaatacagaatccccgcagatgtcgatcctctgacaatcacctccagcctgtccagtgatggtgtcctcactgtgaacggccctagaaagcaggttagtggtcccgagcggactatcccaataaccagggaagaaaaaccagcggtgaccgctgcccctaagaaatag

SEQ ID NO: 108318 - DNA, 528 bp, Artificial Sequence
  derived and/or modified sequence
atggacatcgcaatccatcatccgtggatcaggcgaccgtttttcccctttcacagcccaagtcggttattcgaccagttctttggtgagcatctgttagaaagtgatctttttcctacttctacttccttgagccccttctatttgcggccaccgagctttcttcgtgctccatcttggtttgatactggactgtctgaaatgagactagagaaggatcgtttttccgtgaacctggatgtaaaacacttcagtcctgaggagctgaaagtgaaggttctgggggatgtgattgaggtacacggaaaacatgaagaaagacaggatgaacacggttttatcagtagagagttccatcggaagtatagaattccagccgacgtggatcctcttacaattacctcatccctttccagcgatggagtccttaccgtaaacgggccccgcaaacaggtttccgggcccgaacggactatacctattacgcgggaggagaagcccgccgtgaccgccgctcccaagaaatag

SEQ ID NO: 108319 - DNA, 210 bp, Artificial Sequence
  derived and/or modified sequence
atggacatcgccattcatcatccatggattagaaggccgttctttccatttcactcaccgtctaggctgttcgaccagtttttcggagagcatcttctggagagtgacctgttccccaccagcactagcctatccccgttttacctaaggccgccaagctttctgcgggccccttcatggttcgatacggggctttccgagatgcgatag

SEQ ID NO: 108320 - DNA, 525 bp, Artificial Sequence
  derived and/or modified sequence
atggacatcgccatccaccacccctggatcagaagacccttcttccccttccacagccccagccggctgtttgaccagttcttcggggagcacctgctggagagtgacctcttccccaccagcaccagcctgagccccttctacctgcggcccccatccttcctgcgggcccccagctggtttgacaccggcctgtctgagatgaggctggagaaggaccgcttctctgtgaacctggatgtgaagcacttcagccctgaggagctgaaggtgaaggtgctgggagatgtgattgaggtgcacggcaagcatgaggagcggcaggatgaacatggcttcatcagccgggagttccacaggaagtaccgcatcccagcagatgtggaccccctgaccatcaccagcagcctgagcagtgatggagtgctgactgtgaatggccccaggaagcaggtgtctggccctgagaggaccatccccatcacccgggaggagaagccagctgtgacagctgcccccaagtag

SEQ ID NO: 108321 - DNA, 234 bp, Artificial Sequence
  derived and/or modified sequence
atggacatcgccatccaccacccctggatcagaagacccttcttccccttccacagccccagccggctgtttgaccagttcttcggggagcacctgctggagagtgacctcttccccaccagcaccagcctgagccccttctacctgcggcccccatccttcctgcgggcccccagctggtttgacaccggcctgtctgagatgaggctggagaaggaccgcttctctgtgtag

SEQ ID NO: 108322 - DNA, 393 bp, Artificial Sequence
  derived and/or modified sequence
atggacatcgccatccaccacccctggatcagaagacccttcttccccttccacagccccagccggctgtttgaccagttcttcggggagcacctgctggagagtgacctcttccccaccagcaccagcctgagccccttctacctgcggcccccatccttcctgcgggcccccagctggtttgacaccggcctgtctgagatgaggctggagaaggaccgcttctctgtgaacctggatgtgaagcacttcagccctgaggagctgaaggtgaaggtgctgggagatgtgattgaggtgcacggcaagcatgaggagcggcaggatgaacatggcttcatcagccgggagttccacaggaagtaccgcatcccagcagatgtggacccctag

SEQ ID NO: 108323 - DNA, 210 bp, Artificial Sequence
  derived and/or modified sequence
atggacatcgccatccaccacccctggatcagaagacccttcttccccttccacagccccagccggctgtttgaccagttcttcggggagcacctgctggagagtgacctcttccccaccagcaccagcctgagccccttctacctgcggcccccatccttcctgcgggcccccagctggtttgacaccggcctgtctgagatgaggtag

SEQ ID NO: 108324 - DNA, 528 bp, Artificial Sequence
  derived and/or modified sequence
atggacatcgccatccaccacccctggatccggcggcccttcttcccttttcattctccttcacgcctatttgaccagtttttcggagagcacctgctggagtccgatttatttccaacttctacctcgttatcgcctttctatctcagacccccgtccttcctgagagcccccagctggttcgatacagggttgtcagagatgcggctcgagaaggacagattctctgtcaatttagacgtgaaacacttttctccagaggagttaaaagtgaaagttctgggggacgtgatcgaagtccatggtaaacacgaggagcgtcaggatgaacacggctttattagccgcgagttccatcgaaagtaccgtatcccagcagacgtagacccgctgactatcactagttcactttccagtgacggagtgctcaccgttaacggcccaaggaaacaggtgtcaggccctgagcgcacgatccctatcactagggaggagaaacccgcagtgactgctgctcccaagaaatag

SEQ ID NO: 108325 - DNA, 525 bp, Artificial Sequence
  derived and/or modified sequence
atggacatcgccatccaccacccctggatccggcggcccttcttcccattccacagccccagccggctcttcgatcagttcttcggcgagcacctgctggaatccgatctgttcccgaccagtacatccctgtcacctttctatcttaggccacccagcttcctgagggcaccatcctggtttgacaccggcttaagcgaaatgcgactcgagaaagacaggttctctgttaacctcgatgtgaaacacttctcccctgaagaactcaaggtcaaagtgttaggagatgtgattgaagttcatgggaaacacgaggagagacaggatgaacacggctttatctcccgagagttccataggaagtatcgtattccggccgacgtggatcctctgacaattactagctccctctcatctgatggtgtactcaccgtgaacggaccccggaagcaagtgtcagggccagagcgaactatccccataacgagagaggagaagcctgccgttacagcagcacccaaatag

SEQ ID NO: 108326 - DNA, 528 bp, Artificial Sequence
  derived and/or modified sequence
atggacatcgccatccaccacccctggatccggcggcccttcttcccattccactctccttctcgactctttgaccagttcttcggcgagcatcttctagagagtgacctgtttcccacttccacctccctgtcacccttctatctacgccccccgtcgtttctgcgtgcaccctcctggtttgacacaggcttgagtgagatgcgcctggaaaaggaccgcttttccgtgaacctggacgttaaacacttctcacccgaggagctcaaagtgaaagtgctcggcgacgtcattgaagtgcatggcaaacacgaggagcggcaagacgagcacggatttatcagtcgggaattccatcgaaagtacaggatcccagccgacgtcgaccctctcacaattacaagttctcttagtagcgacggagtcctgaccgtgaatggcccccgcaagcaagtgtcaggccccgagcgaaccataccaattacccgcgaggagaaacctgctgtaactgccgctcccaagaaatag

SEQ ID NO: 108327 - DNA, 234 bp, Artificial Sequence
  derived and/or modified sequence
atggacatcgccatccaccacccctggatccggcggcccttcttccccttccatagtcccagccgcctgttcgaccagttttttggcgaacacctcttagagtcagatctgttccctaccagcacttctttgtccccattttaccttcggccccccagctttctgcgtgctcccagctggtttgataccgggctgtccgaaatgcgtctggaaaaggataggttctccgtctag

SEQ ID NO: 108328 - DNA, 393 bp, Artificial Sequence
  derived and/or modified sequence
atggacatcgccatccaccacccctggatccggcggcccttcttcccatttcacagcccgagtcggctgttcgatcagtttttcggtgagcatttgctggagtctgatctgttcccgaccagtacctcactcagccccttttacctacgaccacctagcttcctgagggcaccctcttggtttgacacgggattatcagagatgcgtctggagaaggacaggtttagtgtgaacttggacgtgaagcatttctccccagaagaactaaaagtgaaggtccttggcgatgttattgaagttcacgggaagcatgaagaaaggcaggacgagcacggctttatcagccgcgaatttcaccgcaaatacaggataccggctgacgttgacccgtag

SEQ ID NO: 108329 - DNA, 528 bp, Artificial Sequence
  derived and/or modified sequence
atggacatcgccatccaccacccctggatccggcggcccttcttcccttttcacagtccatctagactcttcgaccagtttttcggggagcacctgttggagagcgacctctttccaaccagtacctccttgagcccattttacttgcgcccgccaagtttcctgcgcgcaccctcatggtttgacaccggattgtcagaaatgcgcctcgaaaaggaccggtttagcgtgaatctcgatgtgaagcattttagtccagaggagctcaaagtgaaagtactcggcgatgttatagaggtccacggaaaacacgaggagcggcaggacgaacacgggtttatttcgcgagaatttcaccggaaatacaggattccggccgatgtggacccgttaacgattacctcaagtctgtcatcagatggggtgctcacagtgaatggcccccggaaacaagtgagtgggccagaacggaccatccccatcacccgcgaagagaaaccggcggtaacagctgcgcccaagaagtag

SEQ ID NO: 108330 - DNA, 528 bp, Artificial Sequence
  derived and/or modified sequence
atggacatcgccatccaccacccctggatccggcggcccttcttcccattccactcgcccagccggcttttcgaccagttcttcggggaacacctcctagaatcagatctgttccctaccagcacctctctctctccattctacctaagacctccttcgtttctaagagcgccctcttggtttgacaccggtctgagcgaaatgcgccttgagaaagacagattttccgtcaacctggacgtgaaacacttcagccccgaggagcttaaggtcaaagtgttgggcgatgtgatcgaggttcacggcaaacacgaggagagacaagatgagcatggatttatctctagggagttccacagaaagtatcgaatccctgctgacgtggaccctctgactataacttcgagtttgagttccgacggagtgctgaccgtaaacggcccccgaaaacaggtgtccggcccagagagaactatccctattactcgggaggaaaagcccgctgtgacagctgctcctaagaaatag

SEQ ID NO: 108331 - DNA, 210 bp, Artificial Sequence
  derived and/or modified sequence
atggacatcgccatccaccacccctggatccggcggcccttcttccccttccacagcccatcccgactgtttgaccagttctttggcgagcacctgctggagtctgacctcttccccaccagtacaagtctgtcccccttctacctcaggccacccagcttcctgcgggccccaagttggtttgatactgggttgtccgaaatgcgctag

SEQ ID NO: 108332 - DNA, 528 bp, Artificial Sequence
  derived and/or modified sequence
atggacattgctatccaccacccatggatcagacgacccttctttccatttcattccccctccagacttttcgaccagtttttcggagaacacctcctggagtctgacctttttccaacatccaccagcctgtcccccttttatctgaggccaccatcttttctgcgagccccaagctggttcgacacagggctttccgaaatgcgcctggagaaggatagattttctgtgaatctagacgtaaaacatttctcacctgaggagttgaaggttaaggttctcggtgatgttatcgaggtgcatgggaagcatgaggagaggcaggacgagcatggatttatcagtagggagttccataggaaatatcgcattcccgcagatgttgatccactgacgatcacgagctcactgtcctcggacggggtgttaacagtgaatggtccaaggaagcaggtctctggtccagagcgaaccatcccaatcacacgcgaggaaaagccagccgtgactgccgcaccaaagaaatag

SEQ ID NO: 108333 - DNA, 525 bp, Artificial Sequence
  derived and/or modified sequence
atggacatcgccattcaccatccgtggattcggcgaccctttttcccctttcatagtccgtcccggctatttgatcagttcttcggagagcacctcctggaatctgacctgtttcccaccagcacaagtctgagccccttctatctgcgccctccatctttccttcgggcaccaagttggttcgatacaggcctgtccgagatgagactggaaaaggatcgcttcagcgttaatttggatgtgaagcatttttctccagaggaactgaaagtgaaagtgctcggcgacgtgatcgaggtccacggcaagcacgaggaacgccaggacgaacatggcttcatctctagagagtttcatcgaaagtatcgcatccctgccgatgtggacccgcttaccatcacctcatcattgtcatcggatggtgtgctcacagttaatggtccccgtaaacaggtgtctgggccagagagaacaattcctataacacgagaggagaaacccgcagtaactgccgctcccaagtag

SEQ ID NO: 108334 - DNA, 528 bp, Artificial Sequence
  derived and/or modified sequence
atggacattgcgatccatcacccctggatccggaggccgttcttccccttccattcgccttcccggctcttcgatcaattcttcggcgagcacctcttggagagcgacttgtttcccaccagcacctccctctcaccattctacttgcggccacctagttttctgagagctccatcatggtttgacactggcctgagcgaaatgcgccttgagaaagataggttctcggtgaatttagatgttaaacacttctcaccagaagagctgaaggtcaaggttttgggggacgttattgaagtccacggtaagcacgaggaaagacaggatgagcatgggtttatcagcagggagttccataggaagtatcgaattcctgcggatgttgacccgctgaccatcacttcctcgctgtcatccgacggggtcttgacagtgaatggcccacgaaagcaggtgagcggccctgagaggaccatccccatcactagagaggagaaacccgctgtgaccgccgctcccaaaaagtag

SEQ ID NO: 108335 - DNA, 234 bp, Artificial Sequence
  derived and/or modified sequence
atggacattgcgatccaccacccttggattagacgcccattcttccccttccattcaccttctcgcctgttcgatcagttttttggagaacacctgcttgagagcgatctgttcccgacctcaaccagtttgagccccttttatttgcggccaccgtccttccttagggctccgtcctggttcgacactggactgtctgagatgagactggaaaaggaccgcttttctgtctag

SEQ ID NO: 108336 - DNA, 393 bp, Artificial Sequence
  derived and/or modified sequence
atggacattgctatccatcacccctggataaggcgcccattctttccttttcattctccttcccgcctcttcgatcaattcttcggggaacaccttctggaatccgacctcttcccgacatcaacttctttgagtcccttctatctgcgaccacctagctttctcagagccccatcctggtttgatacaggcctgtcggaaatgcggctggaaaaggatcgcttttccgtgaacttggacgtgaagcactttagtcctgaagagctcaaggtaaaggttctcggagatgtgatcgaggtacacggcaagcacgaggaacgacaagacgaacacggcttcataagccgggagttccatcgcaagtatagaatccccgcagacgtcgacccctag

SEQ ID NO: 108337 - DNA, 528 bp, Artificial Sequence
  derived and/or modified sequence
atggatattgctatccatcacccctggatccggagaccatttttcccctttcatagcccaagtaggctcttcgaccaattctttggcgagcacttactggaaagtgacttattccccaccagtacgtctctgtcaccattttatctacggcctccgagtttcctcagggccccttcctggttcgatactggactctccgaaatgcggctggaaaaggacaggttctccgtcaatctggatgtgaagcacttctcgcccgaagagttgaaagtcaaggtgttaggggacgtgattgaagtccatgggaaacacgaggaacgccaagatgaacacggctttatctccagggagtttcataggaagtatcggatacctgcagatgtagatccactcacaatcacatcatcccttagctccgacggcgtgttaacagtcaacggtcctcggaaacaggtctcgggcccagaacgtaccatccccattacacgcgaggaaaagccggcagtgactgccgctccaaagaagtag

SEQ ID NO: 108338 - DNA, 528 bp, Artificial Sequence
  derived and/or modified sequence
atggacatcgctatacaccacccttggatcaggcggccattttttccctttcacagtccttcaaggcttttcgaccagttttttggcgaacacctcctggagtcagatcttttcccaaccagcacatcactgagcccgttttacctcaggcccccttctttcctccgcgctccctcctggtttgacactgggctgtcagaaatgcggttggaaaaagatcgctttagcgtgaatttagatgtgaaacattttagccccgaggagttaaaggtgaaggtgctgggagatgtcatcgaggtccacggaaagcacgaagagcgccaggatgaacacgggtttatcagcagagagttccatcgaaagtaccgtattccagccgacgtggaccctcttacaatcacatcttccctctcctccgatggagtgcttaccgttaacggcccacgcaaacaagtctctggccctgagcgtaccataccgatcactagagaagagaagcctgcagtaactgccgctccaaagaaatag

SEQ ID NO: 108339 - DNA, 210 bp, Artificial Sequence
  derived and/or modified sequence
atggatatcgctattcaccacccatggatccggaggcccttcttcccatttcacagtccttcacgcctgtttgatcagttcttcggcgagcatctgctggagtcagacctgtttccaacatcaacatccctttcccctttctacctgagacctcccagctttctgcgggctccatcctggttcgacacggggctatcagagatgcgttag

SEQ ID NO: 108340 - DNA, 848 bp, Artificial Sequence
  derived and/or modified sequence
gccattgggtgtggacagaaagctagtgaaacaagaccatgacaagtcactggccggctcagacgtgtttgtgtctctcttttcttagctcaaagcttcacaagactgcatatataaggggctggctgtagctgcagctgaaggagctgaccagccagctgacccctcacactcacctagccaccatggacatcgccatccaccacccctggatccgccgccccttctttcctttccactcccccagccgcctctttgaccagttcttcggagagcacctgttggagtctgatcttttcccgacgtctacttccctgagtcccttctaccttcggccaccctccttcctgcgggcacccagctggtttgacactggactctcagagatgcgcctggagaaggacaggttctctgtcaacctggatgtgaagcacttctccccagaggaactcaaagttaaggtgttgggagatgtgattgaggtgcatggaaaacatgaagagcgccaggatgaacatggtttcatctccagggagttccacaggaaataccggatcccagctgatgtagaccctctcaccattacttcatccctgtcatctgatggggtcctcactgtgaatggaccaaggaaacaggtctctggccctgagcgcaccattcccatcacccgtgaagagaagcctgctgtcaccgcagcccccaagaaatagatgccctttcttgaattgcattttttaaaacaagaaagtttccccaccagtgaatgaaagtcttgtgactagtgctgaagcttattaatgctaagggcaggcccaaattatcaagctaataaaatatcattcagc

SEQ ID NO: 108341 - DNA, 965 bp, Artificial Sequence
  derived and/or modified sequence
agcaagaggggagtcaggaggagtagggaacgggagggaggccacactgtagctaggaggagaaggcagctcggaagaggggaaagagaacggaaaggtaagggaggaggaggaggagaaggaggaggagggggaggaggaggaggcaccaaacggcctgggtggatagaagggggacaaggaggcacacccaggccggcaaagagcaggtatcagcactgcaagcaccaagtgtgtcttgagctcagtgagtactgggtatgtgtcacattgccaaatcccggatcacaagtctccatgaactgctggtgagctaggataataaaacccctgacatcaccattccagaagcttcacaagactgcatatataaggggctggctgtagctgcagctgaaggagctgaccagccagctgacccctcacactcacctagccaccatggacatcgccatccaccacccctggatccgccgccccttctttcctttccactcccccagccgcctctttgaccagttcttcggagagcacctgttggagtctgatcttttcccgacgtctacttccctgagtcccttctaccttcggccaccctccttcctgcgggcacccagctggtttgacactggactctcagagatgcgcctggagaaggacaggttctctgtcaacctggatgtgaagcacttctccccagaggaactcaaagttaaggtgttgggagatgtgattgaggtgcatggaaaacatgaagagcgccaggatgaacatggtttcatctccagggagttccacaggaaataccggatcccagctgatgtagaccctctcaccattacttcatccctgtcatctgatggggtcctcactgtgaatggaccaaggaaacaggtctctggccctgagcgcaccattcccatcacccgtgaagagaagcctgctgtcaccgcagcccccaagaa

SEQ ID NO: 108342 - DNA, 624 bp, Artificial Sequence
  derived and/or modified sequence
ataccttctccgaagcgctgctcacccaggcggctcgggttggcaaattcgtactcggcggtggccgggtgggcatgtggcactgagcggcccgacatggctgcagatgcagcagaagccctggtccgaggtgcagccccaacaggcgcagcgcgacccctccagctgcccggagagccagggctcgataggagctcagtgagtactgggtatgtgtcacattgccaaatcccggatcacaagtctccatgaactgctggtgagctaggataataaaacccctgacatcaccattccagaagcttcacaagactgcatatataaggggctggctgtagctgcagctgaaggagctgaccagccagctgacccctcacactcacctagccaccatggacatcgccatccaccacccctggatccgccgccccttctttcctttccactcccccagccgcctctttgaccagttcttcggagagcacctgttggagtctgatcttttcccgacgtctacttccctgagtcccttctaccttcggccaccctccttcctgcgggcacccagctggtttgacactggactctcagagatgcgcctggagaaggacaggttctctgtca

SEQ ID NO: 108343 - DNA, 695 bp, Artificial Sequence
  derived and/or modified sequence
agaaatgcctggaacttgccctcactgagcctaagctcggaggcccctgccctgctgccctccccagctggggcggcccgaggccggacatagtagccatggtagagtctcagtgagtactgggtatgtgtcacattgccaaatcccggatcacaagtctccatgaactgctggtgagctaggataataaaacccctgacatcaccattccagaagcttcacaagactgcatatataaggggctggctgtagctgcagctgaaggagctgaccagccagctgacccctcacactcacctagccaccatggacatcgccatccaccacccctggatccgccgccccttctttcctttccactcccccagccgcctctttgaccagttcttcggagagcacctgttggagtctgatcttttcccgacgtctacttccctgagtcccttctaccttcggccaccctccttcctgcgggcacccagctggtttgacactggactctcagagatgcgcctggagaaggacaggttctctgtcaacctggatgtgaagcacttctccccagaggaactcaaagttaaggtgttgggagatgtgattgaggtgcatggaaaacatgaagagcgccaggatgaacatggtttcatctccagggagttccacaggaaataccggatcccagctgatgtagaccc

SEQ ID NO: 108344 - DNA, 1013 bp, Artificial Sequence
  derived and/or modified sequence
aaacggcctgggtggatagaagggggacaaggaggcacacccaggccggcaaagagcaggtatcagcactgcaagcaccaagtgtgtcttgagggggtggggtctttctgcccagatgtgggatcctctcctaaacccaggtcaacccagggcacgaggcagatggctgctcagtgagtactgggtatgtgtcacattgccaaatcccggatcacaagtctccatgaactgctggtgagctaggataataaaacccctgacatcaccattccagaagcttcacaagactgcatatataaggggctggctgtagctgcagctgaaggagctgaccagccagctgacccctcacactcacctagccaccatggacatcgccatccaccacccctggatccgccgccccttctttcctttccactcccccagccgcctctttgaccagttcttcggagagcacctgttggagtctgatcttttcccgacgtctacttccctgagtcccttctaccttcggccaccctccttcctgcgggcacccagctggtttgacactggactctcagagatgcgcctggagaaggacaggttctctgtcaacctggatgtgaagcacttctccccagaggaactcaaagttaaggtgttgggagatgtgattgaggtgcatggaaaacatgaagagcgccaggatgaacatggtttcatctccagggagttccacaggaaataccggatcccagctgatgtagaccctctcaccattacttcatccctgtcatctgatggggtcctcactgtgaatggaccaaggaaacaggtctctggccctgagcgcaccattcccatcacccgtgaagagaagcctgctgtcaccgcagcccccaagaaatagatgccctttcttgaattgcattttttaaaacaagaaagtttccccaccagtgaatgaaagtcttgtgactagtgctgaagcttattaatgctaagggcaggcccaaattatcaagcta

SEQ ID NO: 108345 - DNA, 479 bp, Artificial Sequence
  derived and/or modified sequence
aggaggaggaggcaccaaacggcctgggtggatagaagggggacaaggaggcacacccaggccggcaaagagcagctcagtgagtactgggtatgtgtcacattgccaaatcccggatcacaagtctccatgaactgctggtgagctaggataataaaacccctgacatcaccattccagaagcttcacaagactgcatatataaggggctggctgtagctgcagctgaaggagctgaccagccagctgacccctcacactcacctagccaccatggacatcgccatccaccacccctggatccgccgccccttctttcctttccactcccccagccgcctctttgaccagttcttcggagagcacctgttggagtctgatcttttcccgacgtctacttccctgagtcccttctaccttcggccaccctccttcctgcgggcacccagctggtttgacactggactctcagagatgcg

SEQ ID NO: 108346 - DNA, 525 bp, Artificial Sequence
  derived and/or modified sequence
atggacatcgccatccaccacccctggatcagaagacccttcttccccttccacagccccagcagactgttcgaccagttcttcggcgagcacctgctggagagcgacctgttccccaccagcaccagcctgagccccttctacctgagaccccccagcttcctgagagcccccagctggttcgacaccggcctgagcgagatgagactggagaaggacagattcagcgtgaacctggacgtgaagcacttcagccccgaggagctgaaggtgaaggtgctgggcgacgtgatcgaggtgcacggcaagcacgaggagagacaggacgagcacggcttcatcagcagagagttccacagaaagtacagaatccccgccgacgtggaccccctgaccatcaccagcagcctgagcagcgacggcgtgctgaccgtgaacggccccagaaagcaggtgagcggccccgagagaaccatccccatcaccagagaggagaagcccgccgtgaccgccgcccccaagtag

SEQ ID NO: 108347 - DNA, 234 bp, Artificial Sequence
  derived and/or modified sequence
atggacatcgccatccaccacccctggatcagaagacccttcttccccttccacagccccagcagactgttcgaccagttcttcggcgagcacctgctggagagcgacctgttccccaccagcaccagcctgagccccttctacctgagaccccccagcttcctgagagcccccagctggttcgacaccggcctgagcgagatgagactggagaaggacagattcagcgtgtag

SEQ ID NO: 108348 - DNA, 393 bp, Artificial Sequence
  derived and/or modified sequence
atggacatcgccatccaccacccctggatcagaagacccttcttccccttccacagccccagcagactgttcgaccagttcttcggcgagcacctgctggagagcgacctgttccccaccagcaccagcctgagccccttctacctgagaccccccagcttcctgagagcccccagctggttcgacaccggcctgagcgagatgagactggagaaggacagattcagcgtgaacctggacgtgaagcacttcagccccgaggagctgaaggtgaaggtgctgggcgacgtgatcgaggtgcacggcaagcacgaggagagacaggacgagcacggcttcatcagcagagagttccacagaaagtacagaatccccgccgacgtggacccctag

SEQ ID NO: 108349 - DNA, 210 bp, Artificial Sequence
  derived and/or modified sequence
atggacatcgccatccaccacccctggatcagaagacccttcttccccttccacagccccagcagactgttcgaccagttcttcggcgagcacctgctggagagcgacctgttccccaccagcaccagcctgagccccttctacctgagaccccccagcttcctgagagcccccagctggttcgacaccggcctgagcgagatgagatag

SEQ ID NO: 108350 - protein, 794 aa, Artificial Sequence
  derived and/or modified sequence
MELRPWLLWVVAATGTLVLLAADAQGQKVFTNTWAVRIPGGPAVANSVARKHGFLNLGQIFGDYYHFWHRGVTKRSLSPHRPRHSRLQREPQVQWLEQQVAKRRTKRDVYQEPTDPKFPQQWYLSGVTQRDLNVKAAWAQGYTGHGIVVSILDDGIEKNHPDLAGNYDPGASFDVNDQDPDPQPRYTQMNDNRHGTRCAGEVAAVANNGVCGVGVAYNARIGGVRMLDGEVTDAVEARSLGLNPNHIHIYSASWGPEDDGKTVDGPARLAEEAFFRGVSQGRGGLGSIFVWASGNGGREHDSCNCDGYTNSIYTLSISSATQFGNVPWYSEACSSTLATTYSSGNQNEKQIVTTDLRQKCTESHTGTSASAPLAAGIIALTLEANKNLTWRDMQHLVVQTSKPAHLNANDWATNGVGRKVSHSYGYGLLDAGAMVALAQNWTTVAPQRKCIIDILTEPKDIGKRLEVRKTVTACLGEPNHITRLEHAQARLTLSYNRRGDLAIHLVSPMGTRSTLLAARPHDYSADGFNDWAFMTTHSWDEDPSGEWVLEIENTSEANNYGTLTKFTLVLYGTAPEGLPVPPESSGCKTLTSSQACVVCEEGFSLHQKSCVQHCPPGFAPQVLDTHYSTENDVETIRASVCAPCHASCATCQGPALTDCLSCPSHASLDPVEQTCSRQSQSSRESPPQQQPPRLPPEVEAGQRLRAGLLPSHLPEVVAGLSCAFIVLVFVTVFLVLQLRSGFSFRGVKVYTMDRGLISYKGLPPEAWQEECPSDSEEDEGRGERTAFIKDQSAL

SEQ ID NO: 108351 - protein, 69 aa, Artificial Sequence
  derived and/or modified sequence
KPAHLNANDWATNGVGRKVSHSYGYGLWTQAPWWPWPRIGPQWPPSGSASSTSSPSPKTSGNGSRCGRP

SEQ ID NO: 108352 - protein, 69 aa, Artificial Sequence
  derived and/or modified sequence
MELRPWLLWVVAATGTLVLLAADAQGQKVFTNTWAVRIPGGPAVANSVARKHGFLNLGQIFGDYYHFWH

SEQ ID NO: 108353 - DNA, 252 bp, Artificial Sequence
  derived and/or modified sequence
atggccgccgctactgcgagtccaagatctctcctcgtactgcttcaagttgtggtcctcgccttggctcagattcggggtccccccggcgaacgcggaccaccaggcccccctggcccccccggggtgccaggatcagatggcatcgacggaccacccggcccggtggggcttcctggcgaaatcggcatcagaggaccaaaaggggacccaggccccgatggaccaagcggaccgcctggaccaccgtag

SEQ ID NO: 108354 - DNA, 4244 bp, Artificial Sequence
  derived and/or modified sequence
agaactggaagggccccgccctgtgaagggataggagcctgactgttgcagctgcagtgagtggcggggaagcagcagcggccaggatgaatcccaggtgctctggagctggatggtgaaggtcggcactcttcaccctcccgagccctgcccgtctcggccccatgcccccaccagtcagccccgggccacaggcagtgagcaggcacctgggagccgaggccctgtgaccaggccaaggagacgggcgctccagggtcccagccacctgtcccccccatggagctgaggccctggttgctatgggtggtagcagcaacaggaaccttggtcctgctagcagctgatgctcagggccagaaggtcttcaccaacacgtgggctgtgcgcatccctggaggcccagcggtggccaacagtgtggcacggaagcatgggttcctcaacctgggccagatcttcggggactattaccacttctggcatcgaggagtgacgaagcggtccctgtcgcctcaccgcccgcggcacagccggctgcagagggagcctcaagtacagtggctggaacagcaggtggcaaagcgacggactaaacgggacgtgtaccaggagcccacagaccccaagtttcctcagcagtggtacctgtctggtgtcactcagcgggacctgaatgtgaaggcggcctgggcgcagggctacacagggcacggcattgtggtctccattctggacgatggcatcgagaagaaccacccggacttggcaggcaattatgatcctggggccagttttgatgtcaatgaccaggaccctgacccccagcctcggtacacacagatgaatgacaacaggcacggcacacggtgtgcgggggaagtggctgcggtggccaacaacggtgtctgtggtgtaggtgtggcctacaacgcccgcattggaggggtgcgcatgctggatggcgaggtgacagatgcagtggaggcacgctcgctgggcctgaaccccaaccacatccacatctacagtgccagctggggccccgaggatgacggcaagacagtggatgggccagcccgcctcgccgaggaggccttcttccgtggggttagccagggccgaggggggctgggctccatctttgtctgggcctcggggaacgggggccgggaacatgacagctgcaactgcgacggctacaccaacagtatctacacgctgtccatcagcagcgccacgcagtttggcaacgtgccgtggtacagcgaggcctgctcgtccacactggccacgacctacagcagtggcaaccagaatgagaagcagatcgtgacgactgacttgcggcagaagtgcacggagtctcacacgggcacctcagcctctgcccccttagcagccggcatcattgctctcaccctggaggccaataagaacctcacatggcgggacatgcaacacctggtggtacagacctcgaagccagcccacctcaatgccaacgactgggccaccaatggtgtgggccggaaagtgagccactcatatggctacgggcttttggacgcaggcgccatggtggccctggcccagaattggaccacagtggccccccagcggaagtgcatcatcgacatcctcaccgagcccaaagacatcgggaaacggctcgaggtgcggaagaccgtgaccgcgtgcctgggcgagcccaaccacatcactcggctggagcacgctcaggcgcggctcaccctgtcctataatcgccgtggcgacctggccatccacctggtcagccccatgggcacccgctccaccctgctggcagccaggccacatgactactccgcagatgggtttaatgactgggccttcatgacaactcattcctgggatgaggatccctctggcgagtgggtcctagagattgaaaacaccagcgaagccaacaactatgggacgctgaccaagttcaccctcgtactctatggcaccgcccctgaggggctgcccgtacctccagaaagcagtggctgcaagaccctcacgtccagtcaggcctgtgtggtgtgcgaggaaggcttctccctgcaccagaagagctgtgtccagcactgccctccagggttcgccccccaagtcctcgatacgcactatagcaccgagaatgacgtggagaccatccgggccagcgtctgcgccccctgccacgcctcatgtgccacatgccaggggccggccctgacagactgcctcagctgccccagccacgcctccttggaccctgtggagcagacttgctcccggcaaagccagagcagccgagagtccccgccacagcagcagccacctcggctgcccccggaggtggaggcggggcaacggctgcgggcagggctgctgccctcacacctgcctgaggtggtggccggcctcagctgcgccttcatcgtgctggtcttcgtcactgtcttcctggtcctgcagctgcgctctggctttagttttcggggggtgaaggtgtacaccatggaccgtggcctcatctcctacaaggggctgccccctgaagcctggcaggaggagtgcccgtctgactcagaagaggacgagggccggggcgagaggaccgcctttatcaaagaccagagcgccctctgatgagcccactgcccaccccctcaagccaatcccctccttgggcactttttaattcaccaaagtatttttttatcttgggactgggtttggaccccagctgggaggcaagaggggtggagactgcttcccatcctaccctcgggcccacctggccacctgaggtgggcccaggaccagctggggcgtggggagggccgtaccccaccctcagcaccccttccatgtggagaaaggagtgaaacctttagggcagcttgccccggccccggccccagccagagttcctgcggagtgaagaggggcagcccttgcttgttgggattcctgacccaggccgcagctcttgcccttccctgtccctctaaagcaataatggtcccatccaggcagtcgggggctggcctaggagatatctgagggaggaggccacctctccaagggcttctgcaccctccaccctgtcccccagctctggtgagtcttggcggcagcagccatcataggaagggaccaaggcaaggcaggtgcctccaggtgtgcacgtggcatgtggcctgtggcctgtgtcccatgacccacccctgtgctccgtgcctccaccaccactggccaccaggctggcgcagccaaggccgaagctctggctgaaccctgtgctggtgtcctgaccaccctcccctctcttgcacccgcctctcccgtcagggcccaagtccctgttttctgagcccgggctgcctgggctgttggcactcacagacctggagcccctgggtgggtggtggggaggggcgctggcccagccggcctctctggcctcccacccgatgctgctttcccctgtggggatctcaggggctgtttgaggatatattttcactttgtgattatttcactttagatgctgatgatttgtttttgtatttttaatgggggtagcagctggactacccacgttctcacacccaccgtccgccctgctcctccctggctgccctggccctgaggtgtgggggctgcagcatgttgctgaggagtgaggaatagttgagccccaagtcctgaagaggcgggccagccaggcgggctcaaggaaagggggtcccagtgggaggggcaggctgacatctgtgtttcaagtggggctcgccatgccgggggttcataggtcactggctctccaagtgccagaggtgggcaggtggtggcactgagcccccccaacactgtgccctggtggagaaagcactgacctgtcatgcccccctcaaacctcctcttctgacgtgccttttgcacccctcccattaggacaatcagtcccctcccatctgggagtccccttttcttttctaccctagccattcctggtacccagccatctgcccaggggtgccccctcctctcccatccccctgccctcgtggccagcccggctggttttgtaagatgctgggttggtgcacagtgatttttttcttgtaatttaaacaggcccagcattgctggttctatttaatggacatgagataatgttagaggttttaaagtgattaaacgtgcagactatgcaaaccagg

SEQ ID NO: 108355 - DNA, 224 bp, Artificial Sequence
  derived and/or modified sequence
aagccagcccacctcaatgccaacgactgggccaccaatggtgtgggccggaaagtgagccactcatatggctacgggctttggacgcaggcgccatggtggccctggcccagaattggaccacagtggccccccagcggaagtgcatcatcgacatcctcaccgagcccaaagacatcgggaaacggctcgaggtgcggaagaccgtgaccgcgtgcctgggc

SEQ ID NO: 108356 - DNA, 587 bp, Artificial Sequence
  derived and/or modified sequence
aaacagcagtcggtcctggggtgaggcgcaatttgagtggcccagagtggctctctgtgtcaggaggttctggtgctggagaaaagggctttgcccaagaacacagccaggaagagcacccacagctctctctggccacagcctggaacagagtcccatgtgaaacaagaccatgagaaatacagcaagcctccaggtttgagacaaactgggactagaggggtcggcactcttcaccctcccgagccctgcccgtctcggccccatgcccccaccagtcagccccgggccacaggcagtgagcaggcacctgggagccgaggccctgtgaccaggccaaggagacgggcgctccagggtcccagccacctgtcccccccatggagctgaggccctggttgctatgggtggtagcagcaacaggaaccttggtcctgctagcagctgatgctcagggccagaaggtcttcaccaacacgtgggctgtgcgcatccctggaggcccagcggtggccaacagtgtggcacggaagcatgggttcctcaacctgggccagatcttcggggactattaccacttctggcat

SEQ ID NO: 108357 - DNA, 2385 bp, Artificial Sequence
  derived and/or modified sequence
atggaattacggccttggttgttgtgggtggtggccgccactgggactctcgtcctcctcgccgctgacgcccagggccagaaggtgtttacaaacacctgggcggtgaggatccctgggggcccggcagtagctaactctgtcgcccgcaaacacggattcttaaatttgggacaaatcttcggagattattatcacttttggcatagaggtgtcacaaagcgcagcctgagtcctcaccgccctagacactcccggctgcagagagaacctcaggttcagtggctggagcagcaggtggctaagcgcaggacaaagagggacgtgtaccaggaaccaactgacccaaaattcccacaacagtggtatctgtcaggggttacgcaaagggatttaaacgtgaaggccgcatgggcccaaggatacactgggcacgggatcgtcgtgagcatcttggacgatggaatcgagaaaaatcatcccgatctggctggaaattacgatccgggggcctcgtttgacgtgaacgaccaagatccggaccctcagccgcgttacacacagatgaacgataaccgtcatggaacccggtgtgcaggcgaagttgctgcagtagcaaataacggggtctgtggggtcggagttgcctataacgcccggattggaggcgtcaggatgttggacggggaggtcactgacgccgtggaggctcggagccttgggttaaaccccaaccatatccacatctattccgcaagttgggggcctgaagacgatggtaaaaccgtggacgggcccgcccgactggccgaggaagcgttttttaggggggtgtcacagggccggggtgggttgggctccatttttgtctgggcttccggcaatggcgggagagagcatgactcctgtaactgtgacggatacaccaactctatctatactttgtcaataagtagcgcaactcagtttggcaatgtgccctggtatagcgaagcatgctccagtacgctagctacaacgtactcatcgggcaatcaaaatgaaaaacagattgtgactactgaccttagacagaagtgcactgaatcacataccgggacatcggcaagcgccccactcgcagctggcattatcgcattgaccctagaggcaaataagaacttgacgtggcgggacatgcagcaccttgtagttcagacatccaaaccggcacacctgaatgccaatgactgggcaacaaacggcgtaggccgaaaggtgtctcatagctacggttatggactgctggacgctggggccatggtagctctagcccagaattggacaaccgtggccccgcaacgaaaatgtattatcgatatcctgacagaacctaaggatattggaaagcgtctcgaagtgcggaaaacagtaaccgcttgcctgggagagccgaatcatataactagattagagcatgcccaggcaaggctaacgctcagctacaatcgtaggggggatctcgctattcaccttgtcagtcctatgggtaccagaagcacccttcttgctgcacgcccccatgactactcagctgacggcttcaacgactgggctttcatgaccacccattcttgggatgaggatccatccggggagtgggtcctcgaaattgaaaacacttccgaggccaataactacggtaccctgaccaaattcactctggtcctctatggcacagcccctgagggcctgccagtcccacccgagtcttcgggctgtaagaccttaacctcttcccaggcctgcgtggtatgtgaagaaggattcagcctccaccagaagagctgcgttcagcattgcccccctggatttgctccacaggttctggacactcactactccactgaaaatgatgtcgagacaatacgcgcgagcgtgtgtgccccgtgtcacgcatcctgtgcaacctgtcaggggcctgcccttaccgactgtctatcttgcccatcacacgctagcttggatccagtggaacagacctgttcacgccagtcccaatcaagcagggagtcccctcctcaacagcagccaccacggctaccacccgaagtggaggccggccagagactgagggccgggctactgccatcacacttgcccgaagtggtggcaggcttatcttgcgctttcatcgtgctggtcttcgtaacagtgttcctggtattgcaactgaggagtggattttctttccgtggagtgaaagtgtacacaatggatagaggactgattagctacaaaggtctgcctccagaagcatggcaggaggagtgtcccagtgattccgaagaagatgaaggccgaggagaacgcacagcattcatcaaggaccagtccgctctctag

SEQ ID NO: 108358 - DNA, 210 bp, Artificial Sequence
  derived and/or modified sequence
aaaccagctcacctgaatgcgaacgactgggctaccaatggagttggtagaaaggtctcgcactcttacggatatgggctgtggactcaggctccttggtggccgtggccgagaatcggcccccagtggccccccagtggaagcgcctcaagcaccagtagcccctcccctaagactagcgggaatgggtccagatgtggacgcccctag

SEQ ID NO: 108359 - DNA, 210 bp, Artificial Sequence
  derived and/or modified sequence
atggaactgagaccatggctactgtgggtggtggctgctacggggactctggttctactggccgccgatgcacagggccaaaaagtctttacaaatacctgggccgtacggatccccggaggaccagctgttgcaaatagcgtggcacgcaagcacgggttccttaatttgggacagatattcggcgactattatcatttttggcattag

SEQ ID NO: 108360 - DNA, 2385 bp, Artificial Sequence
  derived and/or modified sequence
atggagctgcggccctggctgctgtgggtggtggccgccaccggcaccctggtgctgctggccgcagatgcccagggccagaaggtgttcaccaacacctgggccgtgcgcatccctgggggccctgctgtggccaacagcgtggccaggaagcacggcttcctgaacctgggccagatctttggagactactaccacttctggcacagaggagtgaccaagaggagcctgagcccccaccggcccaggcacagccggctgcagcgggagccccaggtgcagtggctggagcagcaggtggccaagaggaggaccaagagagatgtgtaccaggagcccacagaccccaagttcccccagcagtggtacctgtctggagtgacccagagggacctgaatgtgaaggccgcctgggcccagggctacacaggccatggaattgtggtgtccatcctggatgatggcatcgagaagaaccacccagacctggccggcaactatgaccccggggccagctttgatgtgaatgaccaggaccctgacccccagccccgctacacccagatgaatgacaacagacatggcacccgctgtgccggggaggtggccgctgtggccaacaacggggtgtgtggggtgggcgtggcctacaatgccagaattggaggagtgaggatgctggatggagaggtgacagatgctgtggaggcccggagcctgggcctgaaccccaaccacatccacatctacagcgcctcctggggcccagaagatgatggcaagacagtggatggccctgcccggctggccgaggaggccttcttccggggcgtgtcccagggccggggcggcctgggcagcatctttgtgtgggccagcggaaatggaggccgggagcatgacagctgcaactgtgatggctacaccaacagcatctacaccctgagcatcagcagcgccacccagtttggaaatgtgccctggtacagcgaggcctgcagcagcaccctggccaccacctacagcagcggcaaccagaatgagaagcagatcgtgaccacagacctgcggcagaagtgcacagagagccacacaggcaccagcgccagcgcccccctggccgccggcatcatcgccctgaccctggaggccaacaagaacctgacctggagggacatgcagcacctggtggtgcagaccagcaagccagcccacctgaatgccaatgactgggccaccaacggggtgggcaggaaggtgagccacagctatggctacggcctgctggatgctggggccatggtggccctggcccagaactggaccaccgtggccccccagaggaagtgcatcatcgacatcctgacagagcccaaggacatcggcaagaggctggaggtgaggaagacagtgacagcctgcctgggggagcccaaccacatcacccggctggagcacgcccaggcccggctgaccctgagctacaacagaagaggagacctggccatccacctggtgagccccatgggcaccaggagcaccctgctggccgcccggccccatgactacagcgcagatggcttcaatgactgggccttcatgaccacccacagctgggatgaggaccccagcggggagtgggtgctggagattgagaacaccagcgaggccaacaactacggcaccctgaccaagttcaccctggtgctgtatggaacagcccctgagggcctgcctgtgcccccagagagcagcggctgcaagaccctgaccagcagccaggcctgtgtggtgtgtgaggagggcttcagcctgcaccagaagagctgtgtgcagcactgccccccaggctttgccccccaggtgctggacacccactacagcacagaaaatgatgtggagaccatccgggcctctgtgtgtgccccctgccacgccagctgtgccacctgccagggccctgccctgacagactgcctgagctgccccagccacgccagcctggaccctgtggagcagacctgcagccggcagagccagagcagccgggagagccccccccagcagcagcccccccggctgcccccagaggtggaggccggccagaggctgcgggccggcctgctgcccagccacctgcctgaggtggtggccggcctgagctgtgccttcatcgtgctggtgtttgtgacagtgttcctggtgctgcagctgcggagcggcttctccttccggggcgtgaaggtgtacaccatggaccggggcctcatctcctacaagggcctgcccccagaggcctggcaggaggagtgccccagcgacagtgaagaagatgagggccgcggggagaggacagccttcatcaaggaccagagcgccctgtag

SEQ ID NO: 108361 - DNA, 210 bp, Artificial Sequence
  derived and/or modified sequence
aagccagcccacctgaatgccaatgactgggccaccaatggagtgggcaggaaggtgagccacagctatggctacggcctgtggacccaggccccctggtggccctggcccagaattggcccccagtggccacccagcggcagcgccagcagcaccagcagccccagccccaagaccagcggaaatggcagccgctgtggccggccctag

SEQ ID NO: 108362 - DNA, 210 bp, Artificial Sequence
  derived and/or modified sequence
atggagctgcggccctggctgctgtgggtggtggccgccaccggcaccctggtgctgctggccgcagatgcccagggccagaaggtgttcaccaacacctgggccgtgcgcatccctgggggccctgctgtggccaacagcgtggccaggaagcacggcttcctgaacctgggccagatctttggagactactaccacttctggcactag

SEQ ID NO: 108363 - DNA, 2385 bp, Artificial Sequence
  derived and/or modified sequence
atggagctgcggccctggctgctgtgggtggtggccgccaccggcacactggtgctcctggctgccgatgcgcaaggtcagaaggtgttcactaatacctgggcagtcagaatccccggcgggcccgctgtcgctaactctgtagctcgcaagcacgggtttctgaatctgggacagatttttggggattattatcatttctggcaccggggggttacgaagcgcagcctatctccacatcggcctaggcattcaaggctccagcgcgaaccccaagtacagtggctcgaacaacaagtggccaaaagacgaactaagcgcgatgtgtaccaggagcccacagatccaaaattcccccagcaatggtacttgtccggcgtcacccagcgggacctcaacgtcaaagccgcctgggcccagggctataccggacatggcatagtagtgtccatcctggatgatggtatcgagaaaaaccatcccgatcttgcaggcaattacgaccccggcgcgtcctttgatgtgaatgatcaagacccagatcctcagcctcggtatactcagatgaatgacaatcggcacggcacccggtgcgcaggggaagtggccgctgtagccaataacggtgtttgcggtgtgggggttgcctataacgcccggatcgggggggtgagaatgcttgacggtgaggttactgacgccgtcgaggctcgcagccttgggctgaaccctaaccatatccatatatattccgcctcctggggtcctgaggatgatggcaaaactgtggacgggccagcccgactggccgaagaagccttcttccgtggcgtcagtcaagggcgcggaggcttgggttctatctttgtttgggcaagcggcaacggaggccgcgaacatgacagttgtaattgcgacgggtacacaaattctatctacaccctgagcattagctccgctacacagttcggtaacgttccgtggtactctgaggcttgctcctccaccttggcaaccacatacagcagcggcaaccagaacgagaagcagatagtgactaccgacctccgccagaagtgcacagaaagtcacaccggtacttccgcgtccgcaccactggccgcagggattatcgctcttacacttgaagcgaataaaaatctcacatggcgagatatgcagcacctggtagtgcagacatccaagccagcacacttgaatgccaacgattgggccaccaacggcgtgggaaggaaggtctcccactcgtatggatacggtctcctggatgcgggcgcgatggtagctttggcccagaattggaccaccgtcgcaccccagcgcaagtgtatcattgacattctgacagaaccaaaagatatcggtaaaagactcgaggtgcgaaaaaccgtgacagcttgcctgggcgaacctaaccatattacccggctggagcacgcacaggctagattaaccctgtcctacaaccggcggggcgatctggccatacatctggtatcgcccatgggaaccaggagcacattactggccgccagaccacacgactatagcgctgacgggtttaacgattgggcatttatgacgacccattcctgggacgaagatccatccggcgagtgggtgttagaaatcgagaacacatccgaggccaacaattacggcaccctgaccaagtttacactggtgctatatgggacggcgcctgaggggctccctgtcccccccgagtctagcgggtgcaaaaccctcacctccagtcaggcctgcgtggtgtgcgaggagggctttagcctccatcagaagtcgtgcgtacagcattgtcccccaggcttcgccccacaggtgctggatacacattactctaccgaaaacgacgtcgagaccatccgcgcttccgtgtgtgccccatgccatgcatcctgtgcaacatgccaagggccggcattgaccgactgtctgtcttgccctagccacgcctccctcgaccctgtcgaacagacgtgtagccgtcaatcgcagtcctcccgtgaatcacctccccagcaacagccccctcgactcccgcccgaggtggaggcaggacagaggctgcgcgcgggactgctcccctcgcatctgccagaggttgtggcaggcctgtcatgcgcgttcatcgtcctggtcttcgttacggtgttcctcgtcctccagctccggtctggtttcagcttccggggtgttaaggtttatacgatggacaggggcttaatctcctacaagggactgcctcccgaggcctggcaggaagagtgcccttctgacagtgaagaagacgaaggacggggagagagaaccgcgtttatcaaagatcaatctgccttgtag

SEQ ID NO: 108364 - DNA, 210 bp, Artificial Sequence
  derived and/or modified sequence
aagcccgcccacctgaacgccaacgactgggccaccaacggcgtgggtcgtaaagtctcgcactcctacggctacggcttgtggacacaagctccatggtggccttggcctagaattggaccccagtggcccccatcgggtagcgcctcatctaccagcagcccctctccaaagacctctggtaacggcagtcggtgcggaagaccctag

SEQ ID NO: 108365 - DNA, 210 bp, Artificial Sequence
  derived and/or modified sequence
atggagctgcggccctggctgctgtgggtggtggccgccaccggcacccttgtactcctagccgccgacgctcaaggccagaaagtgtttacaaatacctgggctgtgcgcatacccggcgggccagcggtggccaactctgtcgcgcgaaaacacgggttcctgaatctgggacagatcttcggagactactatcatttttggcattag

SEQ ID NO: 108366 - DNA, 2385 bp, Artificial Sequence
  derived and/or modified sequence
atggagcttagaccctggctcctttgggtggttgccgctactgggactttagtgctgctggccgcagatgcgcagggccagaaagtcttcaccaatacctgggccgtgagaatccccggtggacctgccgtcgcaaattccgtcgccagaaaacatggatttcttaacctaggccagatctttggggattattaccatttctggcataggggagttactaagcgtagtctcagcccccatcgaccgcgacattcccgactgcaacgtgaaccacaggtccagtggctggaacaacaggtagctaagcgacgaacaaagagagacgtctatcaggaacctacagatccgaaatttccacagcaatggtacttatcgggagtgacccagagggatctgaatgtcaaagctgcctgggctcagggatacaccgggcacgggattgtagtatctatcctggacgacggcatcgagaaaaatcaccctgatttggctgggaactacgatccaggtgcatcctttgatgttaatgaccaagaccccgaccctcagcccagatacacccagatgaacgataaccgccatggtacgcgctgcgctggcgaagtggcagcagtcgctaataatggagtttgtggagtgggggtggcgtacaatgctaggattggtggagtgcgtatgctggacggagaagtcactgatgcagtggaagcaagatccctgggattaaaccctaatcatatccacatatactccgcatcttggggccctgaagacgacggcaagacagtggatggtcctgctcgtttggccgaagaggcatttttcaggggtgtgtcgcaggggaggggcggattaggcagtatattcgtgtgggcttcgggcaatggcggtagggagcatgacagttgtaactgtgacgggtacaccaattcgatttacacgctgagcattagcagcgctactcagttcggaaatgtcccatggtattccgaggcctgctccagtaccctcgcaaccacatactcttccggaaaccaaaacgaaaagcagatcgtgacaaccgacctgcgtcagaagtgcacagagagccatacggggacttcagccagcgccccattggcggcaggcatcatcgcactgacacttgaggccaacaaaaacttgacgtggagggatatgcagcatcttgtggtgcagacctctaaacccgcacatctcaacgccaacgactgggctaccaacggagtcggcaggaaagttagccacagttacggctacggtctactggatgctggagctatggttgcacttgcccaaaactggacaaccgttgctcctcagaggaagtgcattatcgatatactgacagaacccaaggacattggtaaacgtctggaagtccggaagaccgtcacagcatgtctgggcgagccaaaccacattactaggctggagcacgcacaagctaggctgaccctgtcctataaccgcagaggggacctggctatccacctcgtgtctcccatgggcaccaggtcgacgctgttagctgccaggcctcacgattactccgccgacggattcaatgattgggcgttcatgactacgcacagctgggacgaggacccttcaggcgagtgggttttagagatcgagaacaccagtgaggctaacaattacggcacccttacgaagtttactctggttttatatggaaccgccccagaaggtctgcccgtgccgcctgagtcatccggctgtaaaacgctgaccagtagtcaggcctgtgtggtttgcgaagaaggcttctccctccatcagaaaagctgcgtgcagcattgtccgccaggatttgcaccccaggtgctggatacccattattccactgaaaatgatgttgagactatcagagcgtctgtgtgcgcaccatgtcatgcatcctgcgccacttgccaggggccagcccttacagactgcttatcttgtccttcgcatgcttccctcgatccggtcgagcagacatgcagtcgtcaatcccaatctagtagggagtcccctccacagcagcagccccctagactgccacccgaggtggaagccggacagagactgcgcgctgggctgctgccttcacatctgccagaagtggtagccggtctttcttgtgcctttatagtgcttgttttcgtgactgtgtttttggtcttgcagctccgatcaggattctcctttaggggcgttaaggtttacaccatggacaggggactgatctcctataagggcctgcccccagaggcttggcaggaggagtgtcccagcgacagcgaagaagatgaaggccgtggggagagaacagcttttatcaaggatcagtctgctctttag

SEQ ID NO: 108367 - DNA, 210 bp, Artificial Sequence
  derived and/or modified sequence
aagcctgctcacctgaacgctaacgactgggctactaacggagtggggaggaaggtgtcccactcgtatggatatggattgtggacccaagcaccctggtggccctggccaaggatcggacctcagtggcccccttccgggtctgcctcttctacaagtagcccgagtccgaagaccagcggcaacggctcaagatgcggccgaccctag

SEQ ID NO: 108368 - DNA, 210 bp, Artificial Sequence
  derived and/or modified sequence
atggaactacgtccatggctcctttgggtggttgcggcaaccggtactttggttcttctggccgcagacgcccagggacaaaaggtgtttacgaacacgtgggctgtgagaatccccggaggccctgccgtcgccaactctgtcgccagaaaacatggatttctcaatctgggccagatttttggcgattattatcacttctggcattag

SEQ ID NO: 108369 - DNA, 2385 bp, Artificial Sequence
  derived and/or modified sequence
atggagctgagaccctggctgctgtgggtggtggccgccaccggcaccctggtgctgctggccgccgacgcccagggccagaaggtgttcaccaacacctgggccgtgagaatccccggcggccccgccgtggccaacagcgtggccagaaagcacggcttcctgaacctgggccagatcttcggcgactactaccacttctggcacagaggcgtgaccaagagaagcctgagcccccacagacccagacacagcagactgcagagagagccccaggtgcagtggctggagcagcaggtggccaagagaagaaccaagagagacgtgtaccaggagcccaccgaccccaagttcccccagcagtggtacctgagcggcgtgacccagagagacctgaacgtgaaggccgcctgggcccagggctacaccggccacggcatcgtggtgagcatcctggacgacggcatcgagaagaaccaccccgacctggccggcaactacgaccccggcgccagcttcgacgtgaacgaccaggaccccgacccccagcccagatacacccagatgaacgacaacagacacggcaccagatgcgccggcgaggtggccgccgtggccaacaacggcgtgtgcggcgtgggcgtggcctacaacgccagaatcggcggcgtgagaatgctggacggcgaggtgaccgacgccgtggaggccagaagcctgggcctgaaccccaaccacatccacatctacagcgccagctggggccccgaggacgacggcaagaccgtggacggccccgccagactggccgaggaggccttcttcagaggcgtgagccagggcagaggcggcctgggcagcatcttcgtgtgggccagcggcaacggcggcagagagcacgacagctgcaactgcgacggctacaccaacagcatctacaccctgagcatcagcagcgccacccagttcggcaacgtgccctggtacagcgaggcctgcagcagcaccctggccaccacctacagcagcggcaaccagaacgagaagcagatcgtgaccaccgacctgagacagaagtgcaccgagagccacaccggcaccagcgccagcgcccccctggccgccggcatcatcgccctgaccctggaggccaacaagaacctgacctggagagacatgcagcacctggtggtgcagaccagcaagcccgcccacctgaacgccaacgactgggccaccaacggcgtgggcagaaaggtgagccacagctacggctacggcctgctggacgccggcgccatggtggccctggcccagaactggaccaccgtggccccccagagaaagtgcatcatcgacatcctgaccgagcccaaggacatcggcaagagactggaggtgagaaagaccgtgaccgcctgcctgggcgagcccaaccacatcaccagactggagcacgcccaggccagactgaccctgagctacaacagaagaggcgacctggccatccacctggtgagccccatgggcaccagaagcaccctgctggccgccagaccccacgactacagcgccgacggcttcaacgactgggccttcatgaccacccacagctgggacgaggaccccagcggcgagtgggtgctggagatcgagaacaccagcgaggccaacaactacggcaccctgaccaagttcaccctggtgctgtacggcaccgcccccgagggcctgcccgtgccccccgagagcagcggctgcaagaccctgaccagcagccaggcctgcgtggtgtgcgaggagggcttcagcctgcaccagaagagctgcgtgcagcactgcccccccggcttcgccccccaggtgctggacacccactacagcaccgagaacgacgtggagaccatcagagccagcgtgtgcgccccctgccacgccagctgcgccacctgccagggccccgccctgaccgactgcctgagctgccccagccacgccagcctggaccccgtggagcagacctgcagcagacagagccagagcagcagagagagccccccccagcagcagccccccagactgccccccgaggtggaggccggccagagactgagagccggcctgctgcccagccacctgcccgaggtggtggccggcctgagctgcgccttcatcgtgctggtgttcgtgaccgtgttcctggtgctgcagctgagaagcggcttcagcttcagaggcgtgaaggtgtacaccatggacagaggcctgatcagctacaagggcctgccccccgaggcctggcaggaggagtgccccagcgacagcgaggaggacgagggcagaggcgagagaaccgccttcatcaaggaccagagcgccctgtag

SEQ ID NO: 108370 - DNA, 210 bp, Artificial Sequence
  derived and/or modified sequence
aagcccgcccacctgaacgccaacgactgggccaccaacggcgtgggcagaaaggtgagccacagctacggctacggcctgtggacccaggccccctggtggccctggcccagaatcggcccccagtggccccccagcggcagcgccagcagcaccagcagccccagccccaagaccagcggcaacggcagcagatgcggcagaccctag

SEQ ID NO: 108371 - DNA, 210 bp, Artificial Sequence
  derived and/or modified sequence
atggagctgagaccctggctgctgtgggtggtggccgccaccggcaccctggtgctgctggccgccgacgcccagggccagaaggtgttcaccaacacctgggccgtgagaatccccggcggccccgccgtggccaacagcgtggccagaaagcacggcttcctgaacctgggccagatcttcggcgactactaccacttctggcactag

SEQ ID NO: 108372 - RNA, 252 nt, Artificial Sequence
  derived and/or modified sequence
auggccgccgcuacugcgaguccaagaucucuccucguacugcuucaaguugugguccucgccuuggcucagauucgggguccccccggcgaacgcggaccaccaggccccccuggcccccccggggugccaggaucagauggcaucgacggaccacccggcccgguggggcuuccuggcgaaaucggcaucagaggaccaaaaggggacccaggccccgauggaccaagcggaccgccuggaccaccguag

SEQ ID NO: 108373 - protein, 394 aa, Artificial Sequence
  derived and/or modified sequence
MVPSQAPYLVPAFPLPAATSPGREYAAPGTAPEGLHGLPLSEGLQPYPAFPFPYLDTFMTVFLPDPPVCPLLSPSFLPCPFLGATASSAISPSMSSAMSPTLDPPPSVTSQRREEEKWEAQSEGHPFITSRSSSPLQLNLLQEEMPRPSESPDQMRRNTCPQTEYCVTGNNGSESSPATTGALSTGSPPRENPSHPTASALSTGSPPMKNPSHPTASTLSMGLPPSRTPSHPTATVLSTGSPPSESPSRTGSAASGSSDSSIYLTSSVYSSKISQNGQQSQDVQKKETFPNVAEEPIWRMIRQTPERILMTYQVPERVKEVVLKEDLEKLESMRQQQPQFSHGQKEELAKVYNWIQSQTVTQEIDIQACVTCENEDSADGAATSCGQVLVEDSC

SEQ ID NO: 108374 - protein, 1210 aa, Artificial Sequence
  derived and/or modified sequence
MPRGEAPGPGRRGAKDEALGEESGERWSPEFHLQRKLADSSHSEQQDRNRVSEELIMVVQEMKKYFPSERRNKPSTLDALNYALRCVHSVQANSEFFQILSQNGAPQADVSMYSLEELATIASEHTSKNTDTFVAVFSFLSGRLVHISEQAALILNRKKDVLASSHFVDLLAPQDMRVFYAHTARAQLPFWNNWTQRAAARYECAPVKPFFCRIRGGEDRKQEKCHSPFRIIPYLIHVHHPAQPELESEPCCLTVVEKIHSGYEAPRIPVNKRIFTTTHTPGCVFLEVDEKAVPLLGYLPQDLIGTSILSYLHPEDRSLMVAIHQKVLKYAGHPPFEHSPIRFCTQNGDYIILDSSWSSFVNPWSRKISFIIGRHKVRTSPLNEDVFATKIKKMNDNDKDITELQEQIYKLLLQPVHVSVSSGYGSLGSSGSQEQLVSIASSSEASGHRVEETKAEQMTLQQVYASVNKIKNLGQQLYIESMTKSSFKPVTGTRTEPNGGGESANGGGECKTFTSFHQTLKNNSVYTEPCEDLRNDEHSPSYQQINCIDSVIRYLKSYNIPALKRKCISCTNTTSSSSEEDKQNHKADDVQALQAGLQIPAIPKSEMPTNGRSIDTGGGAPQILSTAMLSLGSGISQCGYSSTIVHVPPPETARDATLFCEPWTLNMQPAPLTSEEFKHVGLTAAVLSAHTQKEEQNYVDKFREKILSSPYSSYLQQESRSKAKYSYFQGDSTSKQTRSAGCRKGKHKRKKLPEPPDSSSSNTGSGPRRGAHQNAQPCCPSAASSPHTSSPTFPPAAMVPSQAPYLVPAFPLPAATSPGREYAAPGTAPEGLHGLPLSEGLQPYPAFPFPYLDTFMTVFLPDPPVCPLLSPSFLPCPFLGATASSAISPSMSSAMSPTLDPPPSVTSQRREEEKWEAQSEGHPFITSRSSSPLQLNLLQEEMPRPSESPDQMRRNTCPQTEYQCVTGNNGSESSPATTGALSTGSPPRENPSHPTASALSTGSPPMKNPSHPTASALSTGSPPMKNPSHPTASTLSMGLPPSRTPSHPTATVLSTGSPPSESPSRTGSAASGSSDSSIYLTSSVYSSKISQNGQQSQDVQKKETFPNVAEEPIWRMIRQTPERILMTYQVPERVKEVVLKEDLEKLESMRQQQPQFSHGQKEELAKVYNWIQSQTVTQEIDIQACVTCENEDSADGAATSCGQVLVEDSC

SEQ ID NO: 108375 - DNA, 3633 bp, Artificial Sequence
  derived and/or modified sequence
atgcccagaggcgaggcccccggccccggcagaagaggcgccaaggacgaggccctgggcgaggagagcggcgagagatggagccccgagttccacctgcagagaaagctggccgacagcagccacagcgagcagcaggacagaaacagagtgagcgaggagctgatcatggtggtgcaggagatgaagaagtacttccccagcgagagaagaaacaagcccagcaccctggacgccctgaactacgccctgagatgcgtgcacagcgtgcaggccaacagcgagttcttccagatcctgagccagaacggcgccccccaggccgacgtgagcatgtacagcctggaggagctggccaccatcgccagcgagcacaccagcaagaacaccgacaccttcgtggccgtgttcagcttcctgagcggcagactggtgcacatcagcgagcaggccgccctgatcctgaacagaaagaaggacgtgctggccagcagccacttcgtggacctgctggccccccaggacatgagagtgttctacgcccacaccgccagagcccagctgcccttctggaacaactggacccagagagccgccgccagatacgagtgcgcccccgtgaagcccttcttctgcagaatcagaggcggcgaggacagaaagcaggagaagtgccacagccccttcagaatcatcccctacctgatccacgtgcaccaccccgcccagcccgagctggagagcgagccctgctgcctgaccgtggtggagaagatccacagcggctacgaggcccccagaatccccgtgaacaagagaatcttcaccaccacccacacccccggctgcgtgttcctggaggtggacgagaaggccgtgcccctgctgggctacctgccccaggacctgatcggcaccagcatcctgagctacctgcaccccgaggacagaagcctgatggtggccatccaccagaaggtgctgaagtacgccggccacccccccttcgagcacagccccatcagattctgcacccagaacggcgactacatcatcctggacagcagctggagcagcttcgtgaacccctggagcagaaagatcagcttcatcatcggcagacacaaggtgagaaccagccccctgaacgaggacgtgttcgccaccaagatcaagaagatgaacgacaacgacaaggacatcaccgagctgcaggagcagatctacaagctgctgctgcagcccgtgcacgtgagcgtgagcagcggctacggcagcctgggcagcagcggcagccaggagcagctggtgagcatcgccagcagcagcgaggccagcggccacagagtggaggagaccaaggccgagcagatgaccctgcagcaggtgtacgccagcgtgaacaagatcaagaacctgggccagcagctgtacatcgagagcatgaccaagagcagcttcaagcccgtgaccggcaccagaaccgagcccaacggcggcggcgagagcgccaacggcggcggcgagtgcaagaccttcaccagcttccaccagaccctgaagaacaacagcgtgtacaccgagccctgcgaggacctgagaaacgacgagcacagccccagctaccagcagatcaactgcatcgacagcgtgatcagatacctgaagagctacaacatccccgccctgaagagaaagtgcatcagctgcaccaacaccaccagcagcagcagcgaggaggacaagcagaaccacaaggccgacgacgtgcaggccctgcaggccggcctgcagatccccgccatccccaagagcgagatgcccaccaacggcagaagcatcgacaccggcggcggcgccccccagatcctgagcaccgccatgctgagcctgggcagcggcatcagccagtgcggctacagcagcaccatcgtgcacgtgcccccccccgagaccgccagagacgccaccctgttctgcgagccctggaccctgaacatgcagcccgcccccctgaccagcgaggagttcaagcacgtgggcctgaccgccgccgtgctgagcgcccacacccagaaggaggagcagaactacgtggacaagttcagagagaagatcctgagcagcccctacagcagctacctgcagcaggagagcagaagcaaggccaagtacagctacttccagggcgacagcaccagcaagcagaccagaagcgccggctgcagaaagggcaagcacaagagaaagaagctgcccgagccccccgacagcagcagcagcaacaccggcagcggccccagaagaggcgcccaccagaacgcccagccctgctgccccagcgccgccagcagcccccacaccagcagccccaccttcccccccgccgccatggtgcccagccaggccccctacctggtgcccgccttccccctgcccgccgccaccagccccggcagagagtacgccgcccccggcaccgcccccgagggcctgcacggcctgcccctgagcgagggcctgcagccctaccccgccttccccttcccctacctggacaccttcatgaccgtgttcctgcccgacccccccgtgtgccccctgctgagccccagcttcctgccctgccccttcctgggcgccaccgccagcagcgccatcagccccagcatgagcagcgccatgagccccaccctggaccccccccccagcgtgaccagccagagaagagaggaggagaagtgggaggcccagagcgagggccaccccttcatcaccagcagaagcagcagccccctgcagctgaacctgctgcaggaggagatgcccagacccagcgagagccccgaccagatgagaagaaacacctgcccccagaccgagtaccagtgcgtgaccggcaacaacggcagcgagagcagccccgccaccaccggcgccctgagcaccggcagcccccccagagagaaccccagccaccccaccgccagcgccctgagcaccggcagcccccccatgaagaaccccagccaccccaccgccagcgccctgagcaccggcagcccccccatgaagaaccccagccaccccaccgccagcaccctgagcatgggcctgccccccagcagaacccccagccaccccaccgccaccgtgctgagcaccggcagcccccccagcgagagccccagcagaaccggcagcgccgccagcggcagcagcgacagcagcatctacctgaccagcagcgtgtacagcagcaagatcagccagaacggccagcagagccaggacgtgcagaagaaggagaccttccccaacgtggccgaggagcccatctggagaatgatcagacagacccccgagagaatcctgatgacctaccaggtgcccgagagagtgaaggaggtggtgctgaaggaggacctggagaagctggagagcatgagacagcagcagccccagttcagccacggccagaaggaggagctggccaaggtgtacaactggatccagagccagaccgtgacccaggagatcgacatccaggcctgcgtgacctgcgagaacgaggacagcgccgacggcgccgccaccagctgcggccaggtgctggtggaggacagctgctag

SEQ ID NO: 108376 - DNA, 3633 bp, Artificial Sequence
  derived and/or modified sequence
atgccaaggggtgaggcaccaggtccaggtagaaggggcgctaaagacgaagccctaggggaggagagtggtgaacgctggtctccagagttccatctgcagagaaagctggctgattcgagtcatagtgagcagcaggatcgcaacagggtgagcgaggagctcatcatggtggtgcaggagatgaaaaaatattttccctctgaaagaagaaataaaccgagtacccttgacgccttaaattatgctctccgatgtgttcattccgtgcaagctaatagcgaattcttccaaatcttgtcccagaatggagctccacaggcagacgtcagtatgtacagcctggaagagttggccactatcgcttcagagcacaccagcaagaacacagacaccttcgtcgccgtgttttcctttctgtctggacgattggtccacatatctgagcaggccgccctcatcttgaatcggaagaaagacgtactcgcaagttcccactttgtcgacctgctggcccctcaggacatgcgggtattttacgctcacaccgccagagcccagctgcctttctggaacaactggacgcagcgggctgccgctagatatgagtgtgcgcccgtgaaacctttcttttgcagaattagagggggcgaagatcgtaagcaggaaaagtgccatagtccgtttagaattattccatatcttatccacgtccaccaccccgctcaaccagaactcgagtcagagccatgttgcttaaccgtggtggaaaagatccactccggctacgaagctcctcggattcctgtgaataaacgaatcttcaccaccactcacactccaggatgtgtgtttctcgaagtggacgagaaggctgtccctttgcttggctacctcccccaggacctcatcggaacaagcattctgtcctatttacaccctgaggatcggtcactgatggtcgcaatccatcaaaaagtcttaaagtatgctgggcacccgccttttgagcatagtcctattaggttctgtacccagaacggtgattatatcatccttgactcatcctggagcagctttgtgaacccatggtccagaaaaatcagtttcatcattggtcgtcataaagtgaggacttcacccttaaacgaagacgtgtttgcgaccaagattaaaaagatgaatgacaacgataaagatatcaccgaactacaggagcagatatacaagctgcttcttcagcccgtgcacgtgagcgtgagttctgggtacggctcgctcggaagcagcggatcccaggagcaactcgtctccatagcttcctcttcagaggcctccggacacagagtagaggaaacaaaggcagagcagatgacactccagcaagtttacgccagtgtcaacaagatcaagaatctgggacagcagctctatatcgaaagcatgaccaaaagttcattcaaaccagttaccggaacacggaccgagccaaatggaggtggagagtccgctaatggtggtggcgagtgcaaaacgtttacaagcttccaccagacactgaagaataactccgtctacaccgagccttgcgaggatctccgaaatgacgaacattccccttcctaccagcagatcaactgcattgattccgtgatacgttatctcaagtcctataacatccccgcactgaaacggaaatgtatatcttgtactaatacaacttcttccagcagtgaggaggacaagcagaatcacaaggcagatgatgtgcaggcactgcaggccggcctgcagatacctgccatccctaagtcagagatgcctacaaacggccgcagcatcgacacaggcggtggagctccacagattctgtccaccgccatgctaagcctgggttccggaatatctcaatgtggttactcctccacaatcgtgcacgtgcctcctcctgagactgctagagacgctacactattctgcgagccatggaccctaaatatgcaacctgcccccctgacatcggaagagttcaagcatgtcggcttgacagccgcggtgctgtctgcccacacacagaaagaggaacaaaattatgtggacaaatttcgcgagaaaatcctctccagcccttattccagttacctgcagcaagagagtagatctaaggccaaatatagttacttccagggggattcaactagtaagcagacacggtccgctggctgccgcaagggtaaacataagcgcaaaaagcttcctgaaccacccgactctagtagtagcaacactgggtcaggacctaggcgcggagcccatcagaacgcccagccatgctgtccttccgctgcctcctccccgcatacctcctctccaactttccctcctgctgcaatggtgcctagccaagccccatatttggtgccggcgttccccttaccagccgccacaagtcctggccgagaatatgccgctcctgggaccgcccccgaaggtctgcacggcctgcccttatccgaaggacttcagccctatcccgcatttccgtttccatacctcgacacctttatgactgttttcttacccgacccacccgtctgccctcttctgtctccttctttccttccgtgtccttttctcggcgccaccgcctcatctgcgatttcacctagtatgtccagcgctatgtcccccacactggatccccctcccagcgtgactagccagcgacgcgaagaagagaaatgggaagcacagtcagagggccatccgttcatcacatcgcgaagttcttctcctttgcagctcaacctgcttcaggaagaaatgcctcgcccttcagagagcccagatcagatgagacggaatacatgtccccaaacagagtatcagtgcgtgactggaaataatggcagcgaatcgtcgcccgccactaccggtgccctcagtaccgggtctccccctagggagaacccttctcaccctaccgcctctgccctgtcgaccgggtcccctcccatgaagaacccctcgcaccccacagccagtgccctgagtacaggcagcccgcctatgaaaaacccatcccacccgaccgcgagcactttatcaatgggtctgcctcccagccgcacgccttcacacccaaccgccacagtccttagcaccgggtcccctccctctgagagcccctcaagaaccggctctgctgcaagcggtagctcagatagtagcatctaccttactagtagtgtgtactcgagcaagatcagccagaatggacaacagagccaggacgtccagaaaaaagagacctttcccaatgtcgccgaagaacctatctggaggatgatcagacagaccccggaacgcatcctgatgacctatcaggtgccagagcgcgtaaaagaagtggtgctgaaggaggacctagaaaagctggaatcgatgaggcaacagcagccgcagttcagtcacggacagaaggaggagttagctaaggtttataattggattcagagtcagaccgtaacgcaggagatcgatatccaggcctgcgtgacctgcgaaaacgaggattccgccgatggcgccgcgacctcgtgcgggcaagtgctcgtcgaggattcatgctag

SEQ ID NO: 108377 - DNA, 6279 bp, Artificial Sequence
  derived and/or modified sequence
gccggagtcctgaaagtcgagcgagctccgggttttgaaaatgttggagggaaaagctcctcggagatgagcgtgaccccctggctcgtggtggccgcctgttctcactaacgccatggcggggaccggagtgagaaaccggtgtctgtcactgactgcaaagtgagcgagaagcaggctgcgggccgtcccagcacgacgtggagccccgcggagacctcgagatgccccgcggggaagctcctggccccgggagacggggggctaaggacgaggccctgggcgaagaatcgggggagcggtggagccccgagttccatctgcagaggaaattggcggacagcagccacagtgaacagcaagatcgaaacagagtttctgaagaacttatcatggttgtccaagaaatgaaaaaatacttcccctcggagagacgcaataaaccaagcactctagatgccctcaactatgctctccgctgtgtccacagcgttcaagcaaacagtgagtttttccagattctcagtcagaatggagcacctcaggcagatgtgagcatgtacagtcttgaggagctggccactatcgcttcagaacacacttccaaaaacacagatacctttgtggcagtattttcatttctgtctggaaggttagtgcacatttctgaacaggctgctttgatcctgaatcgtaagaaagatgtcctggcgtcttctcactttgttgacctgcttgcacctcaagacatgagggtattctacgcgcacactgccagagctcagcttcctttctggaacaactggacccaaagagcagctgcacggtatgaatgtgctccggtgaaaccttttttctgcaggatccgtggaggtgaagacagaaagcaagagaagtgtcactccccattccggatcatcccctatctgattcatgtacatcaccctgcccagccagaattggaatcggaaccttgctgtctcactgtggttgaaaagattcactctggttatgaagctcctcggatcccagtgaataaaagaatcttcaccaccacacacaccccagggtgtgtttttcttgaagtagatgaaaaagcagtgcctttgctgggttacctacctcaggacctgattggaacatcgatcctaagctacctgcaccctgaagatcgttctctgatggttgccatacaccaaaaagttttgaagtatgcagggcatcctccctttgaacattctcccattcgattttgtactcaaaacggagactacatcatactggattccagttggtccagctttgtgaatccctggagccggaagatttctttcatcattggtcggcataaagttcgaacgagcccactaaatgaggatgtttttgctaccaaaattaaaaagatgaacgataatgacaaagacataacagaattacaagaacaaatttacaaacttctcttacagccagttcacgtgagcgtgtccagcggctacgggagcctggggagcagcgggtcgcaggagcagcttgtcagcatcgcctcctccagtgaggccagtgggcaccgtgtggaggagacgaaggcggagcagatgaccttgcagcaggtctatgccagtgtgaacaaaattaaaaatctgggtcagcagctctacattgagtcaatgaccaaatcatcattcaagccagtgacggggacacgcacagaaccgaatggtggtggtgagtcagcgaatggtggtggtgaatgtaagacctttacttccttccaccaaacactgaaaaacaatagtgtgtacactgagccctgtgaggatttgaggaacgatgagcacagcccatcctatcaacagatcaactgtatcgacagtgtcatcagatacctgaagagctacaacattccagctttgaaaagaaagtgtatctcctgtacaaatacaacttcttcctcctcagaagaagacaaacagaaccacaaggcagatgatgtccaagccttacaagctggtttgcaaatcccagccatacctaaatcagaaatgccaacaaatggacggtccatagacacaggaggaggagctccacagatcctgtccacggcgatgctgagcttggggtcgggcataagccaatgcggttacagcagcaccattgtccatgtcccacccccagagacagccagggatgctaccctcttctgtgagccctggaccctgaacatgcagccagcccctttgacctcggaagaatttaaacacgtggggctcacagcggctgttctgtcagcgcacacccagaaggaagagcagaattatgttgataaattccgagaaaagatcctgtcatcaccctacagctcctatcttcagcaagaaagcaggagcaaagctaaatattcatattttcaaggagattctacttccaagcagacgcggtcggccggctgcaggaaagggaagcacaagcggaagaagctgccggagccgccagacagcagcagctcgaacaccggctctggtccccgcaggggagcgcatcagaacgcacagccctgctgcccctccgcggcctcctctccgcacacctcgagcccgaccttcccacctgccgccatggtgcccagccaggccccttacctcgtcccagcttttcccctcccagccgcgacctcacccggaagagaatacgcagcccccggaactgcaccggaaggcctgcatgggctgcccttgtccgagggcttgcagccttacccagctttcccttttccttacttggatacttttatgaccgttttcctgcctgacccccctgtctgtcctctgttgtcgccatcgtttttgccatgtccattcctgggggcgacagcctcttctgcgatatcaccctcaatgtcgtcagcaatgagtccaactctggacccacccccttcagtcaccagccaaaggagagaggaggaaaagtgggaggcacaaagcgaggggcacccgttcattacttcgagaagcagctcacccttgcagttaaacttacttcaggaagagatgcccagaccctctgaatctccagatcagatgagaaggaacacgtgcccacaaactgagtatcagtgtgttacaggcaacaatggcagtgagagcagtcctgctactaccggtgcactgtccacggggtcacctcccagggagaatccatcccatcctactgccagcgctctgtccacaggatcgcctcccatgaagaatccatcccatcctactgccagcgctctgtccacaggatcgcctcccatgaagaatccatcccatcctactgccagcacactgtccatgggattgcctcccagcaggactccatcccatcctactgccactgttctgtccacggggtcacctcccagcgaatccccatccagaactggttcagcagcatcaggaagcagcgacagcagtatataccttactagtagtgtttattcttctaaaatctcccaaaatgggcagcaatctcaggacgtacagaaaaaagaaacatttcctaatgtcgccgaagagcccatctggagaatgatacggcagacacctgagcgcattctcatgacataccaggtacctgagagggttaaagaagttgtactaaaagaagacctggaaaagctagaaagtatgaggcagcagcagccccagttttctcatgggcaaaaggaggagctggctaaggtgtataattggattcaaagccagactgtcactcaagaaatcgacattcaagcctgtgtcacttgtgaaaatgaagattcagctgatggtgcggccacatcctgtggtcaggttctggtagaagacagctgttgagtgactgtgaggatgaaccttcataccctttccaagacgtgttacacagacagacctttttaagtcctggacttttaaatgaccatgaagttatcattgaatgttaagattttttcttcttgattttttaatacacgtaatctttttgaagcagacattgtatacagaatcttacttctctttgttcctgatatattaaaatggccagttaggctctttttgtagttgaattgtcttctaaagagattggatggcctctaaagaggtatgtgtatctttatttcagatgtcacccagagtaaattataattagaagtatagctagaatgagccccaaaccttagcctcatttattttgttctgttacataagtcattttccccttagagtgcttgaagaaatgccacctacaggttgtgtacttttcataatggtttccatgaatgtagtacgttcatacaggcttcattcaacctggcgttcccctccataattaagatgaaacattccggttttctcacaacacattagcacatactgtccattagcatatctgggataaccaggttttgggggttgagttttggccttcatccttgtagatccctttcctattgatttcccaccttccagtgaaattctgaaagtcttatcttaaaaatcgatccgcttaccatgggcctattcttgtaagtttcagttagcatttgcatgtgtaatattaaaatgaaagagcttcttacccagtgctgttgcccttttgagtatttttgtttttaaaataatgattgtaaaatgttttacaagtaatgtaaaagctagtatcattcttacatacttctgtgtttaaattttcattcttaccaaaacagttaactctttctttccaatcaatttatacaaaagaggtcgctccagccctaccacaggtctgactggcactgccttttgtttgcccttgaacagggcagtgttgtggggactgcaaaagagaaaacgtccaggcgagcccagttgtcctcgcccacagggtcctgcaggctccatcagtcaccgctttctatggcgtttgtagttgtgtcttttaagaagtgagtgtgattgtttacttgataaatcagctcactctctggtgctttttagagaagtccctgattccttcttaaacttggaatgatagatgaaattcacacccctgcagatcagaaaaaacaaatagaagaaaatgagggttacagtaacctgttgtctttatataacttgcaacaaactaatttatttttttttcctttttttgtttttggttttttatggttttttaaggaaaatacttttctcctttgaagttttacagctttttgtaaatgcgtcctgataatgattaggaaaatcgaccttttcatccatgatgaccatcctcatagctcagatctcctttcaaagtagtggctttctggatggtaattccatcttaaggtgtcagaactattttcaaatgctgcctttgacagttcttggaattttctgatattaagcagttccatgcaaatattcgtgttttataaatagctctcatagtctgctccatcttgatagttaagtgatttctgaagcgtttgtgtgtgtgttgatcaggttgtgtgatatttttgcttgatagagaatcaaatttgaaacaattaaccagccagtagattgtctgtcagtgaccttctgtagtaataaagtttttgccactgtaaataaaaacagtatccgtagctatcaggatcattgcgcactcatatatgctaagccttctgttctctaatagaagcctttcttttccattgtttctggatatttgtattatccaaatgtgcttatttctttgccttagcacacgttttatggagtacttgttatactaggtttgatttgaaactggtgcttgtcgcagaactgtcagagcatgaggagcgctcctcctgtgggtggacgcattcacgcactcccaggttgcacctgctgctggcggtgagcagggggttcagcagcttgaccgatgccccccgagggggctctccccagcttaaactttgttgtttaaatttgttaactttttatattaatgactattgaaagtggtaataaaaatttatattataggcttcaatgttttcatgaatgttacccaaaaagctgtgttttctttggtcagaggtcaaaatttatgaaaaacaaaatgctgtatgaatggaaatcattttgcaattgagtgacacttcattgtaattcacagtgtaaatttaatccaaactgaaattttgtttcaactgaatttgtaattaactctgaatttgtttttaatcattagtaatatttcagttgggtatctttttaagtaaaaacaacaaataaactctgtacatgtaaaacgtga

SEQ ID NO: 108378 - DNA, 3633 bp, Artificial Sequence
  derived and/or modified sequence
atgcccagaggagaggcccctggccctggaagaagaggagccaaggatgaggccctgggggaggagagcggggagcgctggagccctgagttccacctgcagaggaagctggccgacagcagccacagcgagcagcaggacaggaacagagtgtctgaggagctgatcatggtggtgcaggagatgaagaagtacttccccagcgagaggaggaacaagcccagcaccctggatgccctgaactatgccctgcgctgtgtgcacagcgtgcaggccaacagcgagttcttccagatcctgagccagaatggagccccccaggctgatgtgtccatgtacagcctggaggagctggccaccatcgccagcgagcacaccagcaagaacacagacacctttgtggccgtgttctccttcctgagcggccgcctggtgcacatcagcgagcaggccgccctgatcctgaacaggaagaaggatgtgctggccagcagccactttgtggacctgctggccccccaggacatgagggtcttctacgcccacacagcccgggcccagctgcccttctggaacaactggacccagagagctgctgcccgctatgaatgtgcccctgtgaagcccttcttctgccgcatccggggcggggaggacaggaagcaggagaagtgccacagccccttccgcatcatcccctacctgattcatgtgcaccacccagcccagcctgagctggagagcgagccctgctgcctgactgtggtggagaagatccacagcggctatgaggccccccgcatccctgtgaacaagaggatcttcaccaccacccacaccccaggctgtgtgttcctggaggtggatgagaaggctgtgcccctgctgggctacctgccccaggacctgattggcaccagcatcctgagctacctgcacccagaagatagaagcctgatggtggccatccaccagaaggtgctgaagtatgccggccaccccccatttgagcacagccccatccgcttctgcacccagaatggagactacatcatcctggacagctcctggagcagctttgtgaacccctggagcaggaagatctccttcatcatcggccgccacaaggtgaggaccagccccctgaatgaagatgtgtttgccaccaagatcaagaagatgaatgacaatgacaaggacatcacagagctgcaggagcagatctacaagctgctgctgcagcctgtgcacgtgtctgtgagcagcggctacggcagcctgggcagcagcggcagccaggagcagctggtgtccatcgccagcagcagcgaggccagcggccaccgggtggaggagaccaaggccgagcagatgaccctgcagcaggtgtatgcctctgtgaacaagatcaagaacctgggccagcagctgtacattgaatccatgaccaagagcagcttcaagcctgtgacaggcaccaggacagagcccaacggcggcggggagagcgccaatggaggaggagagtgcaagaccttcaccagcttccaccagaccctgaagaacaacagcgtgtacacagagccctgtgaggacctgagaaatgatgagcacagccccagctaccagcagatcaactgcatcgacagcgtcatccgctacctgaagagctacaacatcccagccctgaagaggaagtgcatcagctgcaccaacaccaccagcagcagcagcgaggaggacaagcagaaccacaaggcagatgatgtgcaggccctgcaggccggcctgcagatcccagccatccccaagtctgagatgcccaccaacggccgcagcattgacaccggcggcggggccccccagatcctgagcacagccatgctgagcctgggcagcggcatcagccagtgtggctacagcagcaccatcgtgcacgtgcccccacctgagacagccagagatgccaccctcttctgtgagccctggaccctgaacatgcagcctgcccccctgaccagcgaggagttcaagcacgtgggcctgacagctgctgtgctgagcgcccacacccagaaggaggagcagaactacgtggacaagttccgggagaagatcctgagcagcccctacagcagctacctgcagcaggagagccgcagcaaggccaagtacagctacttccagggcgacagcaccagcaagcagaccaggtctgctggctgcaggaagggcaagcacaagaggaagaagctgcctgagcccccagacagcagcagcagcaacacaggcagcggcccccggcggggggcccaccagaatgcccagccctgctgccccagcgctgccagcagcccccacaccagcagccccaccttccccccagctgccatggtgcccagccaggccccctacctggtgcctgccttccccctgcctgctgccaccagccctggccgggagtatgctgcccctggaacagcccctgagggcctgcacggcctgcccctgtctgagggcctgcagccctacccagccttccccttcccctacctggacaccttcatgacagtgttcctgcctgacccccctgtgtgccccctgctgagccccagcttcctgccctgccccttcctgggcgccacagccagcagcgccatcagccccagcatgagcagcgccatgagccccaccctggaccccccacccagcgtgaccagccagaggcgggaggaggagaagtgggaggcccagagcgagggccaccccttcatcaccagccgcagcagcagccccctgcagctgaacctgctgcaggaggagatgccccggcccagcgagagcccagaccagatgagaagaaacacctgcccccagacagagtaccagtgtgtgacaggcaacaatggaagtgagagcagccctgccaccaccggggccctgagcacaggcagccccccccgggagaaccccagccaccccacagccagcgccctgagcacaggcagcccccccatgaagaaccccagccaccccacagccagcgccctgagcacaggcagcccccccatgaagaaccccagccaccccacagccagcaccctgtccatgggcctgccccccagcaggacccccagccaccccacagccaccgtgctgagcacaggcagcccccccagcgagagccccagcaggacaggcagcgctgccagcggcagcagtgacagcagcatctacctgaccagctctgtgtacagcagcaagatcagccagaatggccagcagagccaggatgtgcagaagaaggagaccttccccaacgtggccgaggagcccatctggaggatgatccggcagaccccagagcgcatcctgatgacctaccaggtgcctgagcgggtgaaggaggtggtgctgaaggaggacctggagaagctggagagcatgaggcagcagcagccccagttcagccacggccagaaggaggagctggccaaggtgtacaactggatccagagccagacagtgacccaggagattgacatccaggcctgtgtgacctgtgaaaatgaagattctgcagatggagctgccaccagctgtggccaggtgctggtggaggacagctgctag

SEQ ID NO: 108379 - DNA, 3633 bp, Artificial Sequence
  derived and/or modified sequence
atgccccggggcgaggcccccggccccggccggcggggcgccaaggatgaagccctgggcgaggagtctggggagcggtggagccccgagtttcatttgcaacggaagctggctgattcttcccattcagagcagcaggatagaaatagggtctctgaggagctgatcatggtcgtgcaagagatgaaaaagtacttcccctccgaacggcggaataaaccgagcaccttggatgcacttaactatgctctccgctgcgttcatagtgttcaggctaattccgagttcttccaaatactgagccagaatggggccccacaagctgatgtgtcgatgtactctctcgaggagctggcaactattgcctcggaacatactagcaagaatacagatacatttgtggcagtgttcagtttcttaagtggaagactggttcatatctcggaacaggccgctctgattcttaaccggaagaaggacgtgctagcctcatcccactttgttgacctgctcgcgccccaggatatgagggttttctatgctcatacagctagggcccaacttccattttggaacaactggacccagagggcagcagcaaggtacgagtgtgcgccagtgaagccttttttttgccggatccgcgggggggaagatcggaaacaggaaaaatgccatagcccattcagaatcattccctatctcatccatgtgcaccaccctgcccagccggagctggagagcgagccatgttgtctgactgtcgtcgagaagattcatagtggatatgaggctcctcgtattcctgtaaacaaacggattttcaccaccacccacacccccgggtgtgtgtttttggaggtggacgagaaggctgtgcccctgctgggctatttgccccaagaccttatcggaacaagtatccttagctaccttcatccagaagacagatccctgatggtggccatccaccagaaagtattgaagtacgccgggcacccacctttcgaacactccccaatccgtttttgtactcagaatggggactacattatcctagatagctcttggtcatcttttgtaaatccctggtcgcggaagatatccttcatcataggtaggcataaggtgcgcacttcccctctcaatgaggacgttttcgccacaaagatcaaaaagatgaatgataacgataaggatatcacggagcttcaggagcagatttacaaactgctgcttcagcctgtgcatgtgagcgtctcctctggctacggctcactgggttcctctggaagtcaggagcagctcgtgtccatcgcgtcttcgagtgaggcctcaggccatcgagtagaggagactaaggcggaacagatgacactccaacaagtgtatgcatccgtaaacaaaataaagaacctcgggcagcagctttacatcgaaagcatgacaaagtcctctttcaaaccagtgacaggaaccagaacagaacccaatggaggcggcgagtctgccaatggcgggggcgagtgcaagaccttcacttcattccatcaaacactcaagaataactccgtatatacagaaccctgcgaggacttacgaaacgacgagcactctcccagttatcagcagataaactgcattgattctgttatcagatacctgaaatcttacaacattcctgctctgaaacgtaaatgtatcagctgtaccaataccactagctcgagcagcgaggaggacaagcaaaaccacaaggccgacgatgttcaggccctccaagctggtctgcagatcccagccattcctaagagcgaaatgcctaccaacggacgctccattgatactggcggcggggctccacagattttgagcactgccatgctctccctgggaagcgggatcagtcagtgcggatattcctctactatagtgcatgttccgccacctgaaacagcccgcgatgccactctcttctgcgagccatggacattaaatatgcagcccgcccccttaaccagtgaggaatttaaacacgtcgggctcacggccgcagtgctgagtgcacatacccagaaggaggagcagaattatgtggataaattcagagaaaagatcctgagctctccctattcctcctaccttcagcaggaaagccggagcaaagctaagtatagttacttccagggcgactccacttccaagcaaactagatccgctggatgcaggaaagggaagcacaaacgtaagaagcttcccgaaccccctgattcctcatcctcaaacaccgggtctggcccacggaggggcgcacaccagaatgctcagccttgttgtccttctgcagccagctctccccacacttcaagtcccaccttcccaccagctgcaatggttcccagccaggcaccatacctggtgccggcctttcctctccctgctgcgacttcccctggacgggagtacgccgcccccgggacagcgcccgagggcctccacgggctcccgctgtccgaggggctccaaccgtaccctgcgtttccttttccctacttagacacattcatgacagtgttcctgccagatccccctgtttgtccactcttgagcccttcttttctcccttgcccttttctgggagcaactgccagctcagccatctcccccagtatgagctcagcaatgtcaccaactttggatccacctcctagtgtaaccagccagagacgcgaagaggaaaaatgggaagcccagtcagaagggcatccattcatcaccagccgttcctctagccctctgcagctgaaccttctgcaggaggagatgccccgcccatctgagtctcccgatcagatgaggaggaatacctgcccccagacagagtaccagtgcgtcactgggaacaacgggtcggaaagctcccccgccactaccggcgccctgtctacgggttccccaccaagggagaacccatcccatcctacagcttcagccctgtccaccggttccccacctatgaaaaaccccagccatccaacagccagtgcattatccaccgggagtccccctatgaagaacccatcccatcccactgcgtctacactgtctatgggccttcccccatccaggacaccaagccaccctactgctacagtcctctctactggtagcccaccatcagaaagcccgagtagaaccggctccgctgcatcaggatcatcagattccagtatttacttaacgtccagtgtatacagcagcaagatttctcagaatggtcaacagagccaggacgtccagaagaaagaaaccttcccgaatgtggccgaggagcctatctggcgaatgatccgacagacgccagaacgcatactgatgacataccaggtgccggagagagtgaaggaggtggtgctgaaagaggacttggaaaagttggagtccatgcgccagcagcagcctcagttctcccacggtcaaaaggaagagcttgcaaaagtgtacaattggatccagtcgcaaaccgtgacccaggagattgatattcaggcatgtgtgacatgcgagaatgaggattctgccgatggtgcagccacgtcatgcgggcaggtcttggtggaagatagctgttag

SEQ ID NO: 108380 - DNA, 3633 bp, Artificial Sequence
  derived and/or modified sequence
atgcctagaggagaggcccctggtccaggacgtcgcggagcaaaggacgaggctctaggtgaggagagcggcgaaaggtggtctccggaatttcatctgcaacgaaagcttgctgattcatctcatagtgagcaacaggatcgaaaccgggtgtccgaagagctaatcatggtcgtacaggagatgaagaaatattttccatccgagcggaggaacaaaccttccacccttgacgctctgaactacgcgctgcgctgtgtccacagtgtacaagcaaacagcgagttctttcagattttaagccagaatggcgcacctcaagcagatgtgtcgatgtactcgcttgaagagctagcaactatagcatcggaacacacctccaagaacacggatacatttgtggccgttttctctttcctttcaggaagactagtgcatattagcgaacaagccgcactaatcctgaaccgcaaaaaggatgtgctcgcgagcagtcatttcgtagacttacttgccccacaggatatgagagtcttttacgcacacaccgcgagagctcaactgccattttggaacaattggacccagagggccgcagccaggtatgaatgtgcccctgttaagccctttttttgcaggatccgcggaggcgaggaccgtaagcaggagaaatgccactctccattcaggattattccctacttgatccatgtgcatcatcctgctcaacctgagctcgagtctgagccctgttgcctaaccgtggtggagaaaattcactccggctacgaggcccctagaattcccgtaaataaaaggatcttcacaacaacccacacaccgggatgcgtttttctagaggtggacgagaaggcagtgccactcctaggatacctcccacaagaccttattggaacctccattctcagttatctacaccccgaagacaggtcactgatggttgcaatccatcagaaggtactgaagtacgcagggcatcctccatttgagcactctccaattagattctgtactcaaaatggtgattatattatcctcgattcaagctggtcttcctttgtaaacccttggtcccggaagatctcctttattattggtcgccacaaggtacgcacaagccctttgaacgaagatgtgtttgccactaagattaagaagatgaacgataatgacaaagatataacagagctccaggagcagatttacaagcttctgctgcagccagtgcacgtgagtgttagcagtggatatggctccttgggttcttccggttcccaggaacaactcgtctctatagcctcaagtagcgaagcctccggtcaccgcgtggaggagactaaagccgagcagatgactctccagcaggtttatgcctcagtgaacaagatcaagaacctgggccagcaactgtacattgagagcatgacaaagtctagttttaaacccgtgactggaactcgcaccgagccaaacggaggtggtgagtccgccaatggaggaggcgagtgcaagacctttacttccttccaccagactctgaagaataactctgtttacaccgagccatgcgaggaccttcgcaatgatgagcactccccttcttaccagcaaatcaactgtatcgattcagtgatccgttacctcaagagctataatattccagctctgaaaagaaaatgtatttcctgtacaaataccacttcaagtagctccgaggaagacaagcagaaccataaagccgatgacgtgcaggcgcttcaggctggcctgcagatcccagccattcccaaatccgagatgccgacaaatgggaggtccattgatacagggggaggggcaccacagatactaagcactgctatgctgtcgctcggttcaggcatatctcagtgcggctacagctctactattgtgcatgtgcccccaccagaaacagccagggatgctacactgttctgtgaaccctggaccctgaatatgcagcctgcacctctaacgagcgaagaattcaaacatgtgggcctgaccgccgcagttctctctgcacatacgcagaaggaagaacagaactacgtcgacaagttccgggaaaagatcctgagctctccatattcttcctatttacagcaggaatcacgctccaaggccaagtactcttattttcagggtgattctacatcgaaacagacaagatccgctggctgtagaaagggtaaacacaaacgaaagaagctacctgagccacccgattctagctcctccaacaccgggagtgggccacgcagaggggctcatcagaatgcccagccttgctgcccttctgctgccagcagtccccacacctcaagtccaacatttcctcccgctgccatggtaccttcccaggccccttatctcgtgcccgctttccccttgccagcagccacaagtcctgggagggaatacgcagcccctggaaccgcccctgagggcctgcacgggctgccactgtccgagggtctccaaccctacccagctttccctttcccttacctggacacatttatgaccgtcttcctgcctgatccccctgtctgtcccctcctatcaccatcattccttccctgcccgtttcttggggctaccgcaagctctgccattagtccatcaatgagcagtgctatgtcgccaacgctggatcccccaccttccgtgacaagtcagaggcgagaagaggaaaagtgggaggctcagagtgaagggcacccctttatcactagcaggagttctagtcccctccagttgaacctgttgcaagaagaaatgcccaggcccagtgagtcccctgatcagatgcgaaggaatacttgtcctcagactgaataccaatgcgtgacggggaacaacggctctgagtcgtccccggctaccactggcgctctctccacagggtcaccaccaagagagaatccttcacaccctacagccagcgctctctccactggtagtccaccaatgaagaatccaagccatcctaccgccagcgctctgagcactgggtcaccacccatgaagaatcccagtcatccgaccgcctctactttgagcatgggcttgccaccgtccaggacacccagccatccaacagcgactgttttgagtacaggctcacctcccagtgagtcaccctctcggaccggatccgccgctagtgggagtagtgattctagtatctatctcaccagtagcgtgtattccagtaagatttcccagaatggccagcaatctcaagatgttcagaagaaagagaccttccccaacgtcgctgaggagccaatttggagaatgatccggcagactcctgaacggatactgatgacataccaggtacctgagagggtgaaagaggtggtgctgaaagaggatctcgaaaagctggaatctatgcggcagcagcaaccccagttttcccacggccagaaagaggagctcgccaaagtgtacaactggattcaatcccagacagtgacgcaggagatcgatatacaggcctgtgtgacctgtgagaatgaagactcagcagacggtgctgcaacctcgtgcggccaggtcctggtggaagactcatgctag

SEQ ID NO: 108381 - DNA, 1185 bp, Artificial Sequence
  derived and/or modified sequence
atggtgcccagccaggccccctacctggtgcccgccttccccctgcccgccgccaccagccccggcagagagtacgccgcccccggcaccgcccccgagggcctgcacggcctgcccctgagcgagggcctgcagccctaccccgccttccccttcccctacctggacaccttcatgaccgtgttcctgcccgacccccccgtgtgccccctgctgagccccagcttcctgccctgccccttcctgggcgccaccgccagcagcgccatcagccccagcatgagcagcgccatgagccccaccctggaccccccccccagcgtgaccagccagagaagagaggaggagaagtgggaggcccagagcgagggccaccccttcatcaccagcagaagcagcagccccctgcagctgaacctgctgcaggaggagatgcccagacccagcgagagccccgaccagatgagaagaaacacctgcccccagaccgagtactgcgtgaccggcaacaacggcagcgagagcagccccgccaccaccggcgccctgagcaccggcagcccccccagagagaaccccagccaccccaccgccagcgccctgagcaccggcagcccccccatgaagaaccccagccaccccaccgccagcaccctgagcatgggcctgccccccagcagaacccccagccaccccaccgccaccgtgctgagcaccggcagcccccccagcgagagccccagcagaaccggcagcgccgccagcggcagcagcgacagcagcatctacctgaccagcagcgtgtacagcagcaagatcagccagaacggccagcagagccaggacgtgcagaagaaggagaccttccccaacgtggccgaggagcccatctggagaatgatcagacagacccccgagagaatcctgatgacctaccaggtgcccgagagagtgaaggaggtggtgctgaaggaggacctggagaagctggagagcatgagacagcagcagccccagttcagccacggccagaaggaggagctggccaaggtgtacaactggatccagagccagaccgtgacccaggagatcgacatccaggcctgcgtgacctgcgagaacgaggacagcgccgacggcgccgccaccagctgcggccaggtgctggtggaggacagctgctag

SEQ ID NO: 108382 - DNA, 1185 bp, Artificial Sequence
  derived and/or modified sequence
atggtcccatcccaagctccatacctagtgcctgcattcccactgcccgccgctacaagccccggccgtgagtatgcagctccaggaacagctcccgaaggattgcatggtttgccgttgagcgaaggtctgcaaccgtacccagcttttccattcccttacctggatacatttatgactgtgtttctgccagacccaccggtctgccctttgctatcacccagcttcctgccttgcccttttctcggcgcaaccgcatcctccgctatctccccttcaatgtcttccgctatgtctcctaccctggatccgcctccctctgtgacatcccagagaagagaggaggagaagtgggaagcccaaagtgagggccacccgttcatcaccagtagatcgtcttccccactccagctgaacttactgcaggaggaaatgccccgcccaagcgaatcaccagaccaaatgcgaaggaatacctgtcctcagacggagtactgcgtgacaggtaacaacgggtccgaatcaagcccagctacaacaggcgcattgtcaaccgggagcccgcctcgtgaaaatccgagccatccaaccgcatccgccctgagtacaggctctccccccatgaagaatccctcccaccctaccgccagcacgctaagtatggggctacccccgtcgagaacaccatcgcaccctactgcgacggtcctgtctacaggcagtcctccaagcgaatcaccaagtcgaactggctcggcggcctctggaagcagcgatagctcaatatacttgacgagttcagtgtattcctctaagatatcacaaaacggtcagcagtctcaagacgtgcagaaaaaagagacctttccaaacgtggctgaagagccgatctggcgaatgatcaggcaaacccccgagcgtatcttaatgacctatcaggttcccgagagggtaaaagaggtggtgctgaaggaagacctggaaaagctagagagtatgaggcagcaacagccacagttctcccacgggcaaaaggaggaactggccaaggtctacaattggatccagtctcagaccgtgacacaggagattgacatccaagcctgcgtaacatgtgagaacgaggactcagccgacggagcagctacctcatgtggacaggttctcgttgaggacagctgctag

SEQ ID NO: 108383 - DNA, 1185 bp, Artificial Sequence
  derived and/or modified sequence
atggtgcccagccaggccccctacctggtgcctgccttccccctgcctgctgccaccagccctggccgggagtatgctgcccctggaacagcccctgagggcctgcacggcctgcccctgtctgagggcctgcagccctacccagccttccccttcccctacctggacaccttcatgaccgtcttcctgcctgacccccctgtgtgccccctgctgagccccagcttcctgccctgccccttcctgggcgccacagccagcagcgccatcagccccagcatgagcagcgccatgagccccaccctggaccccccaccttctgtgaccagccagaggcgggaggaggagaagtgggaggcccagagcgagggccaccccttcatcaccagccgcagcagcagccccctgcagctgaacctgctgcaggaggagatgccccggcccagcgagagcccagaccagatgagaagaaacacctgcccccagacagagtactgtgtgacaggcaacaatggaagtgagagcagccctgccaccaccggggccctgagcacaggcagccccccccgggagaaccccagccaccccacagccagcgccctgagcacaggcagcccccccatgaagaaccccagccaccccacagccagcaccctgtccatgggcctgccccccagcaggacccccagccaccccacagccaccgtgctgagcacaggcagcccccccagcgagagccccagcaggacaggcagcgctgccagcggcagcagtgacagcagcatctacctgaccagctctgtgtacagcagcaagatcagccagaatggccagcagagccaggatgtgcagaagaaggagaccttccccaacgtggccgaggagcccatctggaggatgatccggcagaccccagagcgcatcctgatgacctaccaggtgcctgagcgggtgaaggaggtggtgctgaaggaggacctggagaagctggagagcatgaggcagcagcagccccagttcagccacggccagaaggaggagctggccaaggtgtacaactggatccagagccagacagtgacccaggagattgacatccaggcctgtgtgacctgtgaaaatgaagattctgcagatggagctgccaccagctgtggccaggtgctggtggaggacagctgctag

SEQ ID NO: 108384 - DNA, 1185 bp, Artificial Sequence
  derived and/or modified sequence
atggtgcccagccaggccccctacctggtgcccgccttccccctgcctgccgctactagcccggggcgggaatacgcggcgcccggcactgcgcctgaggggctgcatgggctcccattgtccgaggggctccaaccctatccagccttcccgtttccatatttggacacattcatgaccgttttccttccggaccctcccgtctgtcctcttctgagcccttcctttttaccatgtccgtttctgggggccaccgctagttccgctattagccctagcatgtcatcggcaatgagccctacactggatccccctccatctgtaacctctcaacgcagggaagaagaaaagtgggaggcgcaatccgagggccatcccttcatcactagtaggagctccagccccttgcagcttaatctcctacaggaggagatgccccggccatcggagagcccggatcagatgaggaggaatacttgccctcaaaccgaatactgtgtcaccggaaacaatggctccgaatcatcccctgcaactacaggcgccctctccaccggcagccctcccagagaaaaccccagtcatcctaccgcaagcgctctaagcacaggctctccccctatgaagaatccctcccatcctacagcaagcaccctcagtatgggcctcccaccctcccggacgcccagtcatcccacagccacagtactgtccacgggtagccctccttccgagagccccagccgcactggtagcgccgctagcggttcatcggattctagcatttatttaacctcgtcagtgtactcaagcaagatttcccaaaatggccagcagtctcaggacgtccagaagaaggagacattccccaacgtggcagaggagccaatctggcgtatgataaggcagacccccgaaagaatcttgatgacatatcaagtccctgagcgtgttaaggaagttgtgctgaaagaggatcttgaaaaactggagtcaatgaggcagcagcagccccaattctcccatggccagaaggaggagctcgccaaggtctataactggatccagagtcagacagtgacccaggaaatcgatattcaggcatgtgtgacctgtgagaacgaagattctgccgatggagcggccacctcatgtggacaggtgctggtggaggactcatgctag

SEQ ID NO: 108385 - DNA, 1185 bp, Artificial Sequence
  derived and/or modified sequence
atggtgccaagccaggcaccttatctcgttcccgctttccccctcccggctgcaactagccccggaagggaatacgctgcacctgggacggctcccgaggggctgcacgggctgcccctcagtgaggggttgcaaccctatcctgcctttccattcccatatctcgacacatttatgacagtgttccttcctgacccgccagtgtgtcccctcctaagcccctctttcctaccttgccccttcttaggagccacggctagttcagccatctcacctagtatgagttccgcaatgagtcctacacttgacccgccacctagtgtgacgtcccagcgaagggaagaggagaagtgggaggcccagagcgaaggccatccttttatcacaagtagatcctcttcacccttacagctcaacctgctgcaggaagagatgcctcggccaagcgaatcacctgatcagatgagacgcaacacctgccctcagaccgagtactgcgtcaccggtaacaacgggtcagaatcttctcctgcaaccaccggcgcactctctaccggctctccaccacgcgagaatccttctcaccccacggccagtgccctgtccaccggatccccgcctatgaagaaccctagccaccctactgcttcgactctttcaatggggctgccaccatcaaggacacccagtcatcctaccgccaccgtcttgagtacagggagtccaccatctgagtctccttcccggactggctctgcagccagcggctcctctgatagctccatatatttgacatcaagcgtttacagtagcaaaatctctcaaaacggacaacagtctcaggatgtgcagaagaaagagacgttccccaacgttgcggaggagcctatctggcggatgatccgccagaccccagagcgcattctgatgacctatcaggttccagaacgggttaaagaagtggtcttaaaggaggacttggaaaagcttgaatctatgcgtcaacagcagccccagttctcacacggccaaaaagaggaactcgcgaaagtgtataactggattcagtcccagacggtgacgcaagaaattgacatacaggcctgcgtgacctgtgaaaacgaggactccgccgacggggctgccacatcttgcggtcaagtgctggtggaagactcctgctag

SEQ ID NO: 108386 - DNA, 6149 bp, Artificial Sequence
  derived and/or modified sequence
ggaaaagctcctcggagatgagcgtgaccccctggctcgtggtggccgcctgttctcactaacgccatggcggggaccggagtgagaaaccggtgtctgtcactgactgcaaagtgagcgagaagcaggctgcgggccgtcccagcacgacgtggagccccgcggagacctcgagatgccccgcggggaagctcctggccccgggagacggggggctaaggacgaggccctgggcgaagaatcgggggagcggtggagccccgagttccatctgcagaggaaattggcggacagcagccacagtgaacagcaagatcgaaacagagtttctgaagaacttatcatggttgtccaagaaatgaaaaaatacttcccctcggagagacgcaataaaccaagcactctagatgccctcaactatgctctccgctgtgtccacagcgttcaagcaaacagtgagtttttccagattctcagtcagaatggagcacctcaggcagatgtgagcatgtacagtcttgaggagctggccactatcgcttcagaacacacttccaaaaacacagatacctttgtggcagtattttcatttctgtctggaaggttagtgcacatttctgaacaggctgctttgatcctgaatcgtaagaaagatgtcctggcgtcttctcactttgttgacctgcttgcacctcaagacatgagggtattctacgcgcacactgccagagctcagcttcctttctggaacaactggacccaaagagctgcacggtatgaatgtgctccggtgaaaccttttttctgcaggatccgtggaggtgaagacagaaagcaagagaagtgtcactccccattccggatcatcccctatctgattcatgtacatcaccctgcccagccagaattggaatcggaaccttgctgtctcactgtggttgaaaagattcactctggttatgaagctcctcggatcccagtgaataaaagaatcttcaccaccacacacaccccagggtgtgtttttcttgaagtagatgaaaaagcagtgcctttgctgggttacctacctcaggacctgattggaacatcgatcctaagctacctgcaccctgaagatcgttctctgatggttgccatacaccaaaaagttttgaagtatgcagggcatcctccctttgaacattctcccattcgattttgtactcaaaacggagactacatcatactggattccagttggtccagctttgtgaatccctggagccggaagatttctttcatcattggtcggcataaagttcgaacgagcccactaaatgaggatgtttttgctaccaaaattaaaaagatgaacgataatgacaaagacataacagaattacaagaacaaatttacaaacttctcttacagccagttcacgtgagcgtgtccagcggctacgggagcctggggagcagcgggtcgcaggagcagcttgtcagcatcgcctcctccagtgaggccagtgggcaccgtgtggaggagacgaaggcggagcagatgaccttgcagcaggtctatgccagtgtgaacaaaattaaaaatctgggtcagcagctctacattgagtcaatgaccaaatcatcattcaagccagtgacggggacacgcacagaaccgaatggtggtggtgaatgtaagacctttacttccttccaccaaacactgaaaaacaatagtgtgtacactgagccctgtgaggatttgaggaacgatgagcacagcccatcctatcaacagatcaactgtatcgacagtgtcatcagatacctgaagagctacaacattccagctttgaaaagaaagtgtatctcctgtacaaatacaacttcttcctcctcagaagaagacaaacagaaccacaaggcagatgatgtccaagccttacaagctggtttgcaaatcccagccatacctaaatcagaaatgccaacaaatggacggtccatagacacaggaggaggagctccacagatcctgtccacggcgatgctgagcttggggtcgggcataagccaatgcggttacagcagcaccattgtccatgtcccacccccagagacagccagggatgctaccctcttctgtgagccctggaccctgaacatgcagccagcccctttgacctcggaagaatttaaacacgtggggctcacagcggctgttctgtcagcgcacacccagaaggaagagcagaattatgttgataaattccgagaaaagatcctgtcatcaccctacagctcctatcttcagcaagaaagcaggagcaaagctaaatattcatattttcaaggagattctacttccaagcagacgcggtcggccggctgcaggaaagggaagcacaagcggaagaagctgccggagccgccagacagcagcagctcgaacaccggctctggtccccgcaggggagcgcatcagaacgcacagccctgctgcccctccgcggcctcctctccgcacacctcgagcccgaccttcccacctgccgccatggtgcccagccaggccccttacctcgtcccagcttttcccctcccagccgcgacctcacccggaagagaatacgcagcccccggaactgcaccggaaggcctgcatgggctgcccttgtccgagggcttgcagccttacccagctttcccttttccttacttggatacttttatgaccgttttcctgcctgacccccctgtctgtcctctgttgtcgccatcgtttttgccatgtccattcctgggggcgacagcctcttctgcgatatcaccctcaatgtcgtcagcaatgagtccaactctggacccacccccttcagtcaccagccaaaggagagaggaggaaaagtgggaggcacaaagcgaggggcacccgttcattacttcgagaagcagctcacccttgcagttaaacttacttcaggaagagatgcccagaccctctgaatctccagatcagatgagaaggaacacgtgcccacaaactgagtattgtgttacaggcaacaatggcagtgagagcagtcctgctactaccggtgcactgtccacggggtcacctcccagggagaatccatcccatcctactgccagcgctctgtccacaggatcgcctcccatgaagaatccatcccatcctactgccagcacactgtccatgggattgcctcccagcaggactccatcccatcctactgccactgttctgtccacggggtcacctcccagcgaatccccatccagaactggttcagcagcatcaggaagcagcgacagcagtatataccttactagtagtgtttattcttctaaaatctcccaaaatgggcagcaatctcaggacgtacagaaaaaagaaacatttcctaatgtcgccgaagagcccatctggagaatgatacggcagacacctgagcgcattctcatgacataccaggtacctgagagggttaaagaagttgtactaaaagaagacctggaaaagctagaaagtatgaggcagcagcagccccagttttctcatgggcaaaaggaggagctggctaaggtgtataattggattcaaagccagactgtcactcaagaaatcgacattcaagcctgtgtcacttgtgaaaatgaagattcagctgatggtgcggccacatcctgtggtcaggttctggtagaagacagctgttgagtgactgtgaggatgaaccttcataccctttccaagacgtgttacacagacagacctttttaagtcctggacttttaaatgaccatgaagttatcattgaatgttaagattttttcttcttgattttttaatacacgtaatctttttgaagcagacattgtatacagaatcttacttctctttgttcctgatatattaaaatggccagttaggctctttttgtagttgaattgtcttctaaagagattggatggcctctaaagaggtatgtgtatctttatttcagatgtcacccagagtaaattataattagaagtatagctagaatgagccccaaaccttagcctcatttattttgttctgttacataagtcattttccccttagagtgcttgaagaaatgccacctacaggttgtgtacttttcataatggtttccatgaatgtagtacgttcatacaggcttcattcaacctggcgttcccctccataattaagatgaaacattccggttttctcacaacacattagcacatactgtccattagcatatctgggataaccaggttttgggggttgagttttggccttcatccttgtagatccctttcctattgatttcccaccttccagtgaaattctgaaagtcttatcttaaaaatcgatccgcttaccatgggcctattcttgtaagtttcagttagcatttgcatgtgtaatattaaaatgaaagagcttcttacccagtgctgttgcccttttgagtatttttgtttttaaaataatgattgtaaaatgttttacaagtaatgtaaaagctagtatcattcttacatacttctgtgtttaaattttcattcttaccaaaacagttaactctttctttccaatcaatttatacaaaagaggtcgctccagccctaccacaggtctgactggcactgccttttgtttgcccttgaacagggcagtgttgtggggactgcaaaagagaaaacgtccaggcgagcccagttgtcctcgcccacagggtcctgcaggctccatcagtcaccgctttctatggcgtttgtagttgtgtcttttaagaagtgagtgtgattgtttacttgataaatcagctcactctctggtgctttttagagaagtccctgattccttcttaaacttggaatgatagatgaaattcacacccctgcagatcagaaaaaacaaatagaagaaaatgagggttacagtaacctgttgtctttatataacttgcaacaaactaatttatttttttttcctttttttgtttttggttttttatggttttttaaggaaaatacttttctcctttgaagttttacagctttttgtaaatgcgtcctgataatgattaggaaaatcgaccttttcatccatgatgaccatcctcatagctcagatctcctttcaaagtagtggctttctggatggtaattccatcttaaggtgtcagaactattttcaaatgctgcctttgacagttcttggaattttctgatattaagcagttccatgcaaatattcgtgttttataaatagctctcatagtctgctccatcttgatagttaagtgatttctgaagcgtttgtgtgtgtgttgatcaggttgtgtgatatttttgcttgatagagaatcaaatttgaaacaattaaccagccagtagattgtctgtcagtgaccttctgtagtaataaagtttttgccactgtaaataaaaacagtatccgtagctatcaggatcattgcgcactcatatatgctaagccttctgttctctaatagaagcctttcttttccattgtttctggatatttgtattatccaaatgtgcttatttctttgccttagcacacgttttatggagtacttgttatactaggtttgatttgaaactggtgcttgtcgcagaactgtcagagcatgaggagcgctcctcctgtgggtggacgcattcacgcactcccaggttgcacctgctgctggcggtgagcagggggttcagcagcttgaccgatgccccccgagggggctctccccagcttaaactttgttgtttaaatttgttaactttttatattaatgactattgaaagtggtaataaaaatttatattataggcttcaatgttttcatgaatgttacccaaaaagctgtgttttctttggtcagaggtcaaaatttatgaaaaacaaaatgctgtatgaatggaaatcattttgcaattgagtgacacttcattgtaattcacagtgtaaatttaatccaaactgaaattttgtttcaactgaatttgtaattaactctgaatttgtttttaatcattagtaatatttcagttgggtatctttttaagtaaaaacaacaaataaactctgtacatgtaaaacgtga

SEQ ID NO: 108387 - protein, 814 aa, Artificial Sequence
  derived and/or modified sequence
MGAARSPPSAVPGPLLGLLLLLLGVLAPGGASLRLLDHRALVCSQPGLNCTVKNSTCLDDSWIHPRNLTPSSPKDLQIQLHFAHTQQGDLFPVAHIEWTLQTDASILYLEGAELSVLQLNTNERLCVRFEFLSKLRHHHRRWRFTFSHFVVDPDQEYEVTVHHLPKPIPDGDPNHQSKNFLVPDCEHARMKVTTPCMSSGSLWDPNITVETLEAHQLRVSFTLWNESTHYQILLTSFPHMENHSCFEHMHHIPAPRPEEFHQRSNVTLTLRNLKGCCRHQVQIQPFFSSCLNDCLRHSATVSCPEMPDTPDGLPAADLIPPPLKPRKVWIIYSADHPLYVDVVLKFAQFLLTACGTEVALDLLEEQAISEAGVMTWVGRQKQEMVESNSKIIVLCSRGTRAKWQALLGRGAPVRLRCDHGKPVGDLFTAAMNMILPDFKRPACFGTYVVCYFSEVSCDGDVPDLFGAAPRYPLMDRFEEVYFRIQDLEMFQPGRMHRVGELSGDNYLRSPGGRQLRAALDRFRDWQVRCPDWFECENLYSADDQDAPSLDEEVFEEPLLPPGTGIVKRAPLVREPGSQACLAIDPLVGEEGGAAVAKLEPHLQPRGQPAPQPLHTLVLAAEEGALVAAVEPGPLADGAAVRLALAGEGEACPLLGSPGAGRNSVLFLPVDPEDSPLGSSTPMASPDLLPEDVREHLEGLMLSLFEQSLSCQAQGGCSRPAMVLTDPHTPYEEEQRQSVQSDQGYISRSSPQPPEGLTEMEEEEEEEQDPGKPALPLSPEDLESLRSLQRQLLFRQLQKNSGWDTMGSESEGPSA

SEQ ID NO: 108388 - DNA, 2445 bp, Artificial Sequence
  derived and/or modified sequence
atgggggccgcacggagtcctcccagtgccgtcccagggccactccttggcctgcttctgttgctgctcggcgtgctggctccaggcggcgcttccctgcgattgctcgatcatcgtgcccttgtctgcagccagcccggcctcaattgcacagtcaaaaactcgacttgtctggatgattcctggattcacccacggaacctcaccccgtcgagtcctaaagacttacagatccaactgcacttcgcccacacccagcaaggcgatttgttccccgtggcccatatcgagtggaccctgcagactgacgcctccatcctttacctcgagggtgcggagttatccgtcctgcaattgaacaccaacgaaagactgtgtgtgcggtttgaattcttaagtaaactgaggcaccaccaccgccggtggcgcttcacatttagccactttgtggtcgatcctgatcaggaatacgaagtgactgtccaccacttacccaagcctattccagacggagacccaaatcaccagtccaagaattttttggtaccagattgcgaacacgctcgcatgaaagttaccaccccttgcatgagtagcggctcattgtgggacccaaacatcacagtcgagacgctggaggctcaccaactgagggtatcctttaccctgtggaacgagtcaactcattatcagatcttgcttacctctttcccacacatggaaaaccatagctgctttgagcatatgcatcacatccccgccccacggcctgaggaatttcaccaacggtcgaatgttaccctgaccctgaggaatttaaagggttgttgcaggcatcaagtacagatccagcccttcttcagttcctgcctgaacgattgcttgagacattccgcgaccgtgtcttgccccgagatgcccgacacccctgacggactccccgcagcagatttgatccccccacccctgaaaccacggaaggtttggattatatactcagcagaccatccactgtacgttgatgtggtcctcaaattcgcacagtttttattgaccgcttgtggcaccgaggtcgccttggacctcctggaagagcaagccatatctgaggctggcgttatgacctgggttgggcgccagaaacaggaaatggtggaaagcaatagtaaaattatcgtgctttgctctagaggaacccgcgcaaagtggcaggccctgctgggcagaggggctcctgtgcgtctgagatgtgatcatggtaagcccgtgggcgacttatttaccgcagctatgaacatgattctccctgacttcaaaagaccggcttgttttgggacctacgtagtttgctatttcagtgaagtgagctgcgacggagatgtccctgatctcttcggtgccgctccgaggtacccgcttatggatcgcttcgaagaagtttattttcggattcaggacttagaaatgttccagcctgggcgcatgcatcgggtgggagaactgagtggcgataattacttacggagccccggtggccgccagttgagggctgcactagatcggttccgggactggcaagtgaggtgtcctgactggttcgaatgcgagaatctctactctgcagatgaccaagacgctcccagcctcgatgaggaggtttttgaggaacctctgttaccacccgggaccggaatcgtgaagcgggctccgcttgttcgtgagccgggcagccaggcctgccttgccatcgatcccttggtgggcgaggaggggggtgctgccgtcgccaagttggagccacatctgcagccgcgtggtcaaccggcccctcagccgttgcatacgcttgtgttagcggccgaggagggtgctcttgtggccgccgttgagcctggacccctggccgacggcgctgccgtgcgattggcactggccggcgaaggtgaggcctgtcctctgctgggaagccctggagcaggtcgcaactctgttctgttcctgccagttgacccagaggactccccgctgggatcaagcactcccatggcttctccagatcttctccctgaggatgtgcgggagcatctggaagggttaatgttgagcctgttcgagcaatctctcagttgccaggcacaagggggatgttcccgtcctgctatggtgctcacggatcctcatacaccttatgaagaggagcagcgacagtcggtgcagtctgatcagggctacattagtagatcctcacctcagccccccgagggcctgaccgagatggaagaagaagaggaggaggagcaggaccccggaaaacccgccctgccactttctcccgaggatcttgagtcgctgcgcagtctccaacgacagctgctgttcagacagctgcaaaagaatagcggttgggacacaatgggatccgagtcagaagggccctctgcttag

SEQ ID NO: 108389 - DNA, 2693 bp, Artificial Sequence
  derived and/or modified sequence
ctgggcccgggctggaagccggaagcgagcaaagtggagccgactcgaactccaccgcggaaaagaaagcctcagaacgttcgttcgctgcgtccccagccggggccgagccctccgcgacgccagccgggccatgggggccgcacgcagcccgccgtccgctgtcccggggcccctgctggggctgctcctgctgctcctgggcgtgctggccccgggtggcgcctccctgcgactcctggaccaccgggcgctggtctgctcccagccggggctaaactgcacggtcaagaatagtacctgcctggatgacagctggattcaccctcgaaacctgaccccctcctccccaaaggacctgcagatccagctgcactttgcccacacccaacaaggagacctgttccccgtggctcacatcgaatggacactgcagacagacgccagcatcctgtacctcgagggtgcagagttatctgtcctgcagctgaacaccaatgaacgtttgtgcgtcaggtttgagtttctgtccaaactgaggcatcaccacaggcggtggcgttttaccttcagccactttgtggttgaccctgaccaggaatatgaggtgaccgttcaccacctgcccaagcccatccctgatggggacccaaaccaccagtccaagaatttccttgtgcctgactgtgagcacgccaggatgaaggtaaccacgccatgcatgagctcaggcagcctgtgggaccccaacatcaccgtggagaccctggaggcccaccagctgcgtgtgagcttcaccctgtggaacgaatctacccattaccagatcctgctgaccagttttccgcacatggagaaccacagttgctttgagcacatgcaccacatacctgcgcccagaccagaagagttccaccagcgatccaacgtcacactcactctacgcaaccttaaagggtgctgtcgccaccaagtgcagatccagcccttcttcagcagctgcctcaatgactgcctcagacactccgcgactgtttcctgcccagaaatgccagacactccagatggcctgcctgcggctgacctgatccccccaccgctgaagcccaggaaggtctggatcatctactcagccgaccaccccctctacgtggacgtggtcctgaaattcgcccagttcctgctcaccgcctgcggcacggaagtggccctggacctgctggaagagcaggccatctcggaggcaggagtcatgacctgggtgggccgtcagaagcaggagatggtggagagcaactctaagatcatcgtcctgtgctcccgcggcacgcgcgccaagtggcaggcgctcctgggccggggggcgcctgtgcggctgcgctgcgaccacggaaagcccgtgggggacctgttcactgcagccatgaacatgatcctcccggacttcaagaggccagcctgcttcggcacctacgtagtctgctacttcagcgaggtcagctgtgacggcgacgtccccgacctgttcggcgcggcgccgcggtacccgctcatggacaggttcgaggaggtgtacttccgcatccaggacctggagatgttccagccgggccgcatgcaccgcgtaggggagctgtcgggggacaactacctgcggagcccgggcggcaggcagctccgcgccgccctggacaggttccgggactggcaggtccgctgtcccgactggttcgaatgtgagaacctctactcagcagatgaccaggatgccccgtccctggacgaagaggtgtttgaggagccactgctgcctccgggaaccggcatcgtgaagcgggcgcccctggtgcgcgagcctggctcccaggcctgcctggccatagacccgctggtcggggaggaaggaggagcagcagtggcaaagctggaacctcacctgcagccccggggtcagccagcgccgcagcccctccacaccctggtgctcgccgcagaggagggggccctggtggccgcggtggagcctgggcccctggctgacggtgccgcagtccggctggcactggcgggggagggcgaggcctgcccgctgctgggcagcccgggcgctgggcgaaatagcgtcctcttcctccccgtggaccccgaggactcgccccttggcagcagcacccccatggcgtctcctgacctccttccagaggacgtgagggagcacctcgaaggcttgatgctctcgctcttcgagcagagtctgagctgccaggcccaggggggctgcagtagacccgccatggtcctcacagacccacacacgccctacgaggaggagcagcggcagtcagtgcagtctgaccagggctacatctccaggagctccccgcagccccccgagggactcacggaaatggaggaagaggaggaagaggagcaggacccagggaagccggccctgccactctctcccgaggacctggagagcctgaggagcctccagcggcagctgcttttccgccagctgcagaagaactcgggctgggacacgatggggtcagagtcagaggggcccagtgcatgagggcggctccccagggaccgcccagatcccagctttgagagaggagtgtgtgtgcacgtattcatctgtgtgtacatgtctgcatgtgtatatgttcgtgtgtgaaatgtaggct

SEQ ID NO: 108390 - DNA, 2445 bp, Artificial Sequence
  derived and/or modified sequence
atgggcgccgcccggagccccccatctgctgtgcccggccccctgctgggcctgctgctgctgctgctgggcgtgctggcccctgggggcgccagcctgcggctgctggaccaccgggccctggtgtgcagccagcccggcctgaactgcaccgtgaagaacagcacctgcctggatgacagctggatccaccccaggaacctgacccccagcagccccaaggacctgcagatccagctgcactttgcccacacccagcagggcgacctcttccctgtggcccacatcgagtggaccctgcagacagatgccagcatcctgtacctggagggcgctgagctgtctgtgctgcagctgaacaccaatgaaaggctgtgtgtgcgctttgagttcctgagcaagctgcggcaccaccaccggcgctggaggttcaccttcagccactttgtggtggaccctgaccaggagtatgaggtgacagtgcaccacctgcccaagcccatcccagatggagaccccaaccaccagagcaagaacttcctggtgcctgactgtgaacatgccaggatgaaggtgaccaccccctgcatgagcagcggcagcctgtgggaccccaacatcaccgtggagaccctggaggcccaccagctgcgggtgtccttcaccctgtggaatgaaagcacccactaccagatcctgctgaccagcttcccccacatggagaaccacagctgctttgagcacatgcaccacatcccagcccccaggcctgaggagttccaccagaggagcaatgtgaccctgaccctgaggaacctgaagggctgctgccgccaccaggtgcagatccagcccttcttcagcagctgcctgaatgactgcctgcggcacagcgccaccgtgtcctgcccagagatgccagacaccccagatggcctgcctgctgctgacctgatccccccacccctgaagcccaggaaggtgtggatcatctacagcgctgaccaccccctgtatgtggatgtggtgctgaagtttgcccagttcctgctgacagcctgtggcacagaggtggccctggacctgctggaggagcaggccatcagcgaggccggcgtgatgacctgggtgggccggcagaagcaggagatggtggagagcaacagcaagatcatcgtgctgtgcagccggggcacccgggccaagtggcaggccctgctgggccgcggggcccctgtgcggctgcgctgtgaccacggcaagcctgtgggggacctcttcaccgctgccatgaacatgatcctgcctgacttcaagaggcctgcctgcttcggcacctacgtggtgtgctacttcagcgaggtgtcctgtgatggagatgtgcctgacctgtttggagctgccccccgctaccccctgatggacagatttgaggaggtgtacttccgcatccaggacctggagatgttccagcccggccgcatgcaccgggtgggggagctgagcggggacaactacctgcggagccctgggggccggcagctgcgggccgccctggaccgcttccgggactggcaggtgcgctgcccagactggtttgaatgtgagaacctgtacagcgcagatgaccaggatgcccccagcctggatgaggaggtgtttgaggagcccctgctgcccccaggcactggaattgtgaagagggcccccctggtgcgggagcccggcagccaggcctgcctggccatcgaccccctggtgggggaggagggcggcgctgctgtggccaagctggagccccacctgcagccccggggccagcctgccccccagcccctgcacaccctggtgctggccgctgaggagggcgccctggtggccgctgtggagcccggccccctggctgatggagctgctgtgcggctggccctggccggggagggggaggcctgccccctgctgggcagccctggagctggaagaaattctgtgctcttcctgcctgtggaccctgaggacagccccctgggcagcagcacccccatggccagcccagacctgctgcctgaagatgtgcgggagcacctggagggcctgatgctgagcctgtttgagcagagcctgagctgccaggcccagggcggctgcagcaggcctgccatggtgctgacagacccccacaccccctatgaggaggagcagaggcagagcgtgcagagcgaccagggctacatcagccgcagcagcccccagcccccagagggcctgacagagatggaggaggaggaggaggaggagcaggaccccgggaagccagccctgcccctgagccctgaggacctggagagcctgcggagcctgcagaggcagctgctcttccggcagctgcagaagaacagcggctgggacaccatgggcagcgagagcgagggccccagcgcctag

SEQ ID NO: 108391 - DNA, 2445 bp, Artificial Sequence
  derived and/or modified sequence
atgggcgccgcccggagcccccccagcgccgtgcccggccccctgctgggactgctcctactgttgctgggggtacttgcacccgggggcgcttcattacgtctgctcgatcacagggccctggtctgtagccagcccggattgaactgtacagttaagaactctacatgcctggacgacagctggatacaccctcgaaacctcactcccagttcccccaaagacctacagattcagctccactttgcccacacccagcagggcgacctgtttcctgtggcacatatagagtggacactccagaccgacgcatcaatcctgtatctggaaggagctgagctgtccgtcctgcaacttaataccaacgagcggctctgtgtcaggttcgagtttctgtccaagctgcgccaccatcaccgcaggtggagatttactttcagtcatttcgtcgtcgacccagatcaggagtacgaagtgaccgtccaccacctcccaaagccgattcctgacggcgatcctaatcaccagagcaagaacttcctggttccagactgtgagcatgcaaggatgaaagtgacaacaccatgtatgtcatctggatccctctgggatcctaacattactgtggagactctggaagcccatcagttacgggtctccttcacgctgtggaacgaatctacacactatcagattcttctaacctcattccctcatatggagaatcattcttgttttgaacatatgcaccatatacccgcccctaggcctgaagagtttcatcagcgcagcaatgtgacgctgaccttgaggaatctcaaaggttgctgccgccaccaagtccagattcagccatttttctcttcttgcttaaacgactgcctcaggcacagtgcaacagtctcttgcccggaaatgcccgacacccctgacggactgcccgcagccgatttaatcccccctcccctgaaacctcgtaaggtatggataatttactccgccgatcacccgctctatgtcgatgtggtcctgaaattcgcgcagttcttgttgactgcatgtggcactgaagttgcattggacctcctggaggagcaggcgatcagcgaagccggagttatgacatgggtcggacgtcagaaacaggagatggtagaatctaatagtaaaatcattgtgctgtgctcgagaggaacccgggccaagtggcaagccctgttgggccgaggagctcctgtgcggctgcgctgtgaccacggcaagcccgtcggagatctttttaccgcagccatgaacatgatcttgccagattttaagcgacccgcttgcttcggcacctatgtggtttgctatttttctgaagtctcctgtgatggagatgtgcccgacctgttcggagccgcacctcggtaccctctgatggatagatttgaggaagtgtacttcagaattcaagatctcgaaatgttccaacctggtcggatgcatcgagtgggggagctaagtggggacaactatctccgaagcccagggggccggcaactcagggcggcgcttgaccgattccgggattggcaggtgcgttgccccgattggttcgaatgtgagaatctttacagcgcagacgaccaggatgcaccttcactggacgaggaagtgttcgaggagccgttgctgccacccgggaccggcattgtgaagcgagcacctctcgtgagagagccaggcagtcaggcctgcctggcaatagatccactggtcggcgaagagggaggtgctgctgtggctaaactggagcctcatctgcagccgaggggtcaaccagcccctcagcccctgcacacgttggtcctggctgcagaggaaggggcactcgttgccgcagtcgagcctggacccctggcagacggcgccgctgtccggctggcgcttgccggcgagggcgaggcctgcccactattaggctctcccggcgctggcaggaactctgtgctcttcctgcccgtcgacccagaagatagtccactgggaagcagcacccccatggcctctccggacctccttccagaggatgtccgcgaacacctcgagggactgatgctgagtctgtttgagcagagcctatcttgtcaggcccaaggcgggtgcagcagaccagcgatggtgttgactgacccacacactccctacgaagaggaacagcggcagtctgtgcagagcgaccaagggtatatcagcagatctagcccccagccccccgaaggactgaccgagatggaggaggaagaggaggaggagcaggatcctggtaagcctgctctaccgctctccccagaagatctggaatctctgcgttcactgcagcggcaactgctgtttagacaattgcagaaaaattctggatgggacacaatgggctcagaatctgagggtccatcagcctag

SEQ ID NO: 108392 - DNA, 2445 bp, Artificial Sequence
  derived and/or modified sequence
atgggcgctgcacggtcacctcctagcgccgttccaggcccactcctcggtctgctgctgcttctgctgggggtactcgctcccggaggggcatccttacggctgttggaccatcgcgcattggtgtgttcccagccaggacttaactgcaccgtgaagaacagtacctgcctggatgactcatggatacaccctagaaatctgacccctagttcccccaaggatctacagatccagcttcacttcgcacacactcagcagggggacctgtttcctgtggcacatattgagtggactctgcagaccgatgcatccatcctgtatttggagggagccgagctgtcagtcttgcagctcaataccaacgagcgcttatgtgtgaggtttgaattcctgtcaaagctaagacaccaccatcggagatggcgatttacattctcacattttgtggtggacccggatcaagaatatgaagtgaccgtccatcacctgcctaagcctattcctgacggggaccccaatcatcagagtaagaatttcttagtgcccgattgtgagcacgctagaatgaaggtaaccactccttgtatgtccagcggcagcttgtgggaccctaacattacagtggagacattggaggcccaccagcttagggtgtcattcaccttgtggaatgagtccacacattatcaaatcttgctcactagtttccctcatatggaaaaccacagctgctttgagcacatgcaccatattcctgctcctagacccgaagagtttcatcaacgcagtaatgtcaccctaaccctaagaaatctgaaaggttgttgcaggcaccaggtgcagatccaaccctttttcagttcttgtctcaacgattgccttcggcatagcgctaccgtgtcttgcccggaaatgccggatacgccggatggtctccccgctgccgatctcattccgcctccacttaaacctagaaaagtatggattatctatagcgcggaccatcccctgtatgtagacgttgtgctgaagttcgcccagttcttattaacagcctgcggaactgaagtagctttagatctgcttgaagagcaagccatctctgaggctggtgtgatgacgtgggtgggtcgtcagaaacaagagatggtggaaagcaacagcaaaataattgtactctgcagcagaggtactcgtgccaagtggcaggctttgctggggagaggcgcacctgtcaggctccgatgcgatcatgggaagcctgtgggagaccttttcacagccgctatgaacatgatcttgccggattttaaaagaccagcatgtttcgggacctatgtggtctgctatttcagcgaggtgagctgcgacggagatgttcctgacctgttcggagccgctcctcggtaccccctgatggaccgctttgaggaggtgtatttccgcatacaggaccttgaaatgttccagccaggacggatgcacagagtaggcgaactgagtggcgataactatctgcgatcccctggtggcagacagttgagagccgctctggatcggttccgggattggcaagttaggtgcccggattggttcgagtgtgagaacctttactcggctgatgaccaggacgctccatcccttgacgaggaggtatttgaagagcctctcctcccgccagggacggggatcgtcaagagggctcctttggtcagggagcccggatcccaggcgtgcctggccatcgaccccttagtaggcgaggaaggaggggcagccgtggccaagctcgagccacacctccagccccgaggccaacctgctccgcagcccctccatacgttggtgctcgctgcagaagaaggcgcattggtcgccgctgtggagccaggtccccttgctgacggcgctgccgtgcgcctcgcattggccggagagggggaagcctgtccacttctgggttcgccaggcgctggtagaaactcagttctgttcctgccggtggaccctgaagacagtcccctgggctcctcaacacccatggccagcccggatctactccctgaagacgtccgggagcacttggaggggctgatgctgagtctgtttgagcagtctctctcatgccaagctcagggaggctgctctaggccggcaatggtgctcactgatccacacacaccttacgaagaagaacagcgccagtctgtgcagtcagaccagggctacatcagccggagttctcctcagcccccagaaggtttaaccgagatggaagaggaggaagaggaggagcaggatccagggaagccagccttgcctctgagtccagaggatttggaatccctgcgatctcttcagcggcagctgctctttaggcagctccagaaaaacagtggatgggataccatggggagtgagtcggagggcccaagcgcctag

SEQ ID NO: 108393 - DNA, 2445 bp, Artificial Sequence
  derived and/or modified sequence
atgggcgccgccagaagcccccccagcgccgtgcccggccccctgctgggcctgctgctgctgctgctgggcgtgctggcccccggcggcgccagcctgagactgctggaccacagagccctggtgtgcagccagcccggcctgaactgcaccgtgaagaacagcacctgcctggacgacagctggatccaccccagaaacctgacccccagcagccccaaggacctgcagatccagctgcacttcgcccacacccagcagggcgacctgttccccgtggcccacatcgagtggaccctgcagaccgacgccagcatcctgtacctggagggcgccgagctgagcgtgctgcagctgaacaccaacgagagactgtgcgtgagattcgagttcctgagcaagctgagacaccaccacagaagatggagattcaccttcagccacttcgtggtggaccccgaccaggagtacgaggtgaccgtgcaccacctgcccaagcccatccccgacggcgaccccaaccaccagagcaagaacttcctggtgcccgactgcgagcacgccagaatgaaggtgaccaccccctgcatgagcagcggcagcctgtgggaccccaacatcaccgtggagaccctggaggcccaccagctgagagtgagcttcaccctgtggaacgagagcacccactaccagatcctgctgaccagcttcccccacatggagaaccacagctgcttcgagcacatgcaccacatccccgcccccagacccgaggagttccaccagagaagcaacgtgaccctgaccctgagaaacctgaagggctgctgcagacaccaggtgcagatccagcccttcttcagcagctgcctgaacgactgcctgagacacagcgccaccgtgagctgccccgagatgcccgacacccccgacggcctgcccgccgccgacctgatccccccccccctgaagcccagaaaggtgtggatcatctacagcgccgaccaccccctgtacgtggacgtggtgctgaagttcgcccagttcctgctgaccgcctgcggcaccgaggtggccctggacctgctggaggagcaggccatcagcgaggccggcgtgatgacctgggtgggcagacagaagcaggagatggtggagagcaacagcaagatcatcgtgctgtgcagcagaggcaccagagccaagtggcaggccctgctgggcagaggcgcccccgtgagactgagatgcgaccacggcaagcccgtgggcgacctgttcaccgccgccatgaacatgatcctgcccgacttcaagagacccgcctgcttcggcacctacgtggtgtgctacttcagcgaggtgagctgcgacggcgacgtgcccgacctgttcggcgccgcccccagataccccctgatggacagattcgaggaggtgtacttcagaatccaggacctggagatgttccagcccggcagaatgcacagagtgggcgagctgagcggcgacaactacctgagaagccccggcggcagacagctgagagccgccctggacagattcagagactggcaggtgagatgccccgactggttcgagtgcgagaacctgtacagcgccgacgaccaggacgcccccagcctggacgaggaggtgttcgaggagcccctgctgccccccggcaccggcatcgtgaagagagcccccctggtgagagagcccggcagccaggcctgcctggccatcgaccccctggtgggcgaggagggcggcgccgccgtggccaagctggagccccacctgcagcccagaggccagcccgccccccagcccctgcacaccctggtgctggccgccgaggagggcgccctggtggccgccgtggagcccggccccctggccgacggcgccgccgtgagactggccctggccggcgagggcgaggcctgccccctgctgggcagccccggcgccggcagaaacagcgtgctgttcctgcccgtggaccccgaggacagccccctgggcagcagcacccccatggccagccccgacctgctgcccgaggacgtgagagagcacctggagggcctgatgctgagcctgttcgagcagagcctgagctgccaggcccagggcggctgcagcagacccgccatggtgctgaccgacccccacaccccctacgaggaggagcagagacagagcgtgcagagcgaccagggctacatcagcagaagcagcccccagccccccgagggcctgaccgagatggaggaggaggaggaggaggagcaggaccccggcaagcccgccctgcccctgagccccgaggacctggagagcctgagaagcctgcagagacagctgctgttcagacagctgcagaagaacagcggctgggacaccatgggcagcgagagcgagggccccagcgcctag

SEQ ID NO: 108394 - protein, 99 aa, Artificial Sequence
  derived and/or modified sequence
MGCDRNCGLIAGAVIGAVLAVFGGILMPVGDLLIQKTIKKQVVLEEGTIAFKNWVKTGTEVYRQFWIFDVQNPQEVMMNSSCIPYLSKSICSNDPQFTY

SEQ ID NO: 108395 - protein, 203 aa, Artificial Sequence
  derived and/or modified sequence
MGCDRNCGLIAGAVIGAVLAVFGGILMPVGDLLIQKTIKKQVVLEEGTIAFKNWVKTGTEVYRQFWIFDVQNPQEVMMNSSNIQVKQRGPYTYRVRFLAKENVTQDAEDNTVSFLQPNGAIFEPSLSVGTEADNFTVLNLAVAAASHIYQNQFVQMILNSLINKSKSSMFQVRTLRELLWGYRDPFLSLVPYPVTTTVGLFYP

SEQ ID NO: 108396 - protein, 148 aa, Artificial Sequence
  derived and/or modified sequence
MGCDRNCGLIAGAVIGAVLAVFGGILMPVGDLLIQKTIKKQVVLEEGTIAFKNWVKTGTEVYRQFWIFDVQNPQEVMMNSSNIQVKQRGPYTYRVRFLAKENVTQDAEDNTVSFLQPNGAIFEPSLSVGTEADNFTVLNLAVAAASHI

SEQ ID NO: 108397 - protein, 93 aa, Artificial Sequence
  derived and/or modified sequence
MGCDRNCGLIAGAVIGAVLAVFGGILMPVGDLLIQKTIKKQVVLEEGTIAFKNWVKTGTEVYRQFWIFDVQNPQEVMMNSSNIQVKQRGPYTY

SEQ ID NO: 108398 - protein, 433 aa, Artificial Sequence
  derived and/or modified sequence
MGCDRNCGLIAGAVIGAVLAVFGGILMPVGDLLIQKTIKKQVVLEEGTIAFKNWVKTGTEVYRQFWIFDVQNPQEVMMNSSNIQVKQRGPYTYRVRFLAKENVTQDAEDNTVSFLQPNGAIFEPSLSVGTEADNFTVLNLAVAAASHIYQNQFVQMILNSLINKSKSSMFQVRTLRELLWGYRDPFLSLVPYPVTTTVGLFYPYNNTADGVYKVFNGKDNISKVAIIDTYKGKRSIYAVFESDVNLKGIPVYRFVLPSKAFASPVENPDNYCFCTEKIISKNCTSYGVLDISKCKEGRPVYISLPHFLYASPDVSEPIDGLNPNEEEHRTYLDIEPITGFTLQFAKRLQVNLLVKPSEKIQVLKNLKRNYIVPILWLNETGTIGDEKANMFRSQVTGKINLLGLIEMILLSVGVVMFVAFMISYCACRSKTIK

SEQ ID NO: 108399 - protein, 143 aa, Artificial Sequence
  derived and/or modified sequence
MGCDRNCGLIAGAVIGAVLAVFGGILMPVGDLLIQKTIKKQVVLEEGTIAFKNWVKTGTEVYRQFWIFDVQNPQEVMMNSSNIQVKQRGPYTYRVRFLAKENVTQDAEDNTVSFLQPNGAIFEPSLSVGTEADNFTVLNLAVA

SEQ ID NO: 108400 - DNA, 612 bp, Artificial Sequence
  derived and/or modified sequence
atgggatgtgacaggaattgtggactgattgcaggagcagtgattggggcggtcttagccgtatttgggggaatcctgatgcctgtgggggatctgctgatccaaaaaactatcaaaaagcaggtggtgttggaggaaggcactatcgcattcaagaactgggtgaagacaggcaccgaagtgtaccgtcagttttggatcttcgacgtgcagaaccctcaggaggtcatgatgaacagctctaacatccaggttaaacaacggggaccctatacgtatcgcgtgcggttcttggccaaagagaacgttacacaggacgccgaggacaacacagtttcatttctacagcctaatggcgcaatcttcgagccatcgctttccgtgggaaccgaagctgacaactttacagttttaaacctggcggttgccgccgcctcccacatttatcagaaccagttcgttcagatgatactgaattcgttgattaacaagtccaagagctcgatgtttcaggtgcgcacactccgtgaattgttatggggatatagggaccccttcctgagtctggtcccgtatccagtgactaccactgtcgggctgttctacccatag

SEQ ID NO: 108401 - DNA, 447 bp, Artificial Sequence
  derived and/or modified sequence
atgggttgcgaccgaaactgcggtttaattgccggtgcagtaataggcgctgtcttggctgtgttcggtggtatcctgatgcctgtgggggatctcctcattcagaagactattaaaaagcaggttgtgttagaggagggaaccatcgctttcaagaactgggttaaaaccggcactgaggtttaccgacagttctggatctttgacgtgcagaatcctcaggaggtgatgatgaattccagcaacatccaggtgaaacagcggggcccatacacttaccgagtccgttttttggctaaggaaaacgtgacccaggacgcggaagataacacagtttcctttctacagcctaacggggctattttcgaacccagcttatccgtcggaaccgaggccgacaacttcactgtcctaaatttggccgttgctgccgcctcccacatctag

SEQ ID NO: 108402 - DNA, 1302 bp, Artificial Sequence
  derived and/or modified sequence
atgggatgcgataggaactgtggtttgattgctggcgctgtgataggcgcagtgctcgccgtgtttggcggcattctcatgcccgttggcgacttgctgattcagaaaaccattaagaaacaggtggtgttagaggagggcacaattgctttcaaaaactgggtgaaaaccggtaccgaagtatacaggcagttttggattttcgatgtccagaaccctcaggaggtgatgatgaattcctccaatatccaagtcaaacagcgaggtccctatacctatcgcgtgaggtttctggcaaaggagaatgtgactcaggacgccgaagacaacacggtgagtttcctccagccaaatggtgccatcttcgaaccttcccttagcgtgggcactgaggctgataattttacagtgctgaacctggcagttgccgctgcaagtcacatatatcagaaccagtttgtccagatgattctcaactccctaatcaacaaatccaaatcctctatgttccaggttcgcacactgcgcgagctcctttggggctatagagacccctttcttagcttggtgccgtatcccgtcaccacgactgtcggattgttctacccctataataatacagccgatggggtctataaagtcttcaacgggaaggataacatcagcaaggtggccatcattgatacctataaaggaaaaagatcgatctacgccgtgttcgagagcgacgtcaatcttaaaggtattccagtttacaggtttgtactcccctcgaaggcgttcgcttcaccagtcgaaaatcccgacaattattgcttctgcacagaaaaaattatcagtaagaattgcacttcatatggggttctcgatatatccaagtgtaaggaggggagaccagtctacatttccctcccccattttctctacgctagtccagatgtaagcgaacctatcgacgggttgaacccgaacgaggaggagcacaggacataccttgacatcgaaccaattaccggatttacgcttcaattcgccaagcggctgcaggtgaacctgttggtgaagccgtctgagaaaatccaggtgttaaaaaatctgaagcgcaactatattgttccaatactttggcttaatgaaactggaaccattggagacgagaaagccaacatgttcagatcacaggttaccggcaaaatcaatttactgggcttaatcgaaatgattttactcagcgtaggtgtcgtcatgttcgtagcgttcatgatttcctattgtgcatgtcggtcgaagactatcaagtag

SEQ ID NO: 108403 - DNA, 612 bp, Artificial Sequence
  derived and/or modified sequence
atgggctgtgacaggaactgtggcctgattgctggagctgtgattggagctgtgctggccgtgtttggaggcatcctgatgcctgtgggggacctgctgatccagaagaccatcaagaagcaggtggtgctggaggagggcaccatcgccttcaagaactgggtgaagacaggaacagaggtgtaccggcagttctggatctttgatgtgcagaacccccaggaggtgatgatgaacagcagcaacatccaggtgaagcagaggggcccctacacctacagagtgcgcttcctggccaaggaaaatgtgacccaggatgctgaggacaacacagtgtccttcctgcagcccaacggggccatctttgagcccagcctgtctgtgggcacagaggccgacaacttcaccgtgctgaacctggccgtggccgccgccagccacatctaccagaaccagtttgtgcagatgatcctgaacagcctcatcaacaagagcaagagctccatgttccaggtgaggaccctgcgggagctgctgtggggctacagagaccccttcctgagcctggtgccctaccctgtgaccaccaccgtgggcctcttctacccctag

SEQ ID NO: 108404 - DNA, 447 bp, Artificial Sequence
  derived and/or modified sequence
atgggctgtgacaggaactgtggcctgattgctggagctgtgattggagctgtgctggccgtgtttggaggcatcctgatgcctgtgggggacctgctgatccagaagaccatcaagaagcaggtggtgctggaggagggcaccatcgccttcaagaactgggtgaagacaggaacagaggtgtaccggcagttctggatctttgatgtgcagaacccccaggaggtgatgatgaacagcagcaacatccaggtgaagcagaggggcccctacacctacagagtgcgcttcctggccaaggaaaatgtgacccaggatgctgaggacaacacagtgtccttcctgcagcccaacggggccatctttgagcccagcctgtctgtgggcacagaggccgacaacttcaccgtgctgaacctggccgtggccgccgccagccacatctag

SEQ ID NO: 108405 - DNA, 1302 bp, Artificial Sequence
  derived and/or modified sequence
atgggctgtgacaggaactgtggcctgattgctggagctgtgattggagctgtgctggccgtgtttggaggcatcctgatgcctgtgggggacctgctgatccagaagaccatcaagaagcaggtggtgctggaggagggcaccatcgccttcaagaactgggtgaagacaggaacagaggtgtaccggcagttctggatctttgatgtgcagaacccccaggaggtgatgatgaacagcagcaacatccaggtgaagcagaggggcccctacacctacagagtgcgcttcctggccaaggaaaatgtgacccaggatgctgaggacaacacagtgtccttcctgcagcccaacggggccatctttgagcccagcctgtctgtgggcacagaggccgacaacttcaccgtgctgaacctggccgtggccgccgccagccacatctaccagaaccagtttgtgcagatgatcctgaacagcctcatcaacaagagcaagagctccatgttccaggtgaggaccctgcgggagctgctgtggggctacagagaccccttcctgagcctggtgccctaccctgtgaccaccaccgtgggcctcttctacccctacaacaacacagcagatggagtgtacaaggtgttcaacgggaaggacaacatcagcaaggtggccatcatcgacacctacaagggcaagaggagcatctatgctgtgtttgaaagtgatgtgaacctgaagggcatccctgtgtacagatttgtgctgcccagcaaggcctttgccagccctgtggagaacccagacaactactgcttctgcacagagaagatcatcagcaagaactgcaccagctatggagtgctggacatcagcaagtgcaaggagggccggcctgtgtacatcagcctgccccacttcctgtatgccagcccagatgtgtctgagcccattgatggcctgaaccccaatgaggaggagcacaggacctacctggacatcgagcccatcaccggcttcaccctgcagtttgccaagaggctgcaggtgaacctgctggtgaagcccagcgagaagatccaggtgctgaagaacctgaagaggaactacatcgtgcccatcctgtggctgaatgagaccggcaccatcggagatgagaaggccaacatgttccgcagccaggtgacaggcaagatcaacctgctgggcctgattgagatgatcctgctgtctgtgggcgtggtgatgtttgtggccttcatgatctcctactgtgcctgccgcagcaagaccatcaagtag

SEQ ID NO: 108406 - DNA, 612 bp, Artificial Sequence
  derived and/or modified sequence
atgggctgcgaccggaactgcggcctgatcgccggcgccgtgatcggggctgtactggcagttttcgggggaatcctcatgcctgtgggggacctgctgatccagaaaaccataaagaagcaggtggtgttggaagaaggcaccatagcttttaaaaattgggtgaaaaccggcacggaggtgtataggcagttttggatatttgacgtgcagaacccccaagaggtgatgatgaattccagtaacatccaggtgaagcagcggggcccctatacctatagagtccgatttttggcaaaggaaaatgtcactcaagacgctgaggataacacggtaagctttctgcaaccaaacggagccatctttgagccaagtctgagcgtaggtaccgaagccgacaattttacagtgcttaacttagcagtggccgccgccagtcatatttaccagaaccagtttgttcagatgatcctcaacagtctcattaataagagtaaaagtagcatgttccaggttcgcactctgcgagaactgctttgggggtaccgcgacccctttctgtcgctggtcccataccccgttactactaccgtcggactgttctacccatag

SEQ ID NO: 108407 - DNA, 447 bp, Artificial Sequence
  derived and/or modified sequence
atgggctgcgaccggaactgcggcctgatcgccggcgccgtgatcggcgccgtcctggccgttttcggtggaatattgatgccagtgggggatctgctgattcagaagaccatcaaaaagcaagtcgtcctggaggagggtaccatcgcatttaaaaactgggtaaaaactgggacagaagtctaccggcagttctggatcttcgatgtacagaatcctcaggaggtcatgatgaattcgagcaacatacaggttaaacagcgagggccctacacatatcgggtgcggttcctggccaaagagaatgtgacgcaggatgccgaggataacaccgtctcttttttgcagcctaatggagccatattcgaaccttctttgagcgtgggcaccgaagccgataactttaccgtgctgaaccttgcggtggccgccgcctctcacatctag

SEQ ID NO: 108408 - DNA, 1302 bp, Artificial Sequence
  derived and/or modified sequence
atgggctgcgaccggaactgcggcctgatcgccggcgccgtgatcggagcggtattagccgtttttgggggcatcttaatgcccgttggggaccttctgattcagaaaacaatcaaaaaacaggtcgttctcgaagaaggaactattgctttcaagaattgggtgaagaccggcaccgaggtctatcgtcagttttggattttcgatgtgcagaatcctcaggaggttatgatgaatagttctaacatccaagttaaacagcgggggccatatacctatagagttcgttttctcgccaaagagaacgtgactcaggacgccgaagacaatacggtctccttccttcaacccaacggggctatcttcgagccatctcttagcgtcggcacagaagctgacaattttacagtgctgaacttggccgtggcagcggctagtcatatctatcagaatcagtttgtgcagatgatcctgaattctcttattaacaagtctaaatcctctatgtttcaagttaggacactccgcgagctcttgtggggctaccgcgaccccttccttagcctggtgccatatccggtgactacaactgtcggcctcttttacccctataacaacacagctgacggagtctataaggtctttaacggaaaagacaacatttcgaaggtggccatcatagacacctataaaggaaagcggtccatatacgccgtgttcgagtctgacgtcaacctgaaggggattccagtgtataggtttgtgctgccctccaaagcgtttgcaagccctgtcgagaaccccgataactactgcttctgtaccgagaaaatcatatccaaaaactgcacctcttatggcgtgctggatatcagcaaatgcaaagagggccggcccgtgtatatcagcttgccccacttcctctacgcctcaccagacgtatcagagccaatagatgggctgaatccgaatgaagaagaacatcggacttatctcgacatcgagcccatcacaggcttcaccctccagttcgctaagagactgcaagttaatctgctcgtgaagccgtctgagaagatccaagtgcttaagaacctgaaaaggaattacatcgtgccaattctgtggcttaatgagacaggaacgattggcgatgaaaaggccaatatgtttcgctctcaagtcaccggcaagatcaaccttctggggctaatcgagatgatcttgctgtctgtcggcgtggtgatgtttgtggcgtttatgatatcctactgcgcctgcaggtccaaaaccatcaaatag

SEQ ID NO: 108409 - DNA, 612 bp, Artificial Sequence
  derived and/or modified sequence
atggggtgcgaccggaactgtggtttaattgcgggagccgtcataggggctgtactggcggttttcgggggtatcctgatgcccgtaggagatctgctcattcaaaagaccatcaaaaagcaggtggtgctggaggagggaactattgcttttaagaattgggtcaaaacggggacagaggtgtataggcagttttggatctttgacgttcaaaacccgcaagaagtgatgatgaacagctccaacattcaggtcaagcagcgcggaccctacacttaccgcgttaggtttctagcgaaagaaaatgtgactcaggacgccgaggataacacagtttcctttttacagccgaatggggcaatattcgaaccctccctgtccgtggggacagaagctgacaatttcaccgtactgaacctggcagtggctgctgctagtcacatctatcagaaccagtttgtccagatgatcctcaattcccttatcaacaaatctaaatcttctatgtttcaggtgcggaccctccgtgaactgctctggggctaccgggaccccttcctttccctggtgccatatcccgtgacaactacagtggggttattctacccttag

SEQ ID NO: 108410 - DNA, 447 bp, Artificial Sequence
  derived and/or modified sequence
atgggatgtgaccgaaattgcgggcttattgctggagccgtgatcggcgctgtgttggctgtgtttggcggaattcttatgcccgtcggtgaccttctcattcaaaagacaatcaagaagcaggttgtcctggaggagggaacaatcgctttcaaaaattgggtaaaaacgggcaccgaggtttataggcaattctggattttcgacgtacagaatccacaggaggtgatgatgaactcctccaacattcaggttaagcaaagagggccatacacctatcgcgtgcgattcttggctaaggaaaatgtgacccaggacgcagaagacaatacagtctccttccttcagcctaatggggctatcttcgaaccttctctgagtgtggggacagaagccgataattttactgttctgaacctcgcagtggcagccgcttcacacatttag

SEQ ID NO: 108411 - DNA, 1302 bp, Artificial Sequence
  derived and/or modified sequence
atgggatgtgaccgaaactgcgggttgattgcaggggctgtaatcggtgccgtactggctgtgttcgggggtatcctgatgccggtaggggatcttctgatccagaaaactatcaaaaaacaggtggtcctggaggaagggacaattgctttcaagaactgggtcaaaactggcacggaggtgtacagacagttctggattttcgacgtgcaaaacccacaagaagtgatgatgaattcttcaaatatacaggttaaacagcgtgggccatacacatatcgggtgagatttcttgccaaggaaaacgtaacccaggatgccgaagataacaccgtgagctttttacagccaaatggcgctatattcgagccctccctctcggtgggtaccgaagcagataactttactgttttaaaccttgccgttgccgcagccagtcatatctaccagaaccaatttgttcagatgattctgaattctcttattaacaagtcaaaatcttctatgttccaggtgagaaccctacgagagctgctatggggatacagggacccattcctctctctggtcccttatcccgtcaccaccaccgtggggctgttttatccatataataatactgctgatggagtgtataaggttttcaacggcaaagacaatatttccaaagtcgccatcatcgacacctacaagggtaagagatccatttatgccgtcttcgaatctgacgtgaacctgaaaggaattccggtgtacagattcgttctcccatccaaagccttcgctagccccgtggaaaaccccgataactactgcttttgtaccgagaaaattataagcaagaattgcacctcatacggcgtcctggatattagcaaatgcaaggaaggacggcctgtgtacatcagcctcccacatttcttgtacgcttccccggacgtgagtgaacctatcgacggcctcaatcctaacgaggaagagcatcgcacatacctggatatcgaacccatcactgggttcacgctccagtttgctaagagactgcaagtcaacctgttggtgaaaccaagcgagaaaatccaagttctgaagaatctgaagaggaattatatagttcccatcctatggctcaatgagaccgggacgattggagacgagaaggccaatatgttccgttcccaagtgacggggaaaataaacttactcggactaatcgagatgatcctcctgagcgtgggggttgtgatgtttgtggcattcatgatttcctactgtgcttgtaggtccaaaactatcaagtag

SEQ ID NO: 108412 - DNA, 855 bp, Artificial Sequence
  derived and/or modified sequence
gagagttctccttagataagatttcaatatgttaatcatgtgtagaaagaaaattaaaaaggaggaatatgaagaaattcagatatgacattattagttctgccactggtaggcattagaagcaagaaaagggagacggaccgaggaagccactttgaaccagagcttgtagaaaccactttaatcatatccaggagtttgcaagaaacaggtgcttaacactaattcacctcctgaacaagaaaaatgggctgtgaccggaactgtgggctcatcgctggggctgtcattggtgctgtcctggctgtgtttggaggtattctaatgccagttggagacctgcttatccagaagacaattaaaaagcaagttgtcctcgaagaaggtacaattgcttttaaaaattgggttaaaacaggcacagaagtttacagacagttttggatctttgatgtgcaaaatccacaggaagtgatgatgaacagcagcaacattcaagttaagcaaagaggtccttatacgtacagagttcgttttctagccaaggaaaatgtaacccaggacgctgaggacaacacagtctctttcctgcagcccaatggtgccatcttcgaaccttcactatcagttggaacagaggctgacaacttcacagttctcaatctggctgtggcagctgcatcccatatctatcaaaatcaatttgttcaaatgatcctcaattcacttattaacaagtcaaaatcttctatgttccaagtcagaactttgagagaactgttatggggctatagggatccatttttgagtttggttccgtaccctgttactaccacagttggtctgttttatcct

SEQ ID NO: 108413 - DNA, 565 bp, Artificial Sequence
  derived and/or modified sequence
aagttgctgagacaagggaagagagatgaggaaccagagcttgtagaaaccactttaatcatatccaggagtttgcaagaaacaggtgcttaacactaattcacctcctgaacaagaaaaatgggctgtgaccggaactgtgggctcatcgctggggctgtcattggtgctgtcctggctgtgtttggaggtattctaatgccagttggagacctgcttatccagaagacaattaaaaagcaagttgtcctcgaagaaggtacaattgcttttaaaaattgggttaaaacaggcacagaagtttacagacagttttggatctttgatgtgcaaaatccacaggaagtgatgatgaacagcagcaacattcaagttaagcaaagaggtccttatacgtacagagttcgttttctagccaaggaaaatgtaacccaggacgctgaggacaacacagtctctttcctgcagcccaatggtgccatcttcgaaccttcactatcagttggaacagaggctgacaacttcacagttctcaatctggctgtggcagctgcatcccatatct

SEQ ID NO: 108414 - DNA, 1421 bp, Artificial Sequence
  derived and/or modified sequence
accagagcttgtagaaaccactttaatcatatccaggagtttgcaagaaacaggtgcttaacactaattcacctcctgaacaagaaaaatgggctgtgaccggaactgtgggctcatcgctggggctgtcattggtgctgtcctggctgtgtttggaggtattctaatgccagttggagacctgcttatccagaagacaattaaaaagcaagttgtcctcgaagaaggtacaattgcttttaaaaattgggttaaaacaggcacagaagtttacagacagttttggatctttgatgtgcaaaatccacaggaagtgatgatgaacagcagcaacattcaagttaagcaaagaggtccttatacgtacagagttcgttttctagccaaggaaaatgtaacccaggacgctgaggacaacacagtctctttcctgcagcccaatggtgccatcttcgaaccttcactatcagttggaacagaggctgacaacttcacagttctcaatctggctgtggcagctgcatcccatatctatcaaaatcaatttgttcaaatgatcctcaattcacttattaacaagtcaaaatcttctatgttccaagtcagaactttgagagaactgttatggggctatagggatccatttttgagtttggttccgtaccctgttactaccacagttggtctgttttatccttacaacaatactgcagatggagtttataaagttttcaatggaaaagataacataagtaaagttgccataatcgacacatataaaggtaaaaggtcaatctatgctgtatttgaatccgacgttaatctgaaaggaatccctgtgtatagatttgttcttccatccaaggcctttgcctctccagttgaaaacccagacaactattgtttctgcacagaaaaaattatctcaaaaaattgtacatcatatggtgtgctagacatcagcaaatgcaaagaagggagacctgtgtacatttcacttcctcattttctgtatgcaagtcctgatgtttcagaacctattgatggattaaacccaaatgaagaagaacataggacatacttggatattgaacctataactggattcactttacaatttgcaaaacggctgcaggtcaacctattggtcaagccatcagaaaaaattcaagtattaaagaatctgaagaggaactatattgtgcctattctttggcttaatgagactgggaccattggtgatgagaaggcaaacatgttcagaagtcaagtaactggaaaaataaacctccttggcctgatagaaatgatcttactcagtgttggtgtggtgatgtttgttgcttttatgatttcatattgtgcatgcagatcgaaaacaataaaataagtaagtatgtaccaaaaaatattgcttcaat

SEQ ID NO: 108415 - DNA, 612 bp, Artificial Sequence
  derived and/or modified sequence
atgggctgcgacagaaactgcggcctgatcgccggcgccgtgatcggcgccgtgctggccgtgttcggcggcatcctgatgcccgtgggcgacctgctgatccagaagaccatcaagaagcaggtggtgctggaggagggcaccatcgccttcaagaactgggtgaagaccggcaccgaggtgtacagacagttctggatcttcgacgtgcagaacccccaggaggtgatgatgaacagcagcaacatccaggtgaagcagagaggcccctacacctacagagtgagattcctggccaaggagaacgtgacccaggacgccgaggacaacaccgtgagcttcctgcagcccaacggcgccatcttcgagcccagcctgagcgtgggcaccgaggccgacaacttcaccgtgctgaacctggccgtggccgccgccagccacatctaccagaaccagttcgtgcagatgatcctgaacagcctgatcaacaagagcaagagcagcatgttccaggtgagaaccctgagagagctgctgtggggctacagagaccccttcctgagcctggtgccctaccccgtgaccaccaccgtgggcctgttctacccctag

SEQ ID NO: 108416 - DNA, 447 bp, Artificial Sequence
  derived and/or modified sequence
atgggctgcgacagaaactgcggcctgatcgccggcgccgtgatcggcgccgtgctggccgtgttcggcggcatcctgatgcccgtgggcgacctgctgatccagaagaccatcaagaagcaggtggtgctggaggagggcaccatcgccttcaagaactgggtgaagaccggcaccgaggtgtacagacagttctggatcttcgacgtgcagaacccccaggaggtgatgatgaacagcagcaacatccaggtgaagcagagaggcccctacacctacagagtgagattcctggccaaggagaacgtgacccaggacgccgaggacaacaccgtgagcttcctgcagcccaacggcgccatcttcgagcccagcctgagcgtgggcaccgaggccgacaacttcaccgtgctgaacctggccgtggccgccgccagccacatctag

SEQ ID NO: 108417 - DNA, 1302 bp, Artificial Sequence
  derived and/or modified sequence
atgggctgcgacagaaactgcggcctgatcgccggcgccgtgatcggcgccgtgctggccgtgttcggcggcatcctgatgcccgtgggcgacctgctgatccagaagaccatcaagaagcaggtggtgctggaggagggcaccatcgccttcaagaactgggtgaagaccggcaccgaggtgtacagacagttctggatcttcgacgtgcagaacccccaggaggtgatgatgaacagcagcaacatccaggtgaagcagagaggcccctacacctacagagtgagattcctggccaaggagaacgtgacccaggacgccgaggacaacaccgtgagcttcctgcagcccaacggcgccatcttcgagcccagcctgagcgtgggcaccgaggccgacaacttcaccgtgctgaacctggccgtggccgccgccagccacatctaccagaaccagttcgtgcagatgatcctgaacagcctgatcaacaagagcaagagcagcatgttccaggtgagaaccctgagagagctgctgtggggctacagagaccccttcctgagcctggtgccctaccccgtgaccaccaccgtgggcctgttctacccctacaacaacaccgccgacggcgtgtacaaggtgttcaacggcaaggacaacatcagcaaggtggccatcatcgacacctacaagggcaagagaagcatctacgccgtgttcgagagcgacgtgaacctgaagggcatccccgtgtacagattcgtgctgcccagcaaggccttcgccagccccgtggagaaccccgacaactactgcttctgcaccgagaagatcatcagcaagaactgcaccagctacggcgtgctggacatcagcaagtgcaaggagggcagacccgtgtacatcagcctgccccacttcctgtacgccagccccgacgtgagcgagcccatcgacggcctgaaccccaacgaggaggagcacagaacctacctggacatcgagcccatcaccggcttcaccctgcagttcgccaagagactgcaggtgaacctgctggtgaagcccagcgagaagatccaggtgctgaagaacctgaagagaaactacatcgtgcccatcctgtggctgaacgagaccggcaccatcggcgacgagaaggccaacatgttcagaagccaggtgaccggcaagatcaacctgctgggcctgatcgagatgatcctgctgagcgtgggcgtggtgatgttcgtggccttcatgatcagctactgcgcctgcagaagcaagaccatcaagtag

SEQ ID NO: 108418 - protein, 412 aa, Artificial Sequence
  derived and/or modified sequence
MGCDRNCGLIAGAVIGAVLAVFGGILMPVGDLLIQKTIKKQVVLEEGTIAFKNWVKTGTEVYRQFWIFDVQNPQEVMMNSSNIQVKQRGPYTYRVRFLAKENVTQDAEDNTVSFLQPNGAIFEPSLSVGTEADNFTVLNLAVAYNNTADGVYKVFNGKDNISKVAIIDTYKGKRNLSYWESHCDMINGTDAASFPPFVEKSQVLQFFSSDICRSIYAVFESDVNLKGIPVYRFVLPSKAFASPVENPDNYCFCTEKIISKNCTSYGVLDISKCKEGRPVYISLPHFLYASPDVSEPIDGLNPNEEEHRTYLDIEPITGFTLQFAKRLQVNLLVKPSEKIQVLKNLKRNYIVPILWLNETGTIGDEKANMFRSQVTGKINLLGLIEMILLSVGVVMFVAFMISYCACRSKTIK

SEQ ID NO: 108419 - DNA, 300 bp, Artificial Sequence
  derived and/or modified sequence
atgggctgcgacagaaactgcggcctgatcgccggcgccgtgatcggcgccgtgctggccgtgttcggcggcatcctgatgcccgtgggcgacctgctgatccagaagaccatcaagaagcaggtggtgctggaggagggcaccatcgccttcaagaactgggtgaagaccggcaccgaggtgtacagacagttctggatcttcgacgtgcagaacccccaggaggtgatgatgaacagcagctgcatcccctacctgagcaagagcatctgcagcaacgacccccagttcacctactag

SEQ ID NO: 108420 - DNA, 300 bp, Artificial Sequence
  derived and/or modified sequence
atgggatgtgaccggaactgtgggcttatcgccggggccgtaataggcgcggtgctggcagttttcggaggaattctgatgcctgttggggatttgctgatccaaaagactattaaaaagcaagtcgtgctagaggagggaaccatcgctttcaagaattgggtgaaaacggggacggaggtataccggcagttttggatattcgacgttcaaaatccccaggaagtcatgatgaatagcagttgcattccctacttgtccaaatccatctgttccaacgatcctcagtttacctattag

SEQ ID NO: 108421 - DNA, 300 bp, Artificial Sequence
  derived and/or modified sequence
atgggctgtgacaggaactgtggcctgattgctggagctgtgattggagctgtgctggccgtgtttggaggcatcctgatgcctgtgggggacctgctgatccagaagaccatcaagaagcaggtggtgctggaggagggcaccatcgccttcaagaactgggtgaagacaggaacagaggtgtaccggcagttctggatctttgatgtgcagaacccccaggaggtgatgatgaacagcagctgcatcccctacctgagcaagagcatctgcagcaatgacccccagttcacctactag

SEQ ID NO: 108422 - DNA, 300 bp, Artificial Sequence
  derived and/or modified sequence
atgggctgcgaccggaactgcggcctgatcgccggcgccgtgatcggtgccgtcctggctgtgttcgggggcattctgatgcccgtgggtgatttgttgatccagaaaactatcaaaaaacaggtagtcctcgaggaagggaccattgcttttaagaattgggtgaagacaggcactgaggtgtatcgacagttctggatatttgacgtgcagaatccccaagaggttatgatgaatagttcctgcatcccctacttgtctaagtccatatgtagcaatgaccctcagtttacctattag

SEQ ID NO: 108423 - DNA, 300 bp, Artificial Sequence
  derived and/or modified sequence
atgggttgtgatcgtaactgcggtttgattgccggtgctgttattggggcagtgctcgcagtgttcgggggaattctgatgccagtgggcgatctacttatccagaagactataaaaaagcaggtcgtcctggaggaaggcacaattgcattcaagaactgggtgaaaacaggcactgaagtatatcgacaattttggatttttgacgtgcagaacccacaagaagttatgatgaatagctcctgcattccatatctctccaaaagcatctgtagtaatgatccccagtttacttactag

SEQ ID NO: 108424 - DNA, 282 bp, Artificial Sequence
  derived and/or modified sequence
atgggttgcgaccgtaattgcgggctgatcgcgggagcagttatcggagctgtgttggcggtttttggtgggatcctaatgccagtgggcgatctgctcatccagaagacaatcaaaaaacaagtggtgctcgaggaggggaccatcgcctttaagaattgggtgaaaactggcacagaggtttaccgacagttctggatctttgacgttcagaaccctcaggaagtcatgatgaactcatctaatatacaggtcaagcagaggggcccctatacctactag

SEQ ID NO: 108425 - DNA, 282 bp, Artificial Sequence
  derived and/or modified sequence
atggggtgtgaccgcaactgtggactgatcgctggggctgtgatcggagccgtgcttgccgtgttcggcggcattctcatgcccgtgggtgacctgcttattcagaaaacgattaagaagcaggttgtcctcgaggagggaacgatcgccttcaagaactgggtgaagactggcacagaggtttaccgacagttctggatcttcgatgtccagaatccccaggaagtgatgatgaattcttccaatattcaggtaaaacagcgaggcccatatacttattag

SEQ ID NO: 108426 - DNA, 432 bp, Artificial Sequence
  derived and/or modified sequence
atgggttgtgaccggaactgcggactcatcgctggggctgtgattggagccgttctggcagtgtttggaggcattctcatgcctgttggagatctgctcattcagaagaccattaagaaacaggtggtactcgaggaagggacaattgcttttaaaaactgggtgaaaactggcacagaagtgtatagacaattctggatcttcgatgtccagaatccccaagaggttatgatgaattctagcaatattcaggttaaacagcgcggtccctatacgtatcgggttagattcctggctaaagagaacgtgacacaggatgcagaggacaatactgtgtcatttttgcaaccgaacggagctattttcgaaccgagtctgagtgtgggtacggaggcagacaattttaccgtgcttaatcttgctgtagcctag

SEQ ID NO: 108427 - DNA, 198 bp, Artificial Sequence
  derived and/or modified sequence
atggggtgcgaccggaattgcggcctcattgccggcgccgtgatcggcgcggttcttgcggttttcggcgggattctgatgcctgtgggcgacctgcttatccagaaaaccatcaagaagcaggtcgtgcttgaggaagggaccatcgcttttaaaaactgggtgaaaactgggacagaggtgtaccgccagttttag

SEQ ID NO: 108428 - DNA, 1239 bp, Artificial Sequence
  derived and/or modified sequence
atgggatgcgatcggaattgtggccttattgcgggcgctgtcatcggggcagttctggctgtctttggcggcattcttatgcctgttggtgatttgctgatccagaagacaatcaagaagcaggtggttcttgaggaggggacaattgctttcaaaaattgggttaagaccggtacagaggtgtaccggcaattttggatcttcgacgtccaaaatccgcaagaggtgatgatgaatagcagtaatattcaagtaaagcagcgtggcccctacacataccgcgtgcggttcttggccaaggagaacgtgacacaggacgcggaggataacacggtgtcctttctgcaacccaatggcgccatattcgaaccgtccctaagcgtcggcacagaggctgacaatttcactgtattgaatctcgccgtggcatataacaacactgctgacggggtttataaagttttcaatggaaaagacaatatctctaaggtggccatcatagatacttataaaggcaagcggaatctgtcctactgggagagccactgcgatatgattaacggtacagacgcagcgtcatttcctcctttcgtagagaaaagccaggtgttgcaattctttagcagcgacatttgtcgttctatatatgccgtgtttgagtctgatgtgaatctgaaagggattcctgtgtatagattcgtgctgccaagcaaggcctttgcgtcccctgtggagaatcccgataactattgtttctgcactgagaaaataatctccaaaaactgcaccagttacggcgtgctggatattagtaaatgcaaagaggggagacctgtttacatcagcttaccacacttcctttacgcctcacccgacgtttcagaaccaatcgacggccttaacccgaacgaggaggagcatagaacatacctggacattgagcctatcactggattcacgttacaatttgcaaaacgtctccaggtcaacctgctcgtgaagccttcggagaaaattcaggtgctcaagaatctgaagaggaattacatagtgcctattctgtggctcaatgaaactggaacaatcggggatgagaaggccaacatgttcagatcccaggtgacgggtaaaataaatctgctaggactcatagaaatgatcctcttatcagtgggcgtcgtgatgtttgtcgctttcatgatctcttactgtgcctgtcgaagcaagacaatcaagtag

SEQ ID NO: 108429 - DNA, 282 bp, Artificial Sequence
  derived and/or modified sequence
atgggctgtgacaggaactgtggcctgattgctggagctgtgattggagctgtgctggccgtgtttggaggcatcctgatgcctgtgggggacctgctgatccagaagaccatcaagaagcaggtggtgctggaggagggcaccatcgccttcaagaactgggtgaagacaggaacagaggtgtaccggcagttctggatctttgatgtgcagaacccccaggaggtgatgatgaacagcagcaacatccaggtgaagcagaggggcccctacacctactag

SEQ ID NO: 108430 - DNA, 432 bp, Artificial Sequence
  derived and/or modified sequence
atgggctgtgacaggaactgtggcctgattgctggagctgtgattggagctgtgctggccgtgtttggaggcatcctgatgcctgtgggggacctgctgatccagaagaccatcaagaagcaggtggtgctggaggagggcaccatcgccttcaagaactgggtgaagacaggaacagaggtgtaccggcagttctggatctttgatgtgcagaacccccaggaggtgatgatgaacagcagcaacatccaggtgaagcagaggggcccctacacctacagagtgcgcttcctggccaaggaaaatgtgacccaggatgctgaggacaacacagtgtccttcctgcagcccaacggggccatctttgagcccagcctgtctgtgggcacagaggccgacaacttcaccgtgctgaacctggccgtggcctag

SEQ ID NO: 108431 - DNA, 198 bp, Artificial Sequence
  derived and/or modified sequence
atgggctgtgacaggaactgtggcctgattgctggagctgtgattggagctgtgctggccgtgtttggaggcatcctgatgcctgtgggggacctgctgatccagaagaccatcaagaagcaggtggtgctggaggagggcaccatcgccttcaagaactgggtgaagacaggaacagaggtgtaccggcagttctag

SEQ ID NO: 108432 - DNA, 1239 bp, Artificial Sequence
  derived and/or modified sequence
atgggctgtgacaggaactgtggcctgattgctggagctgtgattggagctgtgctggccgtgtttggaggcatcctgatgcctgtgggggacctgctgatccagaagaccatcaagaagcaggtggtgctggaggagggcaccatcgccttcaagaactgggtgaagacaggaacagaggtgtaccggcagttctggatctttgatgtgcagaacccccaggaggtgatgatgaacagcagcaacatccaggtgaagcagaggggcccctacacctacagagtgcgcttcctggccaaggaaaatgtgacccaggatgctgaggacaacacagtgtccttcctgcagcccaacggggccatctttgagcccagcctgtctgtgggcacagaggccgacaacttcaccgtgctgaacctggccgtggcctacaacaacacagcagatggagtgtacaaggtgttcaacgggaaggacaacatcagcaaggtggccatcatcgacacctacaagggcaagaggaacctgagctactgggagagccactgtgacatgatcaatggaacagatgctgccagcttccccccatttgtggagaagagccaggtgctgcagttcttcagcagtgacatctgccgcagcatctatgctgtgtttgaaagtgatgtgaacctgaagggcatccctgtgtacagatttgtgctgcccagcaaggcctttgccagccctgtggagaacccagacaactactgcttctgcacagagaagatcatcagcaagaactgcaccagctatggagtgctggacatcagcaagtgcaaggagggccggcctgtgtacatcagcctgccccacttcctgtatgccagcccagatgtgtctgagcccattgatggcctgaaccccaatgaggaggagcacaggacctacctggacatcgagcccatcaccggcttcaccctgcagtttgccaagaggctgcaggtgaacctgctggtgaagcccagcgagaagatccaggtgctgaagaacctgaagaggaactacatcgtgcccatcctgtggctgaatgaaacaggcaccatcggagatgagaaggccaacatgttccgcagccaggtgacaggcaagatcaacctgctgggcctcatcgagatgatcctgctgtctgtgggcgtggtgatgtttgtggccttcatgatctcctactgtgcctgccgcagcaagaccatcaagtag

SEQ ID NO: 108433 - DNA, 282 bp, Artificial Sequence
  derived and/or modified sequence
atgggctgcgaccggaactgcggcctgatcgccggcgccgtgatcggagccgtcctggccgtgtttggcggcatcctcatgcccgttggggacttgctgattcaaaagactatcaagaaacaggtcgttctagaggagggcactatcgcctttaagaactgggtgaaaaccggcacagaagtgtaccgacagttctggattttcgatgtgcaaaacccacaagaagtgatgatgaatagcagcaacatccaagtgaagcaacgaggcccctacacctattag

SEQ ID NO: 108434 - DNA, 282 bp, Artificial Sequence
  derived and/or modified sequence
atgggctgcgaccggaactgcggcctgatcgccggcgccgtgatcggcgctgtgctcgccgtctttggcggaatcctgatgccagttggggacctgctgatccaaaagactattaaaaagcaggtggttctcgaagaagggactatcgcctttaagaattgggtgaagactggtactgaggtgtacagacagttttggattttcgacgtccagaatccccaggaggtgatgatgaactctagtaacattcaggtcaagcagagaggtccttacacctactag

SEQ ID NO: 108435 - DNA, 432 bp, Artificial Sequence
  derived and/or modified sequence
atgggctgcgaccggaactgcggcctgatcgccggcgccgtgatcggggccgtgctggccgttttcggaggaatcctcatgcccgtgggagatctccttatacaaaagaccattaagaaacaggtggtgctcgaagaaggcaccatcgccttcaaaaactgggttaaaactggaaccgaggtttatcgccagttctggatttttgacgtgcagaatccccaagaggttatgatgaactctagcaatatccaggtgaaacagcggggaccatatacatacagagttaggtttctggccaaagaaaatgttactcaggacgccgaggataacacagtgagttttctacaacccaacggggccatcttcgagcctagcctgagcgtcggtacggaggcagataactttacggttctgaacttagccgttgcatag

SEQ ID NO: 108436 - DNA, 198 bp, Artificial Sequence
  derived and/or modified sequence
atgggctgcgaccggaactgcggcctgatcgccggcgccgtgatcggagccgtcctggctgtgtttggtgggatcttaatgcccgtgggggacctgcttattcagaaaaccattaagaaacaggtcgtcctggaagaaggaactatagcatttaaaaattgggtcaagactggtactgaggtctaccgtcagttctag

SEQ ID NO: 108437 - DNA, 1239 bp, Artificial Sequence
  derived and/or modified sequence
atgggctgcgaccggaactgcggcctgatcgccggcgccgtgatcggagccgtccttgctgtttttgggggtattctgatgccagtgggcgatctccttattcagaaaaccattaagaaacaggtggtccttgaggagggcaccatagcatttaaaaactgggtgaaaactggaaccgaggtctatcgtcaattttggatattcgacgtacagaatccacaagaggtgatgatgaactcttctaatatccaggtgaaacagcggggcccctacacgtaccgtgtccgtttcttggccaaggagaatgtgacacaagacgctgaggacaatacagtgtcatttcttcagccaaatggcgcaatcttcgaaccttctctatctgttggaacagaggcggataactttaccgtcctaaacctggccgtggcctataacaacacagctgatggagtgtacaaggttttcaacggaaaggacaacatcagcaaagtggccatcatcgacacctataaagggaagaggaatctatcatactgggagtcgcattgtgatatgatcaacggcaccgacgctgccagtttcccccctttcgtggagaaaagccaggtactccagttcttttcaagtgacatttgtagatcaatttacgccgtattcgaatctgacgttaaccttaaaggcattcccgtttatagatttgtgctgccaagcaaggcattcgcatcacctgtagaaaatccagataattactgcttctgcaccgagaagataattagcaagaactgcacttcttacggggtattagacataagcaagtgtaaggagggaaggccagtgtacatttccctgcctcatttcctctatgcttcaccagacgtatctgagcctatagacggcctcaaccccaatgaagaagagcacaggacttatctggacatcgaaccaataaccggcttcacgcttcagttcgccaagagactacaagtcaacctgttagtgaagccctcagagaagattcaggtcctgaagaacctgaagcgtaattatatcgtgcccatcctttggctcaatgaaaccggtaccataggggatgaaaaggctaatatgtttagatcccaggtcaccggaaagattaatttattggggcttatcgagatgatcctgttatctgttggcgttgttatgttcgtcgccttcatgatctcatactgcgcctgtcggtcgaaaactattaaatag

SEQ ID NO: 108438 - DNA, 282 bp, Artificial Sequence
  derived and/or modified sequence
atgggttgcgatcggaattgcggcctcattgccggtgccgtcattggggcagtgctggcagttttcggcggtatcttaatgccagtcggcgatcttctaattcagaagaccatcaaaaagcaagtggtcttggaagaaggtacaatagcgttcaagaactgggtcaaaacggggaccgaggtgtacaggcagttctggatcttcgatgtccagaacccacaggaggtaatgatgaattctagcaatattcaggtaaaacagcgtggcccatacacatattag

SEQ ID NO: 108439 - DNA, 282 bp, Artificial Sequence
  derived and/or modified sequence
atgggctgcgaccgaaactgcggcctgattgccggtgccgtcatcggtgccgtgctggccgtttttggcggtattctcatgccagttggcgaccttttaatccagaaaactattaagaagcaggtggttctggaagagggtactatagccttcaagaactgggtcaaaacaggaacagaggtatataggcaattctggattttcgacgttcagaacccacaggaagtaatgatgaattcatccaatatccaagttaagcagcggggtccttatacctactag

SEQ ID NO: 108440 - DNA, 432 bp, Artificial Sequence
  derived and/or modified sequence
atgggctgtgatcggaactgtgggttgatcgccggtgccgtgatcggggctgtcttagctgttttcgggggaatcttaatgcctgtgggagacttgcttattcagaaaactatcaaaaagcaggtggtgcttgaggaaggtaccatcgccttcaagaactgggtaaagacaggcaccgaagtctaccggcagttttggattttcgacgtgcagaatccacaggaggttatgatgaactccagtaacattcaggttaaacagcgcggtccttacacctatagggtgagattcctggctaaggagaacgtgacccaggacgccgaggacaacaccgtatcattcttacagcccaatggggcaatcttcgaaccttctctgagtgtgggcactgaggccgacaacttcactgtgctcaaccttgccgttgcatag

SEQ ID NO: 108441 - DNA, 198 bp, Artificial Sequence
  derived and/or modified sequence
atgggctgcgacagaaattgcggcctcattgctggggctgtaatcggggctgtgctcgccgttttcggtgggattctaatgcctgtcggggacttactaatccagaaaaccatcaagaagcaggtggtgttggaggaaggaaccattgcatttaagaactgggtcaagacaggcaccgaggtgtatcggcaattctag

SEQ ID NO: 108442 - DNA, 1239 bp, Artificial Sequence
  derived and/or modified sequence
atggggtgtgatcgtaattgtggccttattgcaggggctgtgatcggcgcagtcctcgctgtatttggcggaattttgatgcctgtgggggacttgctgattcagaagacaattaagaagcaagtggtgctggaggagggaactatagcatttaaaaactgggttaaaactggcactgaagtgtataggcagttttggatctttgatgtgcagaacccgcaagaagttatgatgaattcctccaatatacaggttaaacagcggggaccctacacatatcgggttcggttcttggctaaagaaaacgttacacaggacgctgaggataacaccgtcagcttcttgcaacctaacggcgcaatcttcgaaccctccctgtccgtcggcaccgaggcagacaacttcactgtgctgaatctagccgtggcctataataacaccgccgatggggtgtacaaagtgttcaacggcaaagacaatatttctaaagtcgctatcatcgacacatacaaggggaagcgcaatctgtcatattgggagtcacattgtgatatgatcaatggcaccgatgccgctagctttccgcctttcgtcgaaaagagccaggtcctccagtttttctcttctgacatttgtagatcaatctacgctgtgttcgaatccgacgtaaatctgaagggcataccagtctaccggttcgtgctgccaagcaaggcctttgcctcaccagttgaaaatccagataattactgcttctgcacagaaaagattatcagcaagaactgcacatcctatggggtccttgacatctccaaatgtaaagaaggcaggcccgtctatattagcttgccccacttcctgtacgcatcccctgatgttagtgagccaatcgatgggttgaaccccaacgaggaggagcaccggacctacttggatattgaaccaatcactggattcacactgcaatttgcaaagagactgcaggtgaacttacttgtgaaaccaagtgaaaagatccaggtgctaaagaacttgaaacgtaactacatcgtccctattctctggcttaatgaaaccggaactatcggcgacgagaaagcaaacatgtttcggagtcaggttaccggcaaaataaatcttttgggtttgattgagatgatattattgagtgtcggcgtcgttatgtttgtggccttcatgatctcatactgtgcctgcaggagtaagactatcaagtag

SEQ ID NO: 108443 - DNA, 541 bp, Artificial Sequence
  derived and/or modified sequence
ttgctatggcaacccaatttattagtgactgcaaaactaacttagctggcattgtggcaaatctccatattttgctgatagctttccaatgattagacgaattgattctttctgtgactcatcagttcatttcctgtaaaattcatgtcttgctgttgatttgtgaataagaaccagagcttgtagaaaccactttaatcatatccaggagtttgcaagaaacaggtgcttaacactaattcacctcctgaacaagaaaaatgggctgtgaccggaactgtgggctcatcgctggggctgtcattggtgctgtcctggctgtgtttggaggtattctaatgccagttggagacctgcttatccagaagacaattaaaaagcaagttgtcctcgaagaaggtacaattgcttttaaaaattgggttaaaacaggcacagaagtttacagacagttttggatctttgatgtgcaaaatccacaggaagtgatgatgaacagcagcaacattcaagttaagcaaagaggtccttatacgtacag

SEQ ID NO: 108444 - DNA, 536 bp, Artificial Sequence
  derived and/or modified sequence
attcctggcatggtcacagtgactactgtgacttgtttgagaggtgactttgaacatttattttactttcagatagctttccaatgattagacgaattgattctttctgtgactcatcagttcatttcctgtaaaattcatgtcttgctgttgatttgtgaataagaaccagagcttgtagaaaccactttaatcatatccaggagtttgcaagaaacaggtgcttaacactaattcacctcctgaacaagaaaaatgggctgtgaccggaactgtgggctcatcgctggggctgtcattggtgctgtcctggctgtgtttggaggtattctaatgccagttggagacctgcttatccagaagacaattaaaaagcaagttgtcctcgaagaaggtacaattgcttttaaaaattgggttaaaacaggcacagaagtttacagacagttttggatctttgatgtgcaaaatccacaggaagtgatgatgaacagcagcaacattcaagttaagcaaagaggtccttatacgtacag

SEQ ID NO: 108445 - DNA, 720 bp, Artificial Sequence
  derived and/or modified sequence
ggcaaacacaaccagagtcttcggtgttaattccctggtcttcccaactagcattctgaaagtgcattaacatttgtggccttgtgctctttcatcggacttctaatgatagctttccaatgattagacgaattgattctttctgtgactcatcagttcatttcctgtaaaattcatgtcttgctgttgatttgtgaataagaaccagagcttgtagaaaccactttaatcatatccaggagtttgcaagaaacaggtgcttaacactaattcacctcctgaacaagaaaaatgggctgtgaccggaactgtgggctcatcgctggggctgtcattggtgctgtcctggctgtgtttggaggtattctaatgccagttggagacctgcttatccagaagacaattaaaaagcaagttgtcctcgaagaaggtacaattgcttttaaaaattgggttaaaacaggcacagaagtttacagacagttttggatctttgatgtgcaaaatccacaggaagtgatgatgaacagcagcaacattcaagttaagcaaagaggtccttatacgtacagagttcgttttctagccaaggaaaatgtaacccaggacgctgaggacaacacagtctctttcctgcagcccaatggtgccatcttcgaaccttcactatcagttggaacagaggctgacaacttcacagttctcaatctggctgtggca

SEQ ID NO: 108446 - DNA, 569 bp, Artificial Sequence
  derived and/or modified sequence
gactgcagtgtaggactttcctgcagaataccatttgatcctattaagaattgtccaaatgttggagcatttgattgaaaaatccttcttagccattttaaagactcattagtgaaccagaacaataaaccaaacagagaaccatcagataatgggttagcctgggaagaatattaattacaactggagatagctttccaatgattagacgaattgattctttctgtgactcatcagttcatttcctgtaaaattcatgtcttgctgttgatttgtgaataagaaccagagcttgtagaaaccactttaatcatatccaggagtttgcaagaaacaggtgcttaacactaattcacctcctgaacaagaaaaatgggctgtgaccggaactgtgggctcatcgctggggctgtcattggtgctgtcctggctgtgtttggaggtattctaatgccagttggagacctgcttatccagaagacaattaaaaagcaagttgtcctcgaagaaggtacaattgcttttaaaaattgggttaaaacaggcacagaagtttacagacagttttg

SEQ ID NO: 108447 - DNA, 1364 bp, Artificial Sequence
  derived and/or modified sequence
agaaccagagcttgtagaaaccactttaatcatatccaggagtttgcaagaaacaggtgcttaacactaattcacctcctgaacaagaaaaatgggctgtgaccggaactgtgggctcatcgctggggctgtcattggtgctgtcctggctgtgtttggaggtattctaatgccagttggagacctgcttatccagaagacaattaaaaagcaagttgtcctcgaagaaggtacaattgcttttaaaaattgggttaaaacaggcacagaagtttacagacagttttggatctttgatgtgcaaaatccacaggaagtgatgatgaacagcagcaacattcaagttaagcaaagaggtccttatacgtacagagttcgttttctagccaaggaaaatgtaacccaggacgctgaggacaacacagtctctttcctgcagcccaatggtgccatcttcgaaccttcactatcagttggaacagaggctgacaacttcacagttctcaatctggctgtggcatacaacaatactgcagatggagtttataaagttttcaatggaaaagataacataagtaaagttgccataatcgacacatataaaggtaaaaggaatctgtcctattgggaaagtcactgcgacatgattaatggtacagatgcagcctcatttccaccttttgttgagaaaagccaggtattgcagttcttttcttctgatatttgcaggtcaatctatgctgtatttgaatccgacgttaatctgaaaggaatccctgtgtatagatttgttcttccatccaaggcctttgcctctccagttgaaaacccagacaactattgtttctgcacagaaaaaattatctcaaaaaattgtacatcatatggtgtgctagacatcagcaaatgcaaagaagggagacctgtgtacatttcacttcctcattttctgtatgcaagtcctgatgtttcagaacctattgatggattaaacccaaatgaagaagaacataggacatacttggatattgaacctataactggattcactttacaatttgcaaaacggctgcaggtcaacctattggtcaagccatcagaaaaaattcaagtattaaagaatctgaagaggaactatattgtgcctattctttggcttaatgagactgggaccattggtgatgagaaggcaaacatgttcagaagtcaagtaactggaaaaataaacctccttggcctgatagaaatgatcttactcagtgttggtgtggtgatgtttgttgcttttatgatttcatattgtgcatgcagatcgaaaacaataaaataagtaagtatgtaccaaaaaatattgcttcaataat

SEQ ID NO: 108448 - DNA, 282 bp, Artificial Sequence
  derived and/or modified sequence
atgggctgcgacagaaactgcggcctgatcgccggcgccgtgatcggcgccgtgctggccgtgttcggcggcatcctgatgcccgtgggcgacctgctgatccagaagaccatcaagaagcaggtggtgctggaggagggcaccatcgccttcaagaactgggtgaagaccggcaccgaggtgtacagacagttctggatcttcgacgtgcagaacccccaggaggtgatgatgaacagcagcaacatccaggtgaagcagagaggcccctacacctactag

SEQ ID NO: 108449 - DNA, 432 bp, Artificial Sequence
  derived and/or modified sequence
atgggctgcgacagaaactgcggcctgatcgccggcgccgtgatcggcgccgtgctggccgtgttcggcggcatcctgatgcccgtgggcgacctgctgatccagaagaccatcaagaagcaggtggtgctggaggagggcaccatcgccttcaagaactgggtgaagaccggcaccgaggtgtacagacagttctggatcttcgacgtgcagaacccccaggaggtgatgatgaacagcagcaacatccaggtgaagcagagaggcccctacacctacagagtgagattcctggccaaggagaacgtgacccaggacgccgaggacaacaccgtgagcttcctgcagcccaacggcgccatcttcgagcccagcctgagcgtgggcaccgaggccgacaacttcaccgtgctgaacctggccgtggcctag

SEQ ID NO: 108450 - DNA, 198 bp, Artificial Sequence
  derived and/or modified sequence
atgggctgcgacagaaactgcggcctgatcgccggcgccgtgatcggcgccgtgctggccgtgttcggcggcatcctgatgcccgtgggcgacctgctgatccagaagaccatcaagaagcaggtggtgctggaggagggcaccatcgccttcaagaactgggtgaagaccggcaccgaggtgtacagacagttctag

SEQ ID NO: 108451 - DNA, 1239 bp, Artificial Sequence
  derived and/or modified sequence
atgggctgcgacagaaactgcggcctgatcgccggcgccgtgatcggcgccgtgctggccgtgttcggcggcatcctgatgcccgtgggcgacctgctgatccagaagaccatcaagaagcaggtggtgctggaggagggcaccatcgccttcaagaactgggtgaagaccggcaccgaggtgtacagacagttctggatcttcgacgtgcagaacccccaggaggtgatgatgaacagcagcaacatccaggtgaagcagagaggcccctacacctacagagtgagattcctggccaaggagaacgtgacccaggacgccgaggacaacaccgtgagcttcctgcagcccaacggcgccatcttcgagcccagcctgagcgtgggcaccgaggccgacaacttcaccgtgctgaacctggccgtggcctacaacaacaccgccgacggcgtgtacaaggtgttcaacggcaaggacaacatcagcaaggtggccatcatcgacacctacaagggcaagagaaacctgagctactgggagagccactgcgacatgatcaacggcaccgacgccgccagcttcccccccttcgtggagaagagccaggtgctgcagttcttcagcagcgacatctgcagaagcatctacgccgtgttcgagagcgacgtgaacctgaagggcatccccgtgtacagattcgtgctgcccagcaaggccttcgccagccccgtggagaaccccgacaactactgcttctgcaccgagaagatcatcagcaagaactgcaccagctacggcgtgctggacatcagcaagtgcaaggagggcagacccgtgtacatcagcctgccccacttcctgtacgccagccccgacgtgagcgagcccatcgacggcctgaaccccaacgaggaggagcacagaacctacctggacatcgagcccatcaccggcttcaccctgcagttcgccaagagactgcaggtgaacctgctggtgaagcccagcgagaagatccaggtgctgaagaacctgaagagaaactacatcgtgcccatcctgtggctgaacgagaccggcaccatcggcgacgagaaggccaacatgttcagaagccaggtgaccggcaagatcaacctgctgggcctgatcgagatgatcctgctgagcgtgggcgtggtgatgttcgtggccttcatgatcagctactgcgcctgcagaagcaagaccatcaagtag

SEQ ID NO: 108452 - DNA, 1203 bp, Artificial Sequence
  derived and/or modified sequence
atggacggcgacgagatgaccagaatcatctggcagttcatcaaggagaagctgatcctgccccacgtggacatccagctgaagtacttcgacctgggcctgcccaacagagaccagaccgacgaccaggtgaccatcgacagcgccctggccacccagaagtacagcgtggccgtgaagtgcgccaccatcacccccgacgaggccagagtggaggagttcaagctgaagaagatgtggaagagccccaacggcaccatcagaaacatcctgggcggcaccgtgttcagagagcccatcatctgcaagaacatccccagactggtgcccggctggaccaagcccatcaccatcggcagacacgcccacggcgaccagtacaaggccaccgacttcgtggccgacagagccggcaccttcaagatggtgttcacccccaaggacggcagcggcgtgaaggagtgggaggtgtacaacttccccgccggcggcgtgggcatgggcatgtacaacaccgacgagagcatcagcggcttcgcccacagctgcttccagtacgccatccagaagaagtggcccctgtacatgagcaccaagaacaccatcctgaaggcctacgacggcagattcaaggacatcttccaggagatcttcgacaagcactacaagaccgacttcgacaagaacaagatctggtacgagcacagactgatcgacgacatggtggcccaggtgctgaagagcagcggcggcttcgtgtgggcctgcaagaactacgacggcgacgtgcagagcgacatcctggcccagggcttcggcagcctgggcctgatgaccagcgtgctggtgtgccccgacggcaagaccatcgaggccgaggccgcccacggcaccgtgaccagacactacagagagcaccagaagggcagacccaccagcaccaaccccatcgccagcatcttcgcctggaccagaggcctggagcacagaggcaagctggacggcaaccaggacctgatcagattcgcccagatgctggagaaggtgtgcgtggagaccgtggagagcggcgccatgaccaaggacctggccggctgcatccacggcctgagcaacgtgaagctgaacgagcacttcctgaacaccaccgacttcctggacaccatcaagagcaacctggacagagccctgggcagacagtag

SEQ ID NO: 108453 - DNA, 1203 bp, Artificial Sequence
  derived and/or modified sequence
atggacggggacgagatgacacgtattatatggcagtttatcaaggagaaactcatccttccccacgttgatatacagctaaagtatttcgatctgggtttacccaatagagatcagacagacgaccaggtaaccatcgactccgcacttgccacacaaaagtattctgtagccgtgaagtgcgctactatcacccctgatgaagccagagtggaagagtttaagcttaagaagatgtggaagtccccgaacggcacgatcaggaacatattgggcggcactgtcttcagggaaccaatcatctgcaaaaacatcccacgcctggtccctggttggaccaagccaataaccatcggccgccacgcacatggtgatcagtacaaagccaccgactttgtcgccgaccgggcaggaactttcaagatggtgtttacgcctaaagatggttccggggtgaaggagtgggaggtgtacaacttccctgcagggggcgtgggtatgggcatgtacaatacagatgaatctataagcggattcgctcattcttgttttcagtacgcgattcagaagaagtggccactctacatgtcaacgaagaacacaatcttgaaggcctatgacggcagatttaaagatatatttcaggagattttcgacaagcactataagaccgacttcgataagaataagatctggtacgagcaccgactcatcgacgacatggtggctcaggtcctaaaaagctccggcggatttgtctgggcctgtaaaaattacgatggagacgtgcagtccgatatattagcccaaggattcgggtcactcggcttaatgacctctgtgctggtctgtcctgacggcaagaccattgaggctgaggcggcccatggcaccgtcaccagacattacagggagcaccagaagggtcgaccaacgagtactaacccaattgcctccattttcgcctggacacgcggcctcgagcacagaggcaaactggatggcaatcaggaccttattcgctttgcccagatgctcgagaaggtctgtgtggaaactgtggaaagcggcgccatgaccaaagacctggccggctgtatccatggtttgagcaatgtaaaactgaacgagcattttctcaacacaaccgattttctcgatactataaaaagtaatctggaccgagctctgggccggcaatag

SEQ ID NO: 108454 - DNA, 1203 bp, Artificial Sequence
  derived and/or modified sequence
atggatggagatgagatgacccgcatcatctggcagttcatcaaggagaagctgatcctgccccacgtggacatccagctgaagtactttgacctgggcctgcccaacagagaccagacagatgaccaggtgaccatcgacagcgccctggccacccagaagtacagcgtggccgtgaagtgtgccaccatcaccccagatgaggcccgggtggaggagttcaagctgaagaagatgtggaagagccccaacggcaccatccggaacatcctgggcggcaccgtcttccgggagcccatcatctgcaagaacatcccccggctggtgcccggctggaccaagcccatcaccatcggcagacatgcccatggagaccagtacaaggccacagactttgtggccgacagagctggcaccttcaagatggtgttcacccccaaggatggcagcggcgtgaaggagtgggaggtgtacaacttccctgctgggggcgtgggcatgggcatgtacaacacagatgagagcatcagcggctttgcccacagctgcttccagtatgccatccagaagaagtggcccctgtacatgagcaccaagaacaccatcctgaaggcctatgatggccgcttcaaggacatcttccaggagatctttgacaagcactacaagacagactttgacaagaacaagatctggtatgagcaccggctgattgatgacatggtggcccaggtgctgaagagcagcggcggctttgtgtgggcctgcaagaactatgatggagatgtgcagagcgacatcctggcccagggcttcggcagcctgggcctgatgacctctgtgctggtgtgcccagatggcaagaccatcgaggccgaggccgcccacggcaccgtgaccaggcactaccgggagcaccagaagggccggcccaccagcaccaaccccatcgccagcatctttgcctggacccggggcctggagcaccggggcaagctggatggcaaccaggacctgatccgctttgcccagatgctggagaaggtgtgtgtggagaccgtggagagcggggccatgaccaaggacctggccggctgcatccacggcctgagcaatgtgaagctgaatgagcacttcctgaacaccacagacttcctggacaccatcaagagcaacctggaccgggccctgggccggcagtag

SEQ ID NO: 108455 - DNA, 1449 bp, Artificial Sequence
  derived and/or modified sequence
agcccgcggccaggcagccgggaggagcggcgcgcgctcggacctctcccgccctgctcgttcgctctccagcttgggatggccggctacctgcgggtcgtgcgctcgctctgcagagcctcaggctcgcggccggcctgggcgccggcggccctgacagcccccacctcgcaagagcagccgcggcgccactagttcaagctgaagaagatgtggaaaagtcccaatggaactatccggaacatcctgggggggactgtcttccgggagcccatcatctgcaaaaacatcccacgcctagtccctggctggaccaagcccatcaccattggcaggcacgcccatggcgaccagtacaaggccacagactttgtggcagaccgggccggcactttcaaaatggtcttcaccccaaaagatggcagtggtgtcaaggagtgggaagtgtacaacttccccgcaggcggcgtgggcatgggcatgtacaacaccgacgagtccatctcaggttttgcgcacagctgcttccagtatgccatccagaagaaatggccgctgtacatgagcaccaagaacaccatactgaaagcctacgatgggcgtttcaaggacatcttccaggagatctttgacaagcactataagaccgacttcgacaagaataagatctggtatgagcaccggctcattgatgacatggtggctcaggtcctcaagtcttcgggtggctttgtgtgggcctgcaagaactatgacggagatgtgcagtcagacatcctggcccagggctttggctcccttggcctgatgacgtccgtcctggtctgccctgatgggaagacgattgaggctgaggccgctcatgggaccgtcacccgccactatcgggagcaccagaagggccggcccaccagcaccaaccccatcgccagcatctttgcctggacacgtggcctggagcaccgggggaagctggatgggaaccaagacctcatcaggtttgcccagatgctggagaaggtgtgcgtggagacggtggagagtggagccatgaccaaggacctggcgggctgcattcacggcctcagcaatgtgaagctgaacgagcacttcctgaacaccacggacttcctcgacaccatcaagagcaacctggacagagccctgggcaggcagtagggggaggcgccacccatggctgcagtggaggggccagggctgagccggcgggtcctcctgagcgcggcagagggtgagcctcacagcccctctctggaggcctttctaggggatgtttttttataagccagatgtttttaaaagcatatgtgtgtttcccctcatggtgacgtgaggcaggagcagtgcgttttacctcagccagtcagtatgttttgcatactgtaatttatattgcccttggaacacatggtgccatatttagctact

SEQ ID NO: 108456 - DNA, 1203 bp, Artificial Sequence
  derived and/or modified sequence
atggacggcgacgagatgacccggatcatctggcagttcatcaaggaaaagttgattctccctcacgtagatattcagttgaagtatttcgacttgggtctgcccaatcgagatcagacagatgaccaggtaaccatcgactcagctctggctacacagaagtactcggtggcagtgaagtgcgccacaattacaccggatgaagccagggtggaagaattcaagctgaaaaagatgtggaaatctcccaacgggacaattaggaacatcttaggcgggacggtctttcgggaaccgataatttgtaaaaacattcccagattggtgcccggttggactaaacccattaccataggccgccacgcacacggggaccagtacaaagctaccgatttcgtcgccgacagggcgggtacttttaaaatggtttttacacccaaagacgggagtggtgtcaaagaatgggaagtctacaacttccctgcaggaggggtcggcatgggcatgtataatacagatgagtctatcagcggcttcgcccactcctgttttcaatacgctatacagaaaaaatggcctctctacatgtcgactaagaatactatcctgaaagcatacgacggcaggtttaaagatattttccaggaaatcttcgataagcactacaaaacagattttgataagaataaaatctggtatgagcaccgcctgatcgacgacatggtggcacaggtgctgaagtccagcggcgggttcgtctgggcttgtaagaactacgacggagacgtgcagagcgacattttagcacagggctttggctccctcggactcatgactagtgtccttgtgtgtcccgacgggaagaccatcgaagcagaagctgcccatgggactgtcactagacactacagggagcatcagaaagggagacctacctccaccaaccctattgcttcaatatttgcttggactcgcgggctggagcaccgaggaaagctcgatggcaaccaggacctgatccggtttgcccaaatgttggaaaaggtatgtgtcgagacagtggagagcggcgcaatgacaaaagacttagcagggtgtatccatggactatcaaatgtgaagttgaacgaacatttcttgaacacaaccgactttctggataccataaagtccaacctggatcgagccctgggacgacagtag

SEQ ID NO: 108457 - DNA, 1203 bp, Artificial Sequence
  derived and/or modified sequence
atggacggcgacgagatgacacgcattatatggcagtttattaaggagaagctcatcctccctcacgtcgatattcagctgaagtattttgatctgggtctgcctaacagggaccagactgacgatcaggtgaccattgactctgcattagccacccaaaaatatagtgttgctgtgaagtgcgccactatcacaccagacgaagcaagagtcgaggagtttaagttgaagaaaatgtggaagagcccaaatgggactatacggaatatactggggggaactgtgtttcgggagcctatcatttgcaagaatattccaagactggtgcccggatggaccaagccaattaccatcggccgacacgcgcatggggaccagtacaaggctactgacttcgtggccgaccgtgcaggcacttttaagatggtctttacccccaaggacggctctggcgtcaaggagtgggaagtttacaacttccctgctggtggcgtgggaatgggcatgtataataccgacgaatctatctcggggttcgcacattcgtgctttcagtacgctatccagaagaagtggccactatacatgagtacgaagaataccatacttaaagcctacgacggacgcttcaaagacatcttccaggaaattttcgacaaacactacaagacagacttcgataagaataagatttggtacgaacatcggctcatagacgatatggttgcccaggtgctcaagtcatcaggaggcttcgtctgggcttgtaagaactatgacggagacgtgcagagcgacatcctcgctcagggttttgggtctctcgggctcatgacatctgtgctcgtgtgcccagacgggaaaactatcgaagcagaagcagcccatggcactgtgaccaggcactaccgagagcatcagaagggcaggcctactagcacgaaccccatagcgagcatcttcgcttggacccggggtttggaacatagagggaagttggacggaaatcaggacctgattcggtttgcacagatgctggaaaaggtctgcgtggagacagtggagagtggcgctatgacaaaagatttggcgggatgcatacacggactgtctaacgtcaaacttaatgaacactttctcaatactacagactttctcgacacgataaaaagtaatcttgacagggcccttggacggcagtag

SEQ ID NO: 108458 - protein, 396 aa, Artificial Sequence
  derived and/or modified sequence
MMNSSNIQVKQRGPYTYRVRFLAKENVTQDAEDNTVSFLQPNGAIFEPSLSVGTEADNFTVLNLAVAAASHIYQNQFVQMILNSLINKSKSSMFQVRTLRELLWGYRDPFLSLVPYPVTTTVGLFYPYNNTADGVYKVFNGKDNISKVAIIDTYKGKRNLSYWESHCDMINGTDAASFPPFVEKSQVLQFFSSDICRSIYAVFESDVNLKGIPVYRFVLPSKAFASPVENPDNYCFCTEKIISKNCTSYGVLDISKCKEGRPVYISLPHFLYASPDVSEPIDGLNPNEEEHRTYLDIEPITGFTLQFAKRLQVNLLVKPSEKIQVLKNLKRNYIVPILWLNETGTIGDEKANMFRSQVTGKINLLGLIEMILLSVGVVMFVAFMISYCACRSKTIK

SEQ ID NO: 108459 - DNA, 545 bp, Artificial Sequence
  derived and/or modified sequence
cttaacactaattcacctcctgaacaagaaaaatgggctgtgaccggaactgtgggctcatcgctggggctgtcattggtgctgtcctggctgtgtttggaggtattctaatgccagttggagacctgcttatccagaagacaattaaaaagcaagttgtcctcgaagaaggtacaattgcttttaaaaattgggttaaaacaggcacagaagtttacagacagttttggatctttgatgtgcaaaatccacaggaagtgatgatgaacagcagctgcatcccatatctatcaaaatcaatttgttcaaatgatcctcaattcacttattaacaagtcaaaatcttctatgttccaagtcagaactttgagagaactgttatggggctatagggatccatttttgagtttggttccgtaccctgttactaccacagttggtctgttttatccttacaacaatactgcagatggagtttataaagttttcaatggaaaagataacataagtaaagttgccataatcgacacatataaaggtaaaag

SEQ ID NO: 108460 - DNA, 1191 bp, Artificial Sequence
  derived and/or modified sequence
atgatgaattcttcaaatattcaagtgaagcagcgagggccctatacttatagagtgcggttccttgccaaggagaacgtgactcaagacgcagaggataacacagtgtctttcctacaacccaatggggctatattcgaacctagcttgtctgtcggcactgaggccgacaacttcacagttctaaatctagcggtagccgccgcgtctcacatataccagaatcagtttgtgcagatgatacttaatagtctgatcaataagtcaaaatcttcaatgttccaggtgaggactttgagggaactgctgtggggttaccgtgatccttttctgagccttgtgccttacccagtgacgacaaccgttgggctcttttacccttacaacaatactgctgatggcgtttataaggtatttaacgggaaagacaatatttcaaaagtggctataattgacacctacaagggaaaacgcaatctaagctactgggagtcccactgcgatatgatcaatggcacggacgccgccagcttccctcctttcgtggaaaaatcccaagtgttacagtttttctccagcgacatttgtcgtagtatctacgctgtatttgagtccgatgttaaccttaaaggcatcccagtgtacaggttcgtattgccttctaaagcatttgcatcaccggttgagaacccagacaattactgcttctgtacggagaagatcatttccaaaaactgcacctcttatggtgtgctcgacatttccaagtgcaaggaaggacgccctgtctacatttcgctgccacatttcttgtacgcttcacctgatgtgtctgagcctattgacgggttgaatcccaatgaggaagaacatagaacttatctcgatattgaacccataacggggtttaccctgcagtttgcaaaacggttacaggtcaaccttctggtaaagccttctgaaaagatccaggtgctgaaaaatctaaagaggaattacattgtccctatcttgtggctcaacgagaccggcaccatcggagacgagaaagctaatatgtttaggagccaggtgactggaaagattaacctgttgggcctgatcgagatgattctactatctgttggagtggttatgtttgttgctttcatgatctcttactgcgcctgcagaagtaagactatcaaatag

SEQ ID NO: 108461 - DNA, 1191 bp, Artificial Sequence
  derived and/or modified sequence
atgatgaacagcagcaacatccaggtgaagcagaggggcccctacacctacagagtgcgcttcctggccaaggaaaatgtgacccaggatgctgaggacaacacagtgtccttcctgcagcccaacggggccatctttgagcccagcctgtctgtgggcacagaggccgacaacttcaccgtgctgaacctggccgtggccgccgccagccacatctaccagaaccagtttgtgcagatgatcctgaacagcctcatcaacaagagcaagagctccatgttccaggtgaggaccctgcgggagctgctgtggggctacagagaccccttcctgagcctggtgccctaccctgtgaccaccaccgtgggcctcttctacccctacaacaacacagcagatggagtgtacaaggtgttcaacgggaaggacaacatcagcaaggtggccatcatcgacacctacaagggcaagaggaacctgagctactgggagagccactgtgacatgatcaatggaacagatgctgccagcttccccccatttgtggagaagagccaggtgctgcagttcttcagcagtgacatctgccgcagcatctatgctgtgtttgaaagtgatgtgaacctgaagggcatccctgtgtacagatttgtgctgcccagcaaggcctttgccagccctgtggagaacccagacaactactgcttctgcacagagaagatcatcagcaagaactgcaccagctatggagtgctggacatcagcaagtgcaaggagggccggcctgtgtacatcagcctgccccacttcctgtatgccagcccagatgtgtctgagcccattgatggcctgaaccccaatgaggaggagcacaggacctacctggacatcgagcccatcaccggcttcaccctgcagtttgccaagaggctgcaggtgaacctgctggtgaagcccagcgagaagatccaggtgctgaagaacctgaagaggaactacatcgtgcccatcctgtggctgaatgaaacaggcaccatcggagatgagaaggccaacatgttccgcagccaggtgacaggcaagatcaacctgctgggcctcatcgagatgatcctgctgtctgtgggcgtggtgatgtttgtggccttcatgatctcctactgtgcctgccgcagcaagaccatcaagtag

SEQ ID NO: 108462 - DNA, 1191 bp, Artificial Sequence
  derived and/or modified sequence
atgatgaacagcagcaacatccaggtgaagcagcggggcccctacacatatagagtaaggtttctggctaaggaaaatgtcacacaggatgctgaggacaatacggtgtccttcctccagccaaacggcgcaatttttgagcccagtttgtcggtgggcaccgaggctgacaacttcactgttctcaaccttgcagtggcagcagctagccatatttatcaaaatcagttcgtccaaatgatcctgaattcgctgataaacaaatccaaaagctctatgttccaggtcagaacgctgagagaacttttgtggggatatcgcgacccgttcctatccctggtgccttatcctgtaaccacaacagtggggctgttctacccatacaacaataccgccgacggtgtgtacaaagtgttcaacggcaaggacaacataagcaaagtcgccataatcgacacctataaggggaaacgcaatctttcttactgggagagtcattgtgatatgatcaacggtacagacgcagcttcttttcccccctttgtggaaaaatcccaggtactccagttcttctccagcgatatttgccggagcatttatgccgtctttgaaagcgatgtgaacctgaaaggcatcccagtctacagatttgtgcttccatccaaagcctttgcgtctccagtggagaatcccgataactattgtttttgtacagagaaaattatcagtaaaaattgtacatcttatggagttctggatatcagtaagtgcaaagaagggaggcccgtctacatatccctcccgcacttcctgtacgcttctccagacgtttccgagcccatcgatggcttgaaccctaatgaagaggagcacagaacatacctcgacatcgaacccatcaccgggttcactcttcagttcgcaaaacggctgcaggtgaacctgcttgtgaaaccgtccgagaagattcaggtgttaaaaaacttaaaacggaattacattgttccaatcctatggctcaacgaaacgggaacaattggggacgagaaagcaaacatgttcagatcccaggtaaccggtaagataaatctccttggactcatcgagatgatcctactgagtgtaggcgtcgtcatgttcgtggccttcatgatctcttactgcgcatgtcggagcaagacaattaagtag

SEQ ID NO: 108463 - DNA, 1191 bp, Artificial Sequence
  derived and/or modified sequence
atgatgaattcgtctaatatacaggtgaagcaacgcggtccctacacctacagagtgaggttcctggccaaggaaaatgtaactcaggatgccgaagacaacactgtgtctttcctccagccaaacggggctatcttcgagccaagcctttccgtcggtaccgaggccgataacttcaccgttctgaatcttgccgttgccgctgccagtcacatatatcagaaccaattcgtgcagatgatactgaattctttgatcaataaatccaaatcctctatgtttcaagttagaacattgagggagcttctttggggttatcgcgacccgtttttgtccctggtgccctatccagtgaccacaactgtgggactgttttacccctacaacaacactgccgacggcgtctataaggtgtttaatggtaaagacaatatcagtaaagtggctatcatcgacacctataaggggaagcgcaacctcagttactgggagtcacattgcgatatgattaatggcaccgatgctgcgtccttcccccctttcgtcgagaaatcacaggtgctccagtttttctccagtgacatttgccggtccatatatgcagtgttcgagtccgatgtgaacctaaaaggaatccccgtatatcgctttgttctgcccagcaaggcctttgcctccccagtggagaaccctgataactattgcttctgcacagagaagatcattagtaagaactgcacctcctacggggtattggacatatctaagtgcaaagaagggaggccagtgtacattagcttgcctcattttctgtatgcgtccccagatgtgagcgagcctattgatgggctgaacccaaatgaagaggagcataggacatacctcgacatcgagccaatcactgggtttaccctccaatttgccaagcgtcttcaggtgaatctactggtaaaaccatctgagaagattcaagtgctgaagaatctcaaaagaaattacatagtgccaattctctggttaaatgagaccggaacaataggcgacgaaaaagccaacatgtttagaagtcaagttaccgggaaaatcaatttgctaggacttatcgagatgatcctgttgagtgtaggtgtggtgatgttcgtggcttttatgatatcatattgcgcctgccggagcaaaaccatcaaatag

SEQ ID NO: 108464 - DNA, 1191 bp, Artificial Sequence
  derived and/or modified sequence
atgatgaacagcagcaacatccaggtgaagcagagaggcccctacacctacagagtgagattcctggccaaggagaacgtgacccaggacgccgaggacaacaccgtgagcttcctgcagcccaacggcgccatcttcgagcccagcctgagcgtgggcaccgaggccgacaacttcaccgtgctgaacctggccgtggccgccgccagccacatctaccagaaccagttcgtgcagatgatcctgaacagcctgatcaacaagagcaagagcagcatgttccaggtgagaaccctgagagagctgctgtggggctacagagaccccttcctgagcctggtgccctaccccgtgaccaccaccgtgggcctgttctacccctacaacaacaccgccgacggcgtgtacaaggtgttcaacggcaaggacaacatcagcaaggtggccatcatcgacacctacaagggcaagagaaacctgagctactgggagagccactgcgacatgatcaacggcaccgacgccgccagcttcccccccttcgtggagaagagccaggtgctgcagttcttcagcagcgacatctgcagaagcatctacgccgtgttcgagagcgacgtgaacctgaagggcatccccgtgtacagattcgtgctgcccagcaaggccttcgccagccccgtggagaaccccgacaactactgcttctgcaccgagaagatcatcagcaagaactgcaccagctacggcgtgctggacatcagcaagtgcaaggagggcagacccgtgtacatcagcctgccccacttcctgtacgccagccccgacgtgagcgagcccatcgacggcctgaaccccaacgaggaggagcacagaacctacctggacatcgagcccatcaccggcttcaccctgcagttcgccaagagactgcaggtgaacctgctggtgaagcccagcgagaagatccaggtgctgaagaacctgaagagaaactacatcgtgcccatcctgtggctgaacgagaccggcaccatcggcgacgagaaggccaacatgttcagaagccaggtgaccggcaagatcaacctgctgggcctgatcgagatgatcctgctgagcgtgggcgtggtgatgttcgtggccttcatgatcagctactgcgcctgcagaagcaagaccatcaagtag

SEQ ID NO: 108465 - protein, 416 aa, Artificial Sequence
  derived and/or modified sequence
MELRVGNKYRLGRKIGSGSFGDIYLGANIASGEEVAIKLECVKTKHPQLHIESKFYKMMQGGVGIPSIKWCGAEGDYNVMVMELLGPSLEDLFNFCSRKFSLKTVLLLADQMISRIEYIHSKNFIHRDVKPDNFLMGLGKKGNLVYIIDFGLAKKYRDARTHQHIPYRENKNLTGTARYASINTHLGIEQSRRDDLESLGYVLMYFNLGSLPWQGLKAATKRQKYERISEKKMSTPIEVLCKGYPSEFSTYLNFCRSLRFDDKPDYSYLRQLFRNLFHRQGFSYDYVFDWNMLKFGAARNPEDVDRERREHEREERMGQLRGSATRALPPGPPTGATANRLRSAAEPVASTPASRIQPAGNTSPRAISRVDRERKVSMRLHRGAPANVSSSDLTGRQEVSRIPASQTSVPFDHLGK

SEQ ID NO: 108466 - protein, 119 aa, Artificial Sequence
  derived and/or modified sequence
  misc_feature (1)..(1): Xaa can be any naturally occurring amino acid
XRNPEDVDRERREHEREERMGQLRGSATRALPPGPPTGATANRLRSAAEPVASTPASRIQPAGNTSPRAISRVDRERKVSMRLHRGAPANVSSSDLTGRQEVSRIPASQTSVPFDHLGK

SEQ ID NO: 108467 - protein, 225 aa, Artificial Sequence
  derived and/or modified sequence
MELRVGNKYRLGRKIGSGSFGDIYLGANIASGEEVAIKLECVKTKHPQLHIESKFYKMMQGGVGIPSIKWCGAEGDYNVMVMELLGPSLEDLFNFCSRKFSLKTVLLLADQMISRIEYIHSKNFIHRDVKPDNFLMGLGKKGNLVYIIDFGLAKKYRDARTHQHIPYRENKNLTGTARYASINTHLGIEQSRRDDLESLGYVLMYFNLGSLPWQGLKAATKRQKY

SEQ ID NO: 108468 - protein, 144 aa, Artificial Sequence
  derived and/or modified sequence
  misc_feature (1)..(1): Xaa can be any naturally occurring amino acid
XRNLFHRQGFSYDYVFDWNMLKFGAARNPEDVDRERREHEREERMGQLRGSATRALPPGPPTGATANRLRSAAEPVASTPASRIQPAGNTSPRAISRVDRERKVSMRLHRGAPANVSSSDLTGRQEVSRIPASQTSVPFDHLGK

SEQ ID NO: 108469 - DNA, 1251 bp, Artificial Sequence
  derived and/or modified sequence
atggaactacgggtagggaacaagtatagactgggtagaaagattggttctggctccttcggcgatatatatctgggcgctaacatcgccagcggcgaggaggtggccattaaactggagtgcgtgaagacgaaacacccgcagctccatatcgagagtaaattttacaaaatgatgcaaggcggggtgggaatccctagcatcaagtggtgtggggccgaaggtgattataacgtcatggttatggagctgttgggcccctctctagaggatctgttcaatttctgctctcggaagttctctctgaagaccgttctgctgctagctgatcagatgatttctagaatcgagtacatacacagcaaaaacttcatccacagagacgtgaagcccgataacttcttgatggggctcgggaaaaagggcaacctcgtctacattattgatttcggcttagcgaaaaaataccgcgacgccaggactcatcaacacattccatatcgcgaaaataaaaaccttacaggaactgccaggtatgcctcaataaacactcaccttggcatagaacaaagtaggagggacgatttggagtccctgggctatgttctgatgtacttcaatcttggctcactgccctggcaaggcctcaaagcagccaccaagagacagaaatacgagaggatttccgaaaaaaagatgtcaactcccatcgaagtgctgtgcaagggttacccctccgagttttccacctacctgaatttctgcagatccctgcgtttcgatgacaagcccgactactcatacctccggcagttattccgaaacctgttccaccgtcagggatttagttacgattacgtgttcgactggaacatgctaaagttcggtgctgcgagaaatcctgaggacgtggaccgggagagacgcgaacatgagagagaggagagaatggggcaactcagaggcagcgctactcgtgcgttacccccaggccctcctactggcgccaccgcaaatcgccttaggtctgcagctgagccggttgcatccacccctgctagtcggatccagcctgctgggaacacatccccacgagcaattagccgggttgaccgcgagcgaaaggtgtcgatgcgattacataggggtgcccccgctaacgtgtcatccagcgatttaacaggccggcaagaggtgagcaggataccggctagccagaccagcgtcccctttgaccacctaggtaagtag

SEQ ID NO: 108470 - DNA, 360 bp, Artificial Sequence
  derived and/or modified sequence
taacgcaatcccgaggatgtagatcgcgaaaggcgggagcacgagagggaggaacgcatgggccagctgcgaggatccgcaactagggctctcccaccagggccaccgaccggggctaccgcaaatcgactgcgttctgcggcggaaccagtcgcatcaactcctgccagccggatccagcccgccggcaatacttctccccgggctatttcacgagtagatagggaaaggaaggtgagcatgaggctccacagaggtgccccagcaaatgtatcgtccagtgacctgacaggccgtcaggaagtgtcgcgaattccagctagccaaaccagtgtccccttcgaccacctaggcaagtag

SEQ ID NO: 108471 - DNA, 1251 bp, Artificial Sequence
  derived and/or modified sequence
atggagttgagagtggggaacaagtatcgactagggcggaagattggtagcggttctttcggcgatatatacctcggtgctaatatcgcatctggcgaggaagtggcaattaaactagagtgtgttaaaacaaagcacccccagcttcacatcgagagtaagttttataagatgatgcagggtggggtgggcataccttccattaagtggtgcggggctgaaggcgactataatgtgatggtgatggagctgctaggacccagcttggaggatttgttcaatttttgttctaggaagttctccctcaagaccgttttattattggcagaccagatgatttcaaggatcgagtatatccacagcaaaaacttcatacacagagacgtgaaacctgacaacttcctaatggggctcggcaaaaagggcaatcttgtgtacattatcgatttcggcctcgcgaagaagtaccgggacgcacggacacaccagcatatcccctatcgcgagaacaagaatcttacaggcaccgccagatacgcgagtattaacacacacctggggatcgaacagtcccgaagagacgacttggagagcctgggatatgtcctaatgtattttaatcttggatcattgccttggcaggggctgaaggctgctaccaagaggcagaagtacgagcggattagtgagaagaagatgagcacacctatcgaggtcttatgtaaggggtacccgtccgagttctcaacctatctcaacttctgcagaagtcttcgtttcgatgataaacccgattatagctacttacgccaactgttccggaatctcttccaccggcagggattcagctacgattacgtgttcgattggaacatgctgaaattcggtgccgcaaggaatcccgaggatgtagatcgtgagcgtcgcgagcatgaacgcgaggaaaggatgggacagctgagaggctcagcaacccgtgccctacctcctggtcctcctaccggggctactgcaaacaggttgaggtctgcagccgagccggtcgcttccacccctgcctccaggatacagccagccggcaacacttcacccagagcaatctcccgagtggatagggaacgtaaggtttctatgaggctgcaccggggggcaccagccaacgtttccagcagcgacctgaccggtaggcaggaagtgtcccgtatccctgctagccagacaagtgtgccttttgaccacctaggtaagtag

SEQ ID NO: 108472 - DNA, 1251 bp, Artificial Sequence
  derived and/or modified sequence
atggagctgagggttgggaacaaataccgcttagggcggaaaattggatcgggaagctttggggacatatatctaggagccaacattgcttcaggtgaagaggttgccatcaaactggagtgtgttaagactaagcatccccagctacatattgagtcaaagttttataaaatgatgcagggcggcgtgggtatcccttctatcaaatggtgcggcgctgagggggattacaatgttatggtcatggagcttttgggtccttctctggaagatctattcaatttttgttctagaaagtttagtctgaagaccgtcctgttgctggccgaccagatgattagtcggattgagtatattcatagcaagaactttattcatcgggacgtgaaaccagataactttttgatgggactgggaaagaagggtaacttagtttatattatcgatttcggcttagcgaagaagtatcgggacgctcgaacccaccaacacattccttatcgggagaacaagaatttgacgggcacagctaggtacgcttcaattaacacccacctcggcatagagcagagccggagagatgatctggagtccctaggttacgtactcatgtacttcaatttgggctccctaccttggcagggcctaaaggctgccaccaaaagacagaagtacgaaagaatcagcgaaaaaaagatgagtacccctattgaggttttgtgcaaaggatacccctcggagttctctacgtacctcaatttttgtcgttccctcaggtttgatgacaaacccgactactcataccttcgccagctgttcaggaatctgtttcaccgccagggattttcatacgattatgtgttcgactggaatatgctgaaatttggggctgcacggaacccggaagacgtagaccgagaaaggcgcgaacacgagcgagaggagagaatgggtcagctccgcggaagcgccacaagagcactgcccccaggccctcccacgggagcgacggcaaaccggctgcgcagtgctgctgagcccgtggcctcaaccccagccagcaggatacagccagctggaaacacaagtccacgcgctattagtagagtggatagagagcggaaggtgtccatgagacttcatcgcggcgcaccagcaaacgtgagcagcagcgatctgactggccgccaggaggtatctcgaatcccggcatcccagacctcggtaccttttgatcatctgggcaagtag

SEQ ID NO: 108473 - DNA, 1251 bp, Artificial Sequence
  derived and/or modified sequence
atggaactcagggtcggaaataagtatagattgggacggaagatcgggagcgggtcattcggcgatatctatctgggtgctaatatagcatctggcgaagaggtcgcaattaagctggagtgcgtgaagaccaagcatccgcaactacatattgagtcaaagttttataagatgatgcagggtggggtcggcataccttcaattaagtggtgcggcgccgagggcgattacaacgtgatggtgatggagctgttaggacccagtctcgaagatctcttcaatttttgcagcagaaagttctcactcaagaccgtcctgctcttggccgaccaaatgatttctagaatcgagtacattcattcaaagaactttatccaccgggatgtaaagcctgataatttcctgatgggtctcggcaaaaaagggaacttggtatacatcatcgattttggcctggccaagaaatatcgcgacgctagaacccaccagcacataccatacagggagaacaagaatctcaccggcaccgccagatacgcatccattaacacgcaccttggtatagagcagtcccgacgcgatgatctggagtcactcggctacgtactgatgtattttaacctcgggagcctgccatggcagggactgaaggccgctacgaaacgccagaaatatgagcgtatttctgagaagaagatgtccaccccaattgaggtgttgtgcaaaggatacccttctgagttcagcacttaccttaacttctgccggagcctgcggttcgatgataaacccgactacagctatctgcgccaactattccggaatctttttcatcgtcagggcttctcatacgattatgtctttgactggaatatgctcaagttcggcgccgccagaaatcctgaagatgttgaccgagagagacgggagcatgagagggaggaacggatgggtcaattgaggggttctgccacgcgggcacttcctcctggtcctccaactggggcgactgccaatcggctgagaagcgcagctgaacctgttgcctcaactccagcctctcgtattcaaccggcgggcaatacctccccccgcgctatctctcgtgtggaccgcgaaagaaaagtatctatgaggctgcatcgaggggccccagccaacgtgtcttcttctgaccttacaggcagacaggaagtttcaaggatccctgcttcacagacttcagtgccttttgaccatcttggaaaatag

SEQ ID NO: 108474 - DNA, 1251 bp, Artificial Sequence
  derived and/or modified sequence
atggagttgcgggtgggtaataaataccgtctcgggcgcaagataggtagtgggtcgtttggggatatttatctgggagcaaatatagctagtggcgaagaagttgctattaagctggagtgtgtgaaaaccaagcacccgcaactgcacattgagagtaaattctacaaaatgatgcaaggaggagtcgggattcctagcattaagtggtgtggcgccgaaggagactataatgtgatggttatggagctgctcggtcctagcctagaagacctctttaacttttgtagccgtaagttttctttaaaaaccgtcctcctgctcgccgatcaaatgatttcccggattgaatatattcatagtaaaaactttatccatcgtgacgtcaagccagataattttcttatgggactgggtaagaagggaaacctggtgtatattatcgatttcggccttgctaagaagtatagagacgccaggacacaccagcacatcccctatcgggaaaacaaaaatctgaccggtacagcgcggtacgcttcaatcaatacacacttggggatcgagcagtcgcgaagggatgatttggaaagcctcggatacgtgctgatgtattttaatttggggagtttaccctggcaggggcttaaggctgctaccaagaggcagaagtacgagcgaataagtgagaaaaagatgtctacacccatagaggtgctttgcaaggggtatcccagcgagttcagcacttatctcaatttctgtagaagtctgcggttcgacgacaaacccgattattcatacctacggcagctgttccggaatctgttccaccgtcaggggttctcgtacgattacgtgtttgactggaatatgctaaaatttggagccgcaagaaacccggaagatgttgacagagagaggagggagcatgaacgcgaagaaagaatgggccaattgcggggaagtgctactcgggccctcccgcctggaccgcctactggtgccaccgctaatcgcttgaggagcgcagcagaaccagtcgcttctacccctgcctcacggatacagccagctggcaacacgtctcctcgcgcaatatctcgcgtggatcgggagcgaaaagtatccatgcggctacacaggggtgcacccgccaatgttagcagcagcgatctaaccggacggcaggaggtttcacgtatccccgccagccagaccagcgtgccgtttgaccaccttggaaaatag

SEQ ID NO: 108475 - DNA, 678 bp, Artificial Sequence
  derived and/or modified sequence
atggagctgcgtgtgggcaataaatatcgactaggcagaaagattggaagcggctcctttggtgacatataccttggcgcaaatattgcgtccggtgaagaggtcgccataaagttggaatgcgtgaaaacaaaacatcctcagctccatattgagtctaaattctacaagatgatgcaggggggcgtggggattcctagtataaagtggtgtggggccgagggcgactacaacgtgatggtgatggagctgctaggccccagtttagaggacctgttcaacttttgttctcgcaagttttccctcaagaccgttttgctgctcgccgaccagatgattagccgaatcgagtacatacacagtaaaaactttatccacagagacgttaagcctgacaatttcctgatgggccttgggaaaaaagggaatctggtctatatcatcgatttcggactggcgaagaagtacagagacgccagaacacatcagcacataccatacagggagaacaaaaacctgactggaacagcacgttacgccagcatcaacacccatctaggcatcgagcaatccagaagagacgatttggagagcttaggctacgtccttatgtacttcaacttggggtccctaccttggcaaggactaaaagccgccaccaagcgacagaaatattag

SEQ ID NO: 108476 - DNA, 435 bp, Artificial Sequence
  derived and/or modified sequence
tgaagaaatctcttccacaggcaggggttcagctatgactacgtgttcgattggaatatgctcaagttcggagccgccaggaacccagaagatgtggatcgagagcgacgagagcatgagcgagaggagagaatgggtcaacttcgcggcagtgccacccgggccctaccacccggcccccctacaggggctaccgcgaatcggctgcgtagcgccgccgagcctgttgcgtccacacctgcatcacgcatccaacctgccggaaacactagtccaagggctattagtcgcgtggacagggaaagaaaagttagtatgcggcttcaccgcggcgctcctgctaacgtaagctcctccgacctgactggccgccaggaagtgtcccgcatccccgctagtcagacaagcgtgccttttgatcacctcggcaagtag

SEQ ID NO: 108477 - DNA, 1251 bp, Artificial Sequence
  derived and/or modified sequence
atggagctgcgggtgggcaacaagtaccgcctgggcaggaagattggcagcggcagctttggagacatctacctgggcgccaacatcgccagcggggaggaggtggccatcaagctggagtgtgtgaagaccaagcacccccagctgcacatcgagagcaagttctacaagatgatgcagggcggcgtgggcatccccagcatcaagtggtgtggggctgagggggactacaacgtgatggtgatggagctgctgggccccagcctggaggacctcttcaacttctgcagcaggaagttcagcctgaagacagtgctgctgctggccgaccagatgatcagccgcatcgagtacatccacagcaagaacttcatccacagagatgtgaagccagacaacttcctgatgggcctgggcaagaagggcaacctggtgtacatcatcgactttggcctggccaagaagtacagagatgcccggacccaccagcacatcccctaccgggagaacaagaacctgaccggcacagcccgctatgccagcatcaacacccacctgggcatcgagcagagcagaagagatgacctggagagcctgggctacgtgctgatgtacttcaacctgggcagcctgccctggcagggcctgaaggccgccaccaagaggcagaagtatgagcgcatcagcgagaagaagatgagcacccccatcgaggtgctgtgcaagggctaccccagcgagttcagcacctacctgaacttctgccgcagcctgcgctttgatgacaagccagactacagctacctgcggcagctgttcaggaacctcttccaccggcagggcttctcctatgactatgtgtttgactggaacatgctgaagtttggagctgccagaaatccagaagatgtggaccgggagcggcgggagcacgagcgggaggagaggatgggccagctgcggggcagcgccacccgggccctgcccccaggcccccccaccggggccacagccaaccggctgcggtctgctgctgagcctgtggccagcaccccagccagccgcatccagcctgctggcaacaccagcccccgggccatcagccgggtggaccgggagaggaaggtgtccatgaggctgcacagaggagccccagccaacgtgagcagcagtgacctgaccggccggcaggaggtgagccgcatcccagccagccagacctctgtgccctttgaccacctgggcaagtag

SEQ ID NO: 108478 - DNA, 360 bp, Artificial Sequence
  derived and/or modified sequence
tgaagaaatccagaagatgtggaccgggagcggcgggagcacgagcgggaggagaggatgggccagctgcggggcagcgccacccgggccctgcccccaggccccccaactggagccacagccaaccggctgcggtctgctgctgagcctgtggccagcaccccagccagccgcatccagcctgctggcaacaccagcccccgggccatcagccgggtggaccgggagaggaaggtgtccatgaggctgcacagaggagccccagccaacgtgagcagcagtgacctgaccggccggcaggaggtgagccgcatcccagccagccagacctctgtgccctttgaccacctgggcaagtag

SEQ ID NO: 108479 - DNA, 678 bp, Artificial Sequence
  derived and/or modified sequence
atggagctgcgggtgggcaacaagtaccgcctgggcaggaagattggcagcggcagctttggagacatctacctgggcgccaacatcgccagcggggaggaggtggccatcaagctggagtgtgtgaagaccaagcacccccagctgcacatcgagagcaagttctacaagatgatgcagggcggcgtgggcatccccagcatcaagtggtgtggggctgagggggactacaacgtgatggtgatggagctgctgggccccagcctggaggacctcttcaacttctgcagcaggaagttcagcctgaagacagtgctgctgctggccgaccagatgatcagccgcatcgagtacatccacagcaagaacttcatccacagagatgtgaagccagacaacttcctgatgggcctgggcaagaagggcaacctggtgtacatcatcgactttggcctggccaagaagtacagagatgcccggacccaccagcacatcccctaccgggagaacaagaacctgaccggcacagcccgctatgccagcatcaacacccacctgggcatcgagcagagcagaagagatgacctggagagcctgggctacgtgctgatgtacttcaacctgggcagcctgccctggcagggcctgaaggccgccaccaagaggcagaagtactag

SEQ ID NO: 108480 - DNA, 435 bp, Artificial Sequence
  derived and/or modified sequence
tgaagaaacctcttccaccggcagggcttctcctatgactatgtgtttgactggaacatgctgaagtttggagctgccagaaatccagaagatgtggaccgggagcggcgggagcacgagcgggaggagaggatgggccagctgcggggcagcgccacccgggccctgcccccaggcccccccaccggggccacagccaaccggctgcggtctgctgctgagcctgtggccagcaccccagccagccgcatccagcctgctggcaacaccagcccccgggccatcagccgggtggaccgggagaggaaggtgtccatgaggctgcacagaggagccccagccaacgtgagcagcagtgacctgaccggccggcaggaggtgagccgcatcccagccagccagacctctgtgccctttgaccacctgggcaagtag

SEQ ID NO: 108481 - DNA, 1251 bp, Artificial Sequence
  derived and/or modified sequence
atggagctgcgggtgggcaacaagtaccggctgggccggaagatcggcagcggttctttcggagatatatatctcggcgcaaatattgccagcggagaggaagttgccattaaactagagtgcgtcaagacaaagcaccctcagctgcatatagaatctaagttctataagatgatgcaggggggcgtgggcatcccctccatcaagtggtgcggtgctgaaggtgattataatgtgatggtgatggagcttcttggtccaagcctagaagatttgttcaacttctgcagccggaaattttccctgaagaccgtgctgctgctggcagatcagatgatcagcagaattgaatacattcattcaaagaactttatacaccgtgacgtcaagccagataacttcctgatggggctgggcaagaaaggcaatctcgtgtatataattgatttcggcctggctaagaagtacagggacgcacggacgcaccagcacattccctaccgagaaaataaaaacctcaccggcactgcccgatacgctagcatcaatacacatctgggcatcgagcagtctcgcagggacgacctggagtcacttggctatgtgctgatgtacttcaatctcggctccctgccctggcagggccttaaggccgccaccaaacgacagaagtacgagaggattagcgagaaaaagatgagcacacctattgaagtgctttgcaaaggatatcctagcgagttttcaacttacctgaacttctgccgcagcctcaggtttgacgataaaccggactattcttacttgcgacagttgtttagaaacctgtttcaccggcagggattctcttatgactacgtgtttgactggaatatgctgaaatttggcgcggcaaggaatcctgaagatgtagatcgggaaagaagggagcacgagcgggaggaaaggatgggacaactcagagggtccgcaacaagggccttgccgcccggcccccccacgggggcgaccgccaaccggctgcggtccgcggcggagcccgtcgcgtctactccagcgtcaagaatccaaccagctgggaatacctccccacgtgcaatttcacgtgtggaccgagagagaaaagtaagcatgcgcctccaccgcggcgctccggcaaacgtcagctcttctgacttaactggccggcaggaggtatcacgtatccctgcctcacaaacaagtgtgccatttgaccacctcggcaagtag

SEQ ID NO: 108482 - DNA, 360 bp, Artificial Sequence
  derived and/or modified sequence
tgacggaaccccgaggacgtggaccgggagcggcgggagcacgagcgcgaggaacgaatgggacagctccgcggctccgcgacgagggcactgcctcctgggcctcccacaggagcgacagctaaccgacttcggtctgcagccgagccagtggctagcaccccagccagtcgcatacagcctgccggaaacacctccccgcgcgccatcagccgcgtggatcgcgaaagaaaggtaagcatgcgcctgcaccgaggggcccccgccaacgtgtcttcctctgacttgaccggccgccaggaggtgagccgcatcccagcttcacagacttcagtgccgtttgaccacctgggcaagtag

SEQ ID NO: 108483 - DNA, 1251 bp, Artificial Sequence
  derived and/or modified sequence
atggagctgcgggtgggcaacaagtaccggctgggccggaagatcggatctgggtcctttggagatatctatctgggagccaacatagcctccggggaggaggtcgccataaaattggagtgtgttaaaaccaagcatccccagctccacatagaatcgaaattttataaaatgatgcagggcggggtgggaatcccatcaattaagtggtgcggggctgagggcgactacaatgttatggtcatggaactgctagggccaagcttggaagatctgttcaatttttgctctagaaagttcagcttaaaaaccgtgctgttgctcgctgaccagatgatttctcgcatcgagtatatacactccaagaactttatacaccgcgatgtgaagcctgacaatttcttgatgggtttaggcaagaaaggaaacctcgtgtacattatcgattttggcctggcaaagaaatacagggatgcacgcacccatcaacacatcccatatcgcgagaataaaaatctgacgggcactgcaaggtatgcctccattaacacccatctcgggatagaacagtctcgaagggacgatctcgaaagccttggatacgtgcttatgtactttaatctggggtcactcccctggcaaggactgaaggcggcaactaaaagacagaagtacgaacgcatttccgaaaagaagatgtccacgccgatcgaggtgttatgcaagggctacccgtcagaattctccacctatctgaacttctgtcggtctttacgcttcgacgacaagcccgactactcctacctgcgtcagttattcaggaaccttttccaccggcagggcttctcttatgactatgtcttcgactggaatatgctgaaatttggggcagcgagaaatcccgaggatgtggatcgagagcggagagagcatgagcgagaagaacggatgggacaactgcgaggctcagccacacgagccctgccccctggtccaccaacgggggcaaccgccaatcgcctccgctccgcagccgagccagtcgcctccactccagccagccgcatccagccggctggcaacacctccccacgcgctatttcacgcgtagatagagagagaaaagtgtccatgcgactccaccgtggcgcccctgctaatgtatcttctagcgatctaaccggcaggcaagaagtttcacgtatcccagctagtcagacgtcggtcccttttgatcatctggggaagtag

SEQ ID NO: 108484 - DNA, 1251 bp, Artificial Sequence
  derived and/or modified sequence
atggagctgcgggtgggcaacaagtaccggctgggccggaagatcgggagcggatctttcggtgatatctatctgggtgcaaacatcgcatcgggcgaagaggtagcaataaaattggaatgcgtgaaaaccaagcatccccagctgcatatcgagtcgaagttttataaaatgatgcagggcggcgtcggcatacctagcatcaaatggtgcggagccgagggagattacaacgttatggtcatggagcttctggggccatccctggaagatctatttaatttttgcagcagaaagttttcactgaagactgtcctcctgttagctgatcagatgatatcacgcatcgaatacatccactctaaaaattttattcacagggatgtgaagccagataacttccttatgggccttgggaagaagggtaacttagtgtacattatagacttcggactggcgaagaagtatcgcgatgccaggacgcaccagcatatcccttatcgggaaaacaagaatttaaccggaacggcacgatatgccagtatcaacacccacctggggatcgagcagagcagaagagacgacttggagagtctcggatacgttctgatgtactttaatttaggctcactgccgtggcagggactcaaagccgccactaaaagacagaagtatgaacgcatctcagaaaaaaaaatgagtacaccgattgaagttctgtgcaaagggtacccctcggagtttagtacgtacctcaacttttgtcgctcactcagattcgacgataagcctgactattcatatctcaggcaattatttaggaatctgttccacaggcagggattctcctacgactacgtgttcgattggaatatgcttaagttcggggcagctagaaacccggaagatgtggacagggagagaagagagcatgagcgggaggaacgcatgggccagttacggggaagcgcaacacgggccctgccacccggtccccctactggcgcaaccgcaaaccgcctgcggtctgcagccgagccagttgcatcaactccggcaagccgtattcagccagcgggcaatactagccccagagccatatccagggtggacagagagcgaaaggtcagtatgcgactgcaccgcggagccccagcgaacgttagtagcagtgatctgaccggcagacaggaagttagcagaattccagctagccagacctctgtccctttcgaccacctcggaaagtag

SEQ ID NO: 108485 - DNA, 1251 bp, Artificial Sequence
  derived and/or modified sequence
atggagctgcgggtgggcaacaagtaccggctgggccggaagatcggctccggaagcttcggcgacatatacctaggcgcaaatatcgcttccggcgaagaggtggcgattaaattggaatgtgtcaagactaagcacccccagctgcatattgaatcaaaattctacaagatgatgcagggaggcgtcgggattccttcaatcaaatggtgcggcgctgaaggcgattacaatgtcatggtgatggagcttctggggccatctttagaggacctttttaacttctgctccagaaagttctcattgaagactgttctattgctggcagatcaaatgattagcagaatagaatacatccatagcaagaattttattcatagggacgtcaagccggataactttctaatgggacttgggaaaaagggcaaccttgtgtatattattgattttgggttggccaaaaagtatcgcgacgcccgcacccatcagcatattccctatcgcgagaataaaaacctgaccgggactgcaaggtatgctagtatcaacacccacttgggtattgagcaatcccggcgcgacgacttggagtccttagggtatgtgctcatgtactttaatttgggcagcttgccatggcagggtttaaaagccgcaactaaaagacagaagtacgagcggatttctgaaaaaaaaatgtccacacctatcgaagtgttatgcaaagggtacccaagcgaatttagcacctacctcaacttctgccggagcctgagatttgatgacaagccagattactcgtaccttcgacagctctttcgcaacctcttccataggcagggcttcagctatgattacgttttcgattggaacatgctgaaattcggtgcagcgcggaaccccgaggacgtcgatcgtgagaggagagagcatgaaagggaggaacggatgggtcaactgcggggatccgcaaccagggccctgccacctggaccccccaccggcgcgacagcgaataggttgcgatcagccgctgagccagtggctagcacgcccgcttcccggatacagcctgcaggcaatacttcgcccagggcgataagccgtgtggatagggaacggaaagtgtccatgcgtctgcaccggggggcccccgcgaatgtctccagctctgatcttacaggcaggcaagaagtgagtcgtatacccgcaagccagacctccgtcccatttgaccacctggggaagtag

SEQ ID NO: 108486 - DNA, 1251 bp, Artificial Sequence
  derived and/or modified sequence
atggagctgcgggtgggcaacaagtaccggctgggccggaagatcggctccggatcttttggggacatatacctcggtgcaaatattgcatccggggaagaagtagcaattaaacttgagtgtgtaaaaaccaagcatcctcagctccatattgaatcgaaattttacaaaatgatgcaggggggagtagggatccctagcataaagtggtgcggagccgagggtgattataacgtgatggtcatggaattgcttggaccttctctagaggacctctttaatttttgtagtcgtaaattctctctcaagacggtactcctcctggccgaccagatgatttcacgcattgagtatatccatagcaagaattttattcatcgagatgtaaaacccgacaatttccttatgggacttggcaagaagggaaacctggtgtacatcattgacttcgggctggctaaaaagtaccgcgatgcacggacacaccagcatattccttatagagaaaataagaacctgacaggcacggccaggtatgcctcgatcaacacacacctgggaatagagcagtcaagacgggacgacctagagagtctgggctacgtcctgatgtattttaacttgggctctcttccctggcagggattgaaggctgccaccaaacggcagaaatatgagagaattagtgagaaaaagatgtccacacctattgaggtgctgtgcaaggggtatccaagcgaattttctacttatctgaacttctgtagaagcctgagatttgatgataaaccggactactcatatctccgccagctgtttcggaacttgtttcatagacagggattttcatacgactatgttttcgactggaacatgctcaagtttggagcggcccgcaatcccgaggatgtggaccgtgaacggagagagcatgaaagagaggaaagaatgggacagttaagaggctcagccacccgcgcactccctcccggccctccaaccggagcaaccgccaatagacttcggagcgccgccgagccagtggcttccacccccgcctccagaatccagcctgccggcaacacaagtccacgcgctataagcagagtggaccgcgagcgtaaagtcagtatgcgacttcatcgaggggcccctgccaatgttagttcttctgacctcacaggaagacaagaagtttcgaggattccggcatctcagacctcagtcccttttgatcacctagggaagtag

SEQ ID NO: 108487 - DNA, 678 bp, Artificial Sequence
  derived and/or modified sequence
atggagctgcgggtgggcaacaagtaccggctgggccggaagatcggctcgggatcgttcggggacatttacctgggcgccaatatcgccagcggcgaggaagtggcaattaaactcgagtgtgtaaaaaccaaacacccacagttacacatcgagtcgaaattttataagatgatgcagggtggcgtaggaataccgtcaattaaatggtgcggggctgagggcgattacaacgtcatggtgatggagctcttaggccccagcctggaggaccttttcaatttctgttcgagaaaatttagcctgaagacagtgctgctgttagcggatcagatgatttctagaatagagtatatccattcaaaaaacttcatccacagagacgtgaaacctgacaactttctcatggggctcggaaaaaaagggaacctggtctatattatcgacttcggtctggccaaaaagtacagagatgctcgcactcaccagcatatcccgtatagggagaataagaacctaaccggaaccgctcgctatgccagcattaatacacacctgggtattgagcagtcaagaagagacgatctagagtctctgggctacgtgttgatgtattttaacctcggttcactgccttggcaagggctgaaggcagccaccaagaggcagaagtactag

SEQ ID NO: 108488 - DNA, 435 bp, Artificial Sequence
  derived and/or modified sequence
tgacggaacctgttccaccggcagggcttcagctacgactacgtgtttgactggaatatgctgaagtttggcgctgccagaaaccccgaagacgtggatcgggagcggagggagcacgaaagggaggaaagaatgggccagcttcgcggtagtgcaaccagggccctgccgcccgggccacctacaggcgcaacagcgaaccgattacgttcagccgccgagcccgtggcaagtacacctgcctccagaatccagccagcaggcaacacatccccccgagccatctctcgtgtggatcgggagaggaaggtctctatgcgactgcaccgcggggctcctgcaaacgtttctagctccgacctgacaggtcggcaggaagtatcccgcattccagcctcacagacttcagtccctttcgaccacttgggaaagtag

SEQ ID NO: 108489 - DNA, 1251 bp, Artificial Sequence
  derived and/or modified sequence
atggagctacgcgtgggcaacaagtacaggcttggccgtaaaatcgggagtggctcctttggggatatctatcttggggcaaacatcgcctctggtgaggaggtagccatcaaactggaatgcgtgaagactaaacatcctcagctccacatcgaatctaagttctacaaaatgatgcaagggggtgtaggtatcccgtccattaaatggtgtggcgcagaaggtgattacaacgtgatggtcatggaactactgggaccctcccttgaagacttgtttaacttctgcagccgcaagtttagcctaaagactgtactgctgctcgcagatcagatgatctcacggattgagtacatccacagtaaaaattttatccatcgcgacgtgaagcctgataatttccttatggggctgggaaagaaaggtaatttggtatacattattgatttcgggctcgcaaagaaatacagggacgccagaactcaccaacacattccatacagggagaacaagaacctgaccggcacagcacgttacgcttcaatcaatacgcacctgggaattgagcagtcaaggcgagatgacctagaatccctcggttatgtcctaatgtactttaacctgggttcattaccctggcaggggctgaaggctgctaccaagcgacaaaagtatgaaagaatcagtgaaaagaaaatgagcactccaatcgaggtgctgtgcaagggatacccgtccgaattctctacctatcttaatttctgcagatctttgcgcttcgacgacaagcccgattacagttatctaagacaactgtttaggaatttgtttcacagacagggtttctcttacgactacgtgtttgactggaacatgctgaagttcggagccgctcggaacccagaagacgtcgatcgggagcgcagagagcatgaaagggaagaaagaatgggccagcttagaggcagcgcaacaagggctttacccccaggccctcctacaggcgctacagccaacaggcttcgcagcgccgctgagccagtcgcatcgacacccgcaagtcgaatacaacctgctggtaatacctctcctcgtgctatatccagggtagacagagaacggaaggtcagcatgcggttgcatagaggtgcccctgccaatgtgtcttcctctgatctgacaggacgccaggaggtctctcgaatcccggcatcccagacaagcgtgccatttgaccacctcgggaagtag

SEQ ID NO: 108490 - DNA, 360 bp, Artificial Sequence
  derived and/or modified sequence
tgacgaaatcccgaggacgttgacagagaaagacgtgagcacgagcgcgaggagaggatgggccagttgagaggatctgccaccagagctttacctcctggccctcctactggcgcaacagcaaatcggctgaggtcagctgccgagcccgtggcttcaaccccggcttcacgcattcaacccgcaggaaatactagcccacgcgcaataagtcgcgtagatagagagaggaaggtgtcgatgcgcctacaccgaggcgctcctgcaaacgtgtcctccagcgatttgaccgggagacaggaggtcagcaggatccccgcttcccagaccagcgtaccatttgaccacctcggtaagtag

SEQ ID NO: 108491 - DNA, 1251 bp, Artificial Sequence
  derived and/or modified sequence
atggaactcagagtgggcaataaatataggttaggccgtaagattggctccggctcttttggtgacatttatctgggcgcaaatatagcctccggcgaagaggtcgcaattaagcttgagtgcgtaaagactaagcacccccagctgcatattgagagtaagttttacaagatgatgcagggcggagttggaattcccagcattaagtggtgcggcgctgagggggactacaatgtgatggtgatggagctcctcggcccatctctggaagacctcttcaacttttgctctcgcaagtttagcctcaagactgtcctcctcctcgctgaccagatgatatctcgaattgagtatattcactcaaaaaacttcattcatcgagacgtaaaaccggacaattttttgatgggcctcggcaagaaggggaatctcgtatatatcatcgacttcggactggcaaaaaagtaccgcgacgccagaacccaccagcacattccgtacagggagaacaagaacctaactggaacagcccgatacgcctctattaatacacacctagggatagagcagagccggcgagacgacctggagtctcttggctacgtattaatgtactttaatctgggctcactgccttggcaggggttgaaagcagcaacaaagcggcaaaagtatgagaggatcagcgagaagaaaatgagcacacctatcgaagttctatgcaagggatacccttccgagttttccacgtacttgaacttttgcaggtcgcttcggtttgacgataagccagactattcctacttgcgccagctcttcaggaacctgttccaccgacagggattttcttacgactatgtattcgactggaacatgctgaagtttggcgctgcaaggaatccagaggacgtggacagggagaggcgggagcacgagagagaagagagaatgggtcaactccgtggcagcgccacgcgcgctttgcccccaggcccacccacaggagctacagctaatcgcctcaggagcgctgcggaacccgtggcatccacgcctgcatctcggatccagcctgcagggaacacttctccacgcgctataagccgggtagacagggaaagaaaagtgtctatgcggcttcaccgaggtgccccagcaaatgtttctagttctgatcttactggaaggcaggaagtgtccaggatcccagcttcccaaacctctgtgccctttgatcatctggggaagtag

SEQ ID NO: 108492 - DNA, 1251 bp, Artificial Sequence
  derived and/or modified sequence
atggagttgcgggtaggcaataaataccgactgggccgaaagattgggtctggctcttttggagatatctaccttggcgctaacatagcgagtggcgaggaggtggctatcaaactggaatgtgtaaagacgaagcacccacaacttcacatagagtccaaattctataaaatgatgcagggaggcgtcggcataccatcgataaaatggtgcggcgcagagggcgattacaacgtgatggtaatggaactgctaggtccgtctcttgaggatcttttcaatttttgctccaggaaattctccttgaaaaccgtgctcctgctggctgaccagatgatctctcgcattgagtacatacacagcaaaaacttcatacaccgagatgtgaagcccgacaactttctcatgggcctgggcaagaaggggaatctcgtgtacattatcgacttcgggttggcaaaaaaataccgcgatgcacgtacccatcagcacataccctatcgggaaaacaaaaacctgactggaactgctaggtacgccagcattaacactcacctggggattgagcagagcaggagagacgacctggagtcccttggctacgtcctgatgtactttaacctgggctcattgccttggcagggtctgaaagccgctactaagcgccagaagtacgaaagaattagcgagaagaagatgtctacaccaattgaggtgctgtgtaaagggtatcccagtgaattttcaacttacctgaacttctgtcgaagtctccggtttgacgacaagcccgattacagctatctgcgacagctttttaggaacctgttccataggcaggggtttagttacgactacgtgttcgactggaatatgctgaaatttggcgctgccaggaaccccgaagatgtggacagggagcggagggagcacgagcgtgaagaaaggatgggccagctccggggatccgcaacaagagccttacctcctggaccccctactggagctacggccaatagactcaggagcgcagccgaacctgtggcgtctacgccagcgtcgcgtatccaacctgcaggaaacacgtctcctcgagcaatctcccgcgtggatcgggagagaaaggtgtccatgcgcctccaccggggtgcaccagccaacgtgtctagttcggatcttactggccgtcaggaagtaagtagaatcccggcttcgcagaccagcgtgcccttcgatcaccttggcaagtag

SEQ ID NO: 108493 - DNA, 1251 bp, Artificial Sequence
  derived and/or modified sequence
atggaactgcgcgtcggaaacaagtataggctgggcagaaagattgggtctggatccttcggggatatttacctgggcgcaaatattgccagtggtgaggaagttgcaatcaagctcgaatgcgtcaaaacaaaacaccctcagctgcacattgagtccaaattttacaaaatgatgcaaggaggtgtgggaatcccttccatcaagtggtgcggagccgagggtgactataatgtgatggtgatggagcttctcggacccagcttagaagacctgttcaacttttgctcccgcaagtttagtctaaagacagtgctgctcctggctgatcagatgatcagtaggattgagtacattcactccaaaaatttcatccaccgggatgtcaagccagacaacttcctgatggggttgggaaagaaaggcaacctggtttatatcatcgatttcggactggctaagaaatatagggatgctcgaacacatcagcacataccatatagggaaaataaaaatttaaccggtacagctcgctacgcatctattaatacacatctagggattgaacagagtcgcagagacgacctcgaatcactgggctacgtgctcatgtacttcaatctgggcagtcttccctggcaaggactgaaggcggctactaaaaggcagaagtatgaacggatctctgagaaaaagatgagcacacccatagaggttctatgtaaaggctatccaagtgagtttagtacgtacctgaatttttgcaggtcactgaggtttgatgataagcctgactattcctatcttcggcaactttttcgaaacctgtttcaccgccaagggtttagttacgattatgttttcgactggaatatgctcaagttcggggctgctcgcaaccccgaggacgtggatagggagaggagggagcacgagagagaagaaagaatgggccagctgcgcggatcagccacccgagcactaccccctgggcctccgaccggagcaaccgccaatcggctacggagcgccgcagagcccgttgcctctacgcccgcttcacgtatccaaccggctgggaacacttctcccagagccataagcagagtggatagagaacgaaaggtgagtatgcgcctgcaccgaggagcacctgcaaatgtttcgtcttccgaccttaccggtagacaggaggtgtcccgtataccagcgagtcaaacaagcgtacccttcgaccacctgggaaagtag

SEQ ID NO: 108494 - DNA, 1251 bp, Artificial Sequence
  derived and/or modified sequence
atggagttacgggttggcaacaaatatcggctagggaggaagatcggctcaggaagctttggggatatatacttgggagccaatatagccagtggtgaggaggtggccatcaagcttgagtgcgtgaagacgaagcacccgcagctgcacattgagtctaaattttataaaatgatgcagggcggagtcggcattcccagcatcaagtggtgcggcgctgagggagactacaacgtgatggtgatggagctgctcggaccgtccttagaagatttgtttaacttttgctcacggaagttctccctcaagaccgtactccttctagctgatcagatgatctcaaggattgagtacatacacagcaagaatttcatccatagagacgtgaaacccgacaatttcctgatggggcttggaaagaaagggaacttagtgtatatcatcgacttcggtctcgcgaagaaatacagagatgcacggacccaccaacacataccatatcgcgaaaacaagaaccttactggtaccgccagatacgctagcataaacacacatctggggattgaacagagccggcgagacgatctggagagcctcggatatgtcctaatgtattttaaccttgggtcactgccgtggcagggtctgaaggccgcaacaaaaaggcagaaatatgagcgcatctctgaaaaaaaaatgagcactcctatagaagtcttgtgcaaagggtacccatccgaattctccacctacctcaatttttgcaggagtctgagatttgacgataaacccgactattcttacttaaggcagctgttcagaaatttgtttcaccggcaaggattctcatatgactacgtgttcgattggaacatgttgaagtttggtgccgctcgaaaccccgaagacgtggacagagagcgcagagagcacgagcgcgaggagaggatgggccagctccgtggcagcgccaccagggctctacctcccggtcccccaactggagccaccgcgaacaggctgaggtctgccgctgagccagtcgcctctactcccgcttcgcgtattcaaccagccggaaatacaagcccgcgagctattagccgtgttgatcgcgagagaaaggtcagcatgcgcctgcatagaggggcacccgctaacgtgagctctagtgaccttacaggccgacaagaggtgtcacggatcccagcgtctcagaccagcgtcccgttcgaccacttggggaagtag

SEQ ID NO: 108495 - DNA, 678 bp, Artificial Sequence
  derived and/or modified sequence
atggaattgcgagtaggcaacaaataccggctcgggaggaaaatcggatcgggatctttcggcgacatctaccttggcgcaaacatagcctccggagaggaggtcgccattaaactggaatgtgtgaagacaaaacacccccaactccacattgagagtaagttctacaagatgatgcagggcggagtgggtattccctctattaagtggtgtggagccgagggagattataacgtgatggtgatggagctgctgggcccttcccttgaggacctgttcaacttttgtagccgaaagttctccctgaaaacagtgctcttgctggctgatcagatgatcagccggatagagtacatacacagcaagaatttcatccacagagatgtcaagcctgataacttccttatgggactagggaagaagggcaacctggtgtacattatcgacttcggactggccaaaaaatatcgggatgcgagaacccatcaacatattccgtacagggagaacaagaacctgacaggaactgcaagatacgcaagcataaacacccacttagggattgagcagagtaggagagacgatctagagtcattggggtacgtgttaatgtattttaacctggggagtctgccatggcagggactaaaagctgcaactaagaggcagaagtattag

SEQ ID NO: 108496 - DNA, 435 bp, Artificial Sequence
  derived and/or modified sequence
tgacgtaacctctttcaccgacaaggattttcctacgattacgtgttcgattggaacatgctgaagttcggcgctgctaggaaccccgaggacgtcgaccgtgagcgaagggagcatgaaagagaggagaggatgggccagctaagagggagcgctactcgcgcactgcctccagggcctcctaccggggctacagccaaccggttacgaagtgccgctgagccagtggcatctacccccgcatcacgaattcaacccgcaggaaacacaagccctagggctatcagcagagtggaccgggagcggaaagtgtcaatgaggctacatagaggtgctccagcaaatgtgagctcatccgatcttacaggcaggcaagaagtgtcacggataccagctagccaaacctccgtcccttttgaccatttaggaaagtag

SEQ ID NO: 108497 - DNA, 2642 bp, Artificial Sequence
  derived and/or modified sequence
ggttgggatctgaggggtcctctctgtgcccatcacagtttgagcttcagggaaaagaagaagaggtctttgcccttcgtttttccacgggaggagaatcaagagtgagccatggagctacgtgtggggaacaagtaccgcctgggacggaagatcgggagcgggtccttcggagatatctacctgggtgccaacatcgcctctggtgaggaagtcgccatcaagctggagtgtgtgaagacaaagcacccccagctgcacatcgagagcaagttctacaagatgatgcagggtggcgtggggatcccgtccatcaagtggtgcggagctgagggcgactacaacgtgatggtcatggagctgctggggcctagcctcgaggacctgttcaacttctgttcccgcaaattcagcctcaagacggtgctgctcttggccgaccagatgatcagccgcatcgagtatatccactccaagaacttcatccaccgggacgtcaagcccgacaacttcctcatggggctggggaagaagggcaacctggtctacatcatcgacttcggcctggccaagaagtaccgggacgcccgcacccaccagcacattccctaccgggaaaacaagaacctgaccggcacggcccgctacgcttccatcaacacgcacctgggcattgagcaaagccgtcgagatgacctggagagcctgggctacgtgctcatgtacttcaacctgggctccctgccctggcaggggctcaaagcagccaccaagcgccagaagtatgaacggatcagcgagaagaagatgtcaacgcccatcgaggtcctctgcaaaggctatccctccgaattctcaacatacctcaacttctgccgctccctgcggtttgacgacaagcccgactactcttacctacgtcagctcttccgcaacctcttccaccggcagggcttctcctatgactacgtctttgactggaacatgctgaaattcggtgcagcccggaatcccgaggatgtggaccgggagcggcgagaacacgaacgcgaggagaggatggggcagctacgggggtccgcgacccgagccctgccccctggcccacccacgggggccactgccaaccggctccgcagtgccgccgagcccgtggcttccacgccagcctcccgcatccagccggctggcaatacttctcccagagcgatctcgcgggtcgaccgggagaggaaggtgagtatgaggctgcacaggggtgcgcccgccaacgtctcctcctcagacctcactgggcggcaagaggtctcccggatcccagcctcacagacaagtgtgccatttgaccatctcgggaagtgaggagagcccccattggaccagtgtttgcttagtgtcttcactgtattttctttaaaaaaaaaaaaaaaaaaaaaaaggcaaaaataaaccactcaaaagaacaacaaaaaaacccagcacaaaaccgacgatggagtttgtttctttgatttctttgccaatggcaagaagatgagatgccctcagcactgaggattcttgcccccttgtggtgcccgctgcccccaaccttcaggctgccagatgctcccctgacaacaccaggctacaggagccagacgccagggcctgcccggcctcctgttcctgcccccacccaccacctgcctggagaggaacgggtcgggtccgtgtcggagaagtgacaggtcccagagccaaagccggccctcaagcatcatcagggagtggtgtagtcagttgaaggcagttcccaccgagttttccgagcctcagaatccaggagatacgcacagccccacccactctgagatgacagtggctgacttcccgtgctgggcttttccattgtccccctggcctccaggctcctcctctgcctctccatggagtgggtggggaggtggtgggggccggcgtcccctgcgtgtgtgtgtgtgtgtgtgtgtgtggatgtattgacctgtgtttcccaagacagcaggtgccacggcccgccccgcctgccagcccgaattcccgttctcctgtgtctactaacaaggacatgggggtgggcggtgacctccgcatccctcagagctcagagggtcctcgctgccaccggtccccccctagcccgtcatcagccggtggcagctccatcttccattcctggttttagggcagaatccatggagactgcttccagaaggcatctggctctgagttataaattacttccctggtcctgacagtcacctggggtcccccctctccctggttccacctttctgaggaggagcctggagtcagggctgggttttggattaacccatccttcctagttaacacctttttgtttttattttattttatttttgtttgttttctccgtgtgtgtgttttcctaatttatttacctctgtttcccctttttcctttttttttttaattaaagagcaaagctttttattactttgtaatttaaaaaactgaaaaaaaaaaaactgaagaactttggggggaattttgtacttttttcctgtgtaaatattggacttttttgagctttatcgtggttgttaatttgaagtaataaagtagaaaagataaagtga

SEQ ID NO: 108498 - DNA, 1005 bp, Artificial Sequence
  derived and/or modified sequence
cccggaatcccgaggatgtggaccgggagcggcgagaacacgaacgcgaggagaggatggggcagctacgggggtccgcgacccgagccctgccccctggcccacccacgggggccactgccaaccggctccgcagtgccgccgagcccgtggcttccacgccagcctcccgcatccagccggctggcaatacttctcccagagcgatctcgcgggtcgaccgggagaggaaggtgagtatgaggctgcacaggggtgcgcccgccaacgtctcctcctcagacctcactgggcggcaagaggtctcccggatcccagcctcacagacaagtgtgccatttgaccatctcgggaagtgaggagagcccccattggaccagtgtttgcttagaaattcatccacacaagagagtggaggcatgaacagggctggccttcctcggatctcaggcccaggaaccaagctgtccatggcgggctgggcagatatttgggggtggggtggggagatgctcaccaggagggcagagaagggagagaatccgtttctgtcacatgaagatggatctcctagcgtgctgggccttgagccaggctctggggcccagagggagatagaccaagggacgagaagacaggagtttggggggccaagtgcagtggctcgcacctgtaatcccagcacttcgggaggcccagacaggtgggtcacttgaggtcaggagttcgagaccagcctggccaacatggtgaaaacccatctctactaaaaacacaaaaattagccgggtgtggtggcacacacctgtaatctcagctactcgggacgctgagacaggagaattgcttgaatctgggaggtggaggttgcagtgagccgagatcgtgccactgcactccagcctgggggacagagcgagactccatctcaaaaaaaaaaaaaagtagccagagacagctgtgtacctcacctgtcttttcccttctcccttctagtgtcttcac

SEQ ID NO: 108499 - DNA, 2791 bp, Artificial Sequence
  derived and/or modified sequence
gcgggcgggcgggcaggaggccgggaggagggaggcggcggcggcggcggcggcggcggcgagagcccagagccagagcccggccggggccgagcggagcgcggcggcggcggcggcggcggcggctgggccgggagaggctggcgcgccgggcggctccgcgaatcctccggcatccgccccggcgggccgcccccgcccgcggcagccccccgagcagtggcccggcatcggcgccttcccggcgggcaagagtgagccatggagctacgtgtggggaacaagtaccgcctgggacggaagatcgggagcgggtccttcggagatatctacctgggtgccaacatcgcctctggtgaggaagtcgccatcaagctggagtgtgtgaagacaaagcacccccagctgcacatcgagagcaagttctacaagatgatgcagggtggcgtggggatcccgtccatcaagtggtgcggagctgagggcgactacaacgtgatggtcatggagctgctggggcctagcctcgaggacctgttcaacttctgttcccgcaaattcagcctcaagacggtgctgctcttggccgaccagatgatcagccgcatcgagtatatccactccaagaacttcatccaccgggacgtcaagcccgacaacttcctcatggggctggggaagaagggcaacctggtctacatcatcgacttcggcctggccaagaagtaccgggacgcccgcacccaccagcacattccctaccgggaaaacaagaacctgaccggcacggcccgctacgcttccatcaacacgcacctgggcattgagcaaagccgtcgagatgacctggagagcctgggctacgtgctcatgtacttcaacctgggctccctgccctggcaggggctcaaagcagccaccaagcgccagaagtatgaacggatcagcgagaagaagatgtcaacgcccatcgaggtcctctgcaaaggctatccctccgaattctcaacatacctcaacttctgccgctccctgcggtttgacgacaagcccgactactcttacctacgtcagctcttccgcaacctcttccaccggcagggcttctcctatgactacgtctttgactggaacatgctgaaattcggtgcagcccggaatcccgaggatgtggaccgggagcggcgagaacacgaacgcgaggagaggatggggcagctacgggggtccgcgacccgagccctgccccctggcccacccacgggggccactgccaaccggctccgcagtgccgccgagcccgtggcttccacgccagcctcccgcatccagccggctggcaatacttctcccagagcgatctcgcgggtcgaccgggagaggaaggtgagtatgaggctgcacaggggtgcgcccgccaacgtctcctcctcagacctcactgggcggcaagaggtctcccggatcccagcctcacagacaagtgtgccatttgaccatctcgggaagtgaggagagcccccattggaccagtgtttgcttagtgtcttcactgtattttctttaaaaaaaaaaaaaaaaaaaaaaaggcaaaaataaaccactcaaaagaacaacaaaaaaacccagcacaaaaccgacgatggagtttgtttctttgatttctttgccaatggcaagaagatgagatgccctcagcactgaggattcttgcccccttgtggtgcccgctgcccccaaccttcaggctgccagatgctcccctgacaacaccaggctacaggagccagacgccagggcctgcccggcctcctgttcctgcccccacccaccacctgcctggagaggaacgggtcgggtccgtgtcggagaagtgacaggtcccagagccaaagccggccctcaagcatcatcagggagtggtgtagtcagttgaaggcagttcccaccgagttttccgagcctcagaatccaggagatacgcacagccccacccactctgagatgacagtggctgacttcccgtgctgggcttttccattgtccccctggcctccaggctcctcctctgcctctccatggagtgggtggggaggtggtgggggccggcgtcccctgcgtgtgtgtgtgtgtgtgtgtgtgtggatgtattgacctgtgtttcccaagacagcaggtgccacggcccgccccgcctgccagcccgaattcccgttctcctgtgtctactaacaaggacatgggggtgggcggtgacctccgcatccctcagagctcagagggtcctcgctgccaccggtccccccctagcccgtcatcagccggtggcagctccatcttccattcctggttttagggcagaatccatggagactgcttccagaaggcatctggctctgagttataaattacttccctggtcctgacagtcacctggggtcccccctctccctggttccacctttctgaggaggagcctggagtcagggctgggttttggattaacccatccttcctagttaacacctttttgtttttattttattttatttttgtttgttttctccgtgtgtgtgttttcctaatttatttacctctgtttcccctttttcctttttttttttaattaaagagcaaagctttttattactttgtaatttaaaaaactgaaaaaaaaaaaactgaagaactttggggggaattttgtacttttttcctgtgtaaatattggacttttttgagctttatcgtggttgttaatttgaagtaataaagtagaaaagataaagtg

SEQ ID NO: 108500 - DNA, 2321 bp, Artificial Sequence
  derived and/or modified sequence
ctttcaaacccggccggcccgagtggagtcagctcagtcccggcagccgccgcgcgaggaaatggccgaggggccggagccacagtccacagacaaacgaatttaaaggagcaaccgaggaggcacctgcgaaagaaagcccacacacaggtgaatttaaaggagcagccctggtgtcacctatcagtaaaagactatttggagttttcctcgtcttactggatgtcactctcgtccttgccgacctaattttcactgacagcaaactttatattcctttggagtatcgttctatttctctagctattgccttattttttctcatggatgttcttcttcgagtatttgtagaagggtgttggagcgggccggagagaagtagagtgggctgcgaggagaaggaaacaggcctttcggaggctcctcatccctcggaggtcatcccttactccagcaagagtgagccatggagctacgtgtggggaacaagtaccgcctgggacggaagatcgggagcgggtccttcggagatatctacctgggtgccaacatcgcctctggtgaggaagtcgccatcaagctggagtgtgtgaagacaaagcacccccagctgcacatcgagagcaagttctacaagatgatgcagggtggcgtggggatcccgtccatcaagtggtgcggagctgagggcgactacaacgtgatggtcatggagctgctggggcctagcctcgaggacctgttcaacttctgttcccgcaaattcagcctcaagacggtgctgctcttggccgaccagatgatcagccgcatcgagtatatccactccaagaacttcatccaccgggacgtcaagcccgacaacttcctcatggggctggggaagaagggcaacctggtctacatcatcgacttcggcctggccaagaagtaccgggacgcccgcacccaccagcacattccctaccgggaaaacaagaacctgaccggcacggcccgctacgcttccatcaacacgcacctgggcattgagcaaagccgtcgagatgacctggagagcctgggctacgtgctcatgtacttcaacctgggctccctgccctggcaggggctcaaagcagccaccaagcgccagaagtatgaacggatcagcgagaagaagatgtcaacgcccatcgaggtcctctgcaaaggctatccctccgaattctcaacatacctcaacttctgccgctccctgcggtttgacgacaagcccgactactcttacctacgtcagctcttccgcaacctcttccaccggcagggcttctcctatgactacgtctttgactggaacatgctgaaattcggtgcagcccggaatcccgaggatgtggaccgggagcggcgagaacacgaacgcgaggagaggatggggcagctacgggggtccgcgacccgagccctgccccctggcccacccacgggggccactgccaaccggctccgcagtgccgccgagcccgtggcttccacgccagcctcccgcatccagccggctggcaatacttctcccagagcgatctcgcgggtcgaccgggagaggaaggtgagtatgaggctgcacaggggtgcgcccgccaacgtctcctcctcagacctcactgggcggcaagaggtctcccggatcccagcctcacagacaagtgtgccatttgaccatctcgggaagtgaggagagcccccattggaccagtgtttgcttagtgtcttcactgtattttctttaaaaaaaaaaaaaaaaaaaaaaaggcaaaaataaaccactcaaaagaacaacaaaaaaacccagcacaaaaccgacgatggagtttgtttctttgatttctttgccaatggcaagaagatgagatgccctcagcactgaggattcttgcccccttgtggtgcccgctgcccccaaccttcaggctgccagatgctcccctgacaacaccaggctacaggagccagacgccagggcctgcccggcctcctgttcctgcccccacccaccacctgcctggagaggaacgggtcgggtccgtgtcggagaagtgacaggtcccagagccaaagccggccctcaagcatcatcagggagtggtgtagtcagttgaaggcagttcccaccgagttttccgagcctcagaatccaggagatacgcacagccccacccactctgagatgacagtggctgacttcccgtgctgggcttttccattgtccccctggcctccaggctcctcctctgcctctccatggagtgggtggggaggtggtgggggccggcgtcccc

SEQ ID NO: 108501 - DNA, 2048 bp, Artificial Sequence
  derived and/or modified sequence
tccggcatccgccccggcgggccgcccccgcccgcggcagccccccgagcagtggcccggcatcggcgccttcccggcgggcaagagtgagccatggagctacgtgtggggaacaagtaccgcctgggacggaagatcgggagcgggtccttcggagatatctacctgggtgccaacatcgcctctggtgaggaagtcgccatcaagctggagtgtgtgaagacaaagcacccccagctgcacatcgagagcaagttctacaagatgatgcagggtggcgtggggatcccgtccatcaagtggtgcggagctgagggcgactacaacgtgatggtcatggagctgctggggcctagcctcgaggacctgttcaacttctgttcccgcaaattcagcctcaagacggtgctgctcttggccgaccagatgatcagccgcatcgagtatatccactccaagaacttcatccaccgggacgtcaagcccgacaacttcctcatggggctggggaagaagggcaacctggtctacatcatcgacttcggcctggccaagaagtaccgggacgcccgcacccaccagcacattccctaccgggaaaacaagaacctgaccggcacggcccgctacgcttccatcaacacgcacctgggcattgagcaaagccgtcgagatgacctggagagcctgggctacgtgctcatgtacttcaacctgggctccctgccctggcaggggctcaaagcagccaccaagcgccagaagtatgaacggatcagcgagaagaagatgtcaacgcccatcgaggtcctctgcaaaggctatccctccgaattctcaacatacctcaacttctgccgctccctgcggtttgacgacaagcccgactactcttacctacgtcagctcttccgcaacctcttccaccggcagggcttctcctatgactacgtctttgactggaacatgctgaaattcggtgcagcccggaatcccgaggatgtggaccgggagcggcgagaacacgaacgcgaggagaggatggggcagctacgggggtccgcgacccgagccctgccccctggcccacccacgggggccactgccaaccggctccgcagtgccgccgagcccgtggcttccacgccagcctcccgcatccagccggctggcaatacttctcccagagcgatctcgcgggtcgaccgggagaggaaggtgagtatgaggctgcacaggggtgcgcccgccaacgtctcctcctcagacctcactgggcggcaagaggtctcccggatcccagcctcacagacaagtgtgccatttgaccatctcgggaagtgaggagagcccccattggaccagtgtttgcttagtgtcttcactgtattttctttaaaaaaaaaaaaaaaaaaaaaaaggcaaaaataaaccactcaaaagaacaacaaaaaaacccagcacaaaaccgacgatggagtttgtttctttgatttctttgccaatggcaagaagatgagatgccctcagcactgaggattcttgcccccttgtggtgcccgctgcccccaaccttcaggctgccagatgctcccctgacaacaccaggctacaggagccagacgccagggcctgcccggcctcctgttcctgcccccacccaccacctgcctggagaggaacgggtcgggtccgtgtcggagaagtgacaggtcccagagccaaagccggccctcaagcatcatcagggagtggtgtagtcagttgaaggcagttcccaccgagttttccgagcctcagaatccaggagatacgcacagccccacccactctgagatgacagtggctgacttcccgtgctgggcttttccattgaggagcctggagtcagggctgggttttggattaacccatccttcctagttaacacctttttgtttttattttattttatttttgtttgttttctccgtgtgtgtgttttcctaatttatttacctctgtttcccctttttcctttttttttttaattaaagagcaaagctttt

SEQ ID NO: 108502 - DNA, 1580 bp, Artificial Sequence
  derived and/or modified sequence
cggtgcgagagcgcgcgagccggcggcgggggcgggcgggcgggcaggaggccgggaggagggaggcggcggcggcggcggcggcggcggcgagagcccagagccagagcccggccggggccgagcggagcgcggcggcggcggcggcggcggcggctgggccgggagaggctggcgcgccgggcggctccgcgaatcctccggcatccgccccggcgggccgcccccgcccgcggcagccccccgagcagtggcccggcatcggcgccttcccggcgggcaagagtgagccatggagctacgtgtggggaacaagtaccgcctgggacggaagatcgggagcgggtccttcggagatatctacctgggtgccaacatcgcctctggtgaggaagtcgccatcaagctggagtgtgtgaagacaaagcacccccagctgcacatcgagagcaagttctacaagatgatgcagggtggcgtggggatcccgtccatcaagtggtgcggagctgagggcgactacaacgtgatggtcatggagctgctggggcctagcctcgaggacctgttcaacttctgttcccgcaaattcagcctcaagacggtgctgctcttggccgaccagatgatcagccgcatcgagtatatccactccaagaacttcatccaccgggacgtcaagcccgacaacttcctcatggggctggggaagaagggcaacctggtctacatcatcgacttcggcctggccaagaagtaccgggacgcccgcacccaccagcacattccctaccgggaaaacaagaacctgaccggcacggcccgctacgcttccatcaacacgcacctgggcattgagcaaagccgtcgagatgacctggagagcctgggctacgtgctcatgtacttcaacctgggctccctgccctggcaggggctcaaagcagccaccaagcgccagaagtatgaacggatcagcgagaagaagatgtcaacgcccatcgaggtcctctgcaaaggctatccctccgaattctcaacatacctcaacttctgccgctccctgcggtttgacgacaagcccgactactcttacctacgtcagctcttccgcaacctcttccaccggcagggcttctcctatgactacgtctttgactggaacatgctgaaattcggtgcagcccggaatcccgaggatgtggaccgggagcggcgagaacacgaacgcgaggagaggatggggcagctacgggggtccgcgacccgagccctgccccctggcccacccacgggggccactgccaaccggctccgcagtgccgccgagcccgtggcttccacgccagcctcccgcatccagccggctggcaatacttctcccagagcgatctcgcgggtcgaccgggagaggaaggtgagtatgaggctgcacaggggtgcgcccgccaacgtctcctcctcagacctcactgggcggcaagaggtctcccggatcccagcctcacagacaagtgtgccatttgaccatctcgggaagtgaggagagcccccattggaccagtgtttgcttaggtgag

SEQ ID NO: 108503 - DNA, 996 bp, Artificial Sequence
  derived and/or modified sequence
ggggacgaggaggagggggcctgttattttgcaggctcgcgggggaggccccccggccggcctgcctccgcttccccccgctgggccctccgaggccccggccggccaggcggccaccccggctgtgatttggggacgctgagggagggggcttggggtgctgggcgccggatactgttgattcgggcccgcgtagcgtttcatcggacaatcaccggcgccccctgctctcccggccccggcgcccggacctgggggttcgcaaggctgcgcccgctcgttggatgacgggcgtttgggggtcctaagcaagagtgagccatggagctacgtgtggggaacaagtaccgcctgggacggaagatcgggagcgggtccttcggagatatctacctgggtgccaacatcgcctctggtgaggaagtcgccatcaagctggagtgtgtgaagacaaagcacccccagctgcacatcgagagcaagttctacaagatgatgcagggtggcgtggggatcccgtccatcaagtggtgcggagctgagggcgactacaacgtgatggtcatggagctgctggggcctagcctcgaggacctgttcaacttctgttcccgcaaattcagcctcaagacggtgctgctcttggccgaccagatgatcagccgcatcgagtatatccactccaagaacttcatccaccgggacgtcaagcccgacaacttcctcatggggctggggaagaagggcaacctggtctacatcatcgacttcggcctggccaagaagtaccgggacgcccgcacccaccagcacattccctaccgggaaaacaagaacctgaccggcacggcccgctacgcttccatcaacacgcacctgggcattgagcaaagccgtcgagatgacctggagagcctgggctacgtgctcatgtacttcaacctgggctccctgccctggcaggggctcaaagcagccaccaagcgccagaagtat

SEQ ID NO: 108504 - DNA, 763 bp, Artificial Sequence
  derived and/or modified sequence
ccgcaacctcttccaccggcagggcttctcctatgactacgtctttgactggaacatgctgaaattcggtgcagcccggaatcccgaggatgtggaccgggagcggcgagaacacgaacgcgaggagaggatggggcagctacgggggtccgcgacccgagccctgccccctggcccacccacgggggccactgccaaccggctccgcagtgccgccgagcccgtggcttccacgccagcctcccgcatccagccggctggcaatacttctcccagagcgatctcgcgggtcgaccgggagaggaaggtgagtatgaggctgcacaggggtgcgcccgccaacgtctcctcctcagacctcactgggcggcaagaggtctcccggatcccagcctcacagacaagtgtgccatttgaccatctcgggaagtgaggagagcccccattggaccagtgtttgcttaggcagtagtccgacacgtcgggggactcaactttacactgggacaatctgtgtgtggtctgttttgtagaaattcatccacacaagagagtggaggcatgaacagggctggccttcctcggatctcaggcccaggaaccaagctgtccatggcgggctgggcagatatttgggggtggggtggggagatgctcaccaggagggcagagaagggagagaatccgtttctgtcacatgaagatggatctcctagcgtgctgggccttgagccaggctctggggcccagagggagatagacc

SEQ ID NO: 108505 - DNA, 1251 bp, Artificial Sequence
  derived and/or modified sequence
atggagctgagagtgggcaacaagtacagactgggcagaaagatcggcagcggcagcttcggcgacatctacctgggcgccaacatcgccagcggcgaggaggtggccatcaagctggagtgcgtgaagaccaagcacccccagctgcacatcgagagcaagttctacaagatgatgcagggcggcgtgggcatccccagcatcaagtggtgcggcgccgagggcgactacaacgtgatggtgatggagctgctgggccccagcctggaggacctgttcaacttctgcagcagaaagttcagcctgaagaccgtgctgctgctggccgaccagatgatcagcagaatcgagtacatccacagcaagaacttcatccacagagacgtgaagcccgacaacttcctgatgggcctgggcaagaagggcaacctggtgtacatcatcgacttcggcctggccaagaagtacagagacgccagaacccaccagcacatcccctacagagagaacaagaacctgaccggcaccgccagatacgccagcatcaacacccacctgggcatcgagcagagcagaagagacgacctggagagcctgggctacgtgctgatgtacttcaacctgggcagcctgccctggcagggcctgaaggccgccaccaagagacagaagtacgagagaatcagcgagaagaagatgagcacccccatcgaggtgctgtgcaagggctaccccagcgagttcagcacctacctgaacttctgcagaagcctgagattcgacgacaagcccgactacagctacctgagacagctgttcagaaacctgttccacagacagggcttcagctacgactacgtgttcgactggaacatgctgaagttcggcgccgccagaaaccccgaggacgtggacagagagagaagagagcacgagagagaggagagaatgggccagctgagaggcagcgccaccagagccctgccccccggcccccccaccggcgccaccgccaacagactgagaagcgccgccgagcccgtggccagcacccccgccagcagaatccagcccgccggcaacaccagccccagagccatcagcagagtggacagagagagaaaggtgagcatgagactgcacagaggcgcccccgccaacgtgagcagcagcgacctgaccggcagacaggaggtgagcagaatccccgccagccagaccagcgtgcccttcgaccacctgggcaagtag

SEQ ID NO: 108506 - DNA, 360 bp, Artificial Sequence
  derived and/or modified sequence
tgaagaaaccccgaggacgtggacagagagagaagagagcacgagagagaggagagaatgggccagctgagaggcagcgccaccagagccctgccccccggcccccccaccggcgccaccgccaacagactgagaagcgccgccgagcccgtggccagcacccccgccagcagaatccagcccgccggcaacaccagccccagagccatcagcagagtggacagagagagaaaggtgagcatgagactgcacagaggcgcccccgccaacgtgagcagcagcgacctgaccggcagacaggaggtgagcagaatccccgccagccagaccagcgtgcccttcgaccacctgggcaagtag

SEQ ID NO: 108507 - DNA, 678 bp, Artificial Sequence
  derived and/or modified sequence
atggagctgagagtgggcaacaagtacagactgggcagaaagatcggcagcggcagcttcggcgacatctacctgggcgccaacatcgccagcggcgaggaggtggccatcaagctggagtgcgtgaagaccaagcacccccagctgcacatcgagagcaagttctacaagatgatgcagggcggcgtgggcatccccagcatcaagtggtgcggcgccgagggcgactacaacgtgatggtgatggagctgctgggccccagcctggaggacctgttcaacttctgcagcagaaagttcagcctgaagaccgtgctgctgctggccgaccagatgatcagcagaatcgagtacatccacagcaagaacttcatccacagagacgtgaagcccgacaacttcctgatgggcctgggcaagaagggcaacctggtgtacatcatcgacttcggcctggccaagaagtacagagacgccagaacccaccagcacatcccctacagagagaacaagaacctgaccggcaccgccagatacgccagcatcaacacccacctgggcatcgagcagagcagaagagacgacctggagagcctgggctacgtgctgatgtacttcaacctgggcagcctgccctggcagggcctgaaggccgccaccaagagacagaagtactag

SEQ ID NO: 108508 - DNA, 435 bp, Artificial Sequence
  derived and/or modified sequence
tgaagaaacctgttccacagacagggcttcagctacgactacgtgttcgactggaacatgctgaagttcggcgccgccagaaaccccgaggacgtggacagagagagaagagagcacgagagagaggagagaatgggccagctgagaggcagcgccaccagagccctgccccccggcccccccaccggcgccaccgccaacagactgagaagcgccgccgagcccgtggccagcacccccgccagcagaatccagcccgccggcaacaccagccccagagccatcagcagagtggacagagagagaaaggtgagcatgagactgcacagaggcgcccccgccaacgtgagcagcagcgacctgaccggcagacaggaggtgagcagaatccccgccagccagaccagcgtgcccttcgaccacctgggcaagtag

SEQ ID NO: 108509 - DNA, 396 bp, Artificial Sequence
  derived and/or modified sequence
atgccattttggagactcgataagctgagtcctggaggagtcaaaaggctaagggttactcagccagcaaccgggaccggcgtcgtgcgctctcagtgccagaaatgggtcaaggagttgggcaacgtgccacgcctggccgcccgcaagcctgggttgggcgttccaggctcatcgggtgccgtgaagcgacagggacagaaatgggttaaggaactcggcaatatccctcggcttgccgtgggccgagaccagggcctggggtcactcgaccccgggtcagcgaccgaactgttgtgcgactgcagtgttcccctgttgccactgtccggaggctacagaaaggcggacgttgcccaccaccccgcctgcgcaattgtgtggttgcactattag

SEQ ID NO: 108510 - protein, 1240 aa, Artificial Sequence
  derived and/or modified sequence
MPRGSWKPQVCTGTDMKLRLPASPETHLDMLRHLYQGCQVVQGNLELTYLPTNASLSFLQDIQEVQGYVLIAHNQVRQVPLQRLRIVRGTQLFEDNYALAVLDNGDPLNNTTPVTGASPGGLRELQLRSLTEILKGGVLIQRNPQLCYQDTILWKDIFHKNNQLALTLIDTNRSRACHPCSPMCKGSRCWGESSEDCQSLTRTVCAGGCARCKGPLPTDCCHEQCAAGCTGPKHSDCLACLHFNHSGICELHCPALVTYNTDTFESMPNPEGRYTFGASCVTACPYNYLSTDVGSCTLVCPLHNQEVTAEDGTQRCEKCSKPCARVCYGLGMEHLREVRAVTSANIQEFAGCKKIFGSLAFLPESFDGDPASNTAPLQPEQLQVFETLEEITGYLYISAWPDSLPDLSVFQNLQVIRGRILHNGAYSLTLQGLGISWLGLRSLRELGSGLALIHHNTHLCFVHTVPWDQLFRNPHQALLHTANRPEDECVGEGLACHQLCARGHCWGPGPTQCVNCSQFLRGQECVEECRVLQGLPREYVNARHCLPCHPECQPQNGSVTCFGPEADQCVACAHYKDPPFCVARCPSGVKPDLSYMPIWKFPDEEGACQPCPINCTHSCVDLDDKGCPAEQRASPLTSIISAVVGILLVVVLGVVFGILIKRRQQKIRKYTMRRLLQETELVEPLTPSGAMPNQAQMRILKETELRKVKVLGSGAFGTVYKGIWIPDGENVKIPVAIKVLRENTSPKANKEILDEAYVMAGVGSPYVSRLLGICLTSTVQLVTQLMPYGCLLDHVRENRGRLGSQDLLNWCMQIAKGMSYLEDVRLVHRDLAARNVLVKSPNHVKITDFGLARLLDIDETEYHADGGKVPIKWMALESILRRRFTHQSDVWSYGVTVWELMTFGAKPYDGIPAREIPDLLEKGERLPQPPICTIDVYMIMVKCWMIDSECRPRFRELVSEFSRMARDPQRFVVIQNEDLGPASPLDSTFYRSLLEDDDMGDLVDAEEYLVPQQGFFCPDPAPGAGGMVHHRHRSSSTRSGGGDLTLGLEPSEEEAPRSPLAPSEGAGSDVFDGDLGMGAAKGLQSLPTHDPSPLQRYSEDPTVPLPSETDGYVAPLTCSPQPEYVNQPDVRPQPPSPREGPLPAARPAGATLERPKTLSPGKNGVVKDVFAFGGAVENPEYLTPQGGAAPQPHPPPAFSPAFDNLYYWDQDPPERGAPPSTFKGTPTAENPEYLGLDVPV

SEQ ID NO: 108511 - DNA, 3678 bp, Artificial Sequence
  derived and/or modified sequence
atgaagctgagactgcccgccagccccgagacccacctggacatgctgagacacctgtaccagggctgccaggtggtgcagggcaacctggagctgacctacctgcccaccaacgccagcctgagcttcctgcaggacatccaggaggtgcagggctacgtgctgatcgcccacaaccaggtgagacaggtgcccctgcagagactgagaatcgtgagaggcacccagctgttcgaggacaactacgccctggccgtgctggacaacggcgaccccctgaacaacaccacccccgtgaccggcgccagccccggcggcctgagagagctgcagctgagaagcctgaccgagatcctgaagggcggcgtgctgatccagagaaacccccagctgtgctaccaggacaccatcctgtggaaggacatcttccacaagaacaaccagctggccctgaccctgatcgacaccaacagaagcagagcctgccacccctgcagccccatgtgcaagggcagcagatgctggggcgagagcagcgaggactgccagagcctgaccagaaccgtgtgcgccggcggctgcgccagatgcaagggccccctgcccaccgactgctgccacgagcagtgcgccgccggctgcaccggccccaagcacagcgactgcctggcctgcctgcacttcaaccacagcggcatctgcgagctgcactgccccgccctggtgacctacaacaccgacaccttcgagagcatgcccaaccccgagggcagatacaccttcggcgccagctgcgtgaccgcctgcccctacaactacctgagcaccgacgtgggcagctgcaccctggtgtgccccctgcacaaccaggaggtgaccgccgaggacggcacccagagatgcgagaagtgcagcaagccctgcgccagagtgtgctacggcctgggcatggagcacctgagagaggtgagagccgtgaccagcgccaacatccaggagttcgccggctgcaagaagatcttcggcagcctggccttcctgcccgagagcttcgacggcgaccccgccagcaacaccgcccccctgcagcccgagcagctgcaggtgttcgagaccctggaggagatcaccggctacctgtacatcagcgcctggcccgacagcctgcccgacctgagcgtgttccagaacctgcaggtgatcagaggcagaatcctgcacaacggcgcctacagcctgaccctgcagggcctgggcatcagctggctgggcctgagaagcctgagagagctgggcagcggcctggccctgatccaccacaacacccacctgtgcttcgtgcacaccgtgccctgggaccagctgttcagaaacccccaccaggccctgctgcacaccgccaacagacccgaggacgagtgcgtgggcgagggcctggcctgccaccagctgtgcgccagaggccactgctggggccccggccccacccagtgcgtgaactgcagccagttcctgagaggccaggagtgcgtggaggagtgcagagtgctgcagggcctgcccagagagtacgtgaacgccagacactgcctgccctgccaccccgagtgccagccccagaacggcagcgtgacctgcttcggccccgaggccgaccagtgcgtggcctgcgcccactacaaggacccccccttctgcgtggccagatgccccagcggcgtgaagcccgacctgagctacatgcccatctggaagttccccgacgaggagggcgcctgccagccctgccccatcaactgcacccacagctgcgtggacctggacgacaagggctgccccgccgagcagagagccagccccctgaccagcatcatcagcgccgtggtgggcatcctgctggtggtggtgctgggcgtggtgttcggcatcctgatcaagagaagacagcagaagatcagaaagtacaccatgagaagactgctgcaggagaccgagctggtggagcccctgacccccagcggcgccatgcccaaccaggcccagatgagaatcctgaaggagaccgagctgagaaaggtgaaggtgctgggcagcggcgccttcggcaccgtgtacaagggcatctggatccccgacggcgagaacgtgaagatccccgtggccatcaaggtgctgagagagaacaccagccccaaggccaacaaggagatcctggacgaggcctacgtgatggccggcgtgggcagcccctacgtgagcagactgctgggcatctgcctgaccagcaccgtgcagctggtgacccagctgatgccctacggctgcctgctggaccacgtgagagagaacagaggcagactgggcagccaggacctgctgaactggtgcatgcagatcgccaagggcatgagctacctggaggacgtgagactggtgcacagagacctggccgccagaaacgtgctggtgaagagccccaaccacgtgaagatcaccgacttcggcctggccagactgctggacatcgacgagaccgagtaccacgccgacggcggcaaggtgcccatcaagtggatggccctggagagcatcctgagaagaagattcacccaccagagcgacgtgtggagctacggcgtgaccgtgtgggagctgatgaccttcggcgccaagccctacgacggcatccccgccagagagatccccgacctgctggagaagggcgagagactgccccagccccccatctgcaccatcgacgtgtacatgatcatggtgaagtgctggatgatcgacagcgagtgcagacccagattcagagagctggtgagcgagttcagcagaatggccagagacccccagagattcgtggtgatccagaacgaggacctgggccccgccagccccctggacagcaccttctacagaagcctgctggaggacgacgacatgggcgacctggtggacgccgaggagtacctggtgccccagcagggcttcttctgccccgaccccgcccccggcgccggcggcatggtgcaccacagacacagaagcagcagcaccagaagcggcggcggcgacctgaccctgggcctggagcccagcgaggaggaggcccccagaagccccctggcccccagcgagggcgccggcagcgacgtgttcgacggcgacctgggcatgggcgccgccaagggcctgcagagcctgcccacccacgaccccagccccctgcagagatacagcgaggaccccaccgtgcccctgcccagcgagaccgacggctacgtggcccccctgacctgcagcccccagcccgagtacgtgaaccagcccgacgtgagaccccagccccccagccccagagagggccccctgcccgccgccagacccgccggcgccaccctggagagacccaagaccctgagccccggcaagaacggcgtggtgaaggacgtgttcgccttcggcggcgccgtggagaaccccgagtacctgaccccccagggcggcgccgccccccagccccaccccccccccgccttcagccccgccttcgacaacctgtactactgggaccaggacccccccgagagaggcgccccccccagcaccttcaagggcacccccaccgccgagaaccccgagtacctgggcctggacgtgcccgtgtag

SEQ ID NO: 108512 - DNA, 2940 bp, Artificial Sequence
  derived and/or modified sequence
atggagctggccgccctgtgcagatggggcctgctgctggccctgctgccccccggcgccgccagcacccaggacaactacctgagcaccgacgtgggcagctgcaccctggtgtgccccctgcacaaccaggaggtgaccgccgaggacggcacccagagatgcgagaagtgcagcaagccctgcgccagagtgtgctacggcctgggcatggagcacctgagagaggtgagagccgtgaccagcgccaacatccaggagttcgccggctgcaagaagatcttcggcagcctggccttcctgcccgagagcttcgacggcgaccccgccagcaacaccgcccccctgcagcccgagcagctgcaggtgttcgagaccctggaggagatcaccggctacctgtacatcagcgcctggcccgacagcctgcccgacctgagcgtgttccagaacctgcaggtgatcagaggcagaatcctgcacaacggcgcctacagcctgaccctgcagggcctgggcatcagctggctgggcctgagaagcctgagagagctgggcagcggcctggccctgatccaccacaacacccacctgtgcttcgtgcacaccgtgccctgggaccagctgttcagaaacccccaccaggccctgctgcacaccgccaacagacccgaggacgagtgcgtgggcgagggcctggcctgccaccagctgtgcgccagaggccactgctggggccccggccccacccagtgcgtgaactgcagccagttcctgagaggccaggagtgcgtggaggagtgcagagtgctgcagggcctgcccagagagtacgtgaacgccagacactgcctgccctgccaccccgagtgccagccccagaacggcagcgtgacctgcttcggccccgaggccgaccagtgcgtggcctgcgcccactacaaggacccccccttctgcgtggccagatgccccagcggcgtgaagcccgacctgagctacatgcccatctggaagttccccgacgaggagggcgcctgccagccctgccccatcaactgcacccacagctgcgtggacctggacgacaagggctgccccgccgagcagagagccagccccctgaccagcatcatcagcgccgtggtgggcatcctgctggtggtggtgctgggcgtggtgttcggcatcctgatcaagagaagacagcagaagatcagaaagtacaccatgagaagactgctgcaggagaccgagctggtggagcccctgacccccagcggcgccatgcccaaccaggcccagatgagaatcctgaaggagaccgagctgagaaaggtgaaggtgctgggcagcggcgccttcggcaccgtgtacaagggcatctggatccccgacggcgagaacgtgaagatccccgtggccatcaaggtgctgagagagaacaccagccccaaggccaacaaggagatcctggacgaggcctacgtgatggccggcgtgggcagcccctacgtgagcagactgctgggcatctgcctgaccagcaccgtgcagctggtgacccagctgatgccctacggctgcctgctggaccacgtgagagagaacagaggcagactgggcagccaggacctgctgaactggtgcatgcagatcgccaagggcatgagctacctggaggacgtgagactggtgcacagagacctggccgccagaaacgtgctggtgaagagccccaaccacgtgaagatcaccgacttcggcctggccagactgctggacatcgacgagaccgagtaccacgccgacggcggcaaggtgcccatcaagtggatggccctggagagcatcctgagaagaagattcacccaccagagcgacgtgtggagctacggcgtgaccgtgtgggagctgatgaccttcggcgccaagccctacgacggcatccccgccagagagatccccgacctgctggagaagggcgagagactgccccagccccccatctgcaccatcgacgtgtacatgatcatggtgaagtgctggatgatcgacagcgagtgcagacccagattcagagagctggtgagcgagttcagcagaatggccagagacccccagagattcgtggtgatccagaacgaggacctgggccccgccagccccctggacagcaccttctacagaagcctgctggaggacgacgacatgggcgacctggtggacgccgaggagtacctggtgccccagcagggcttcttctgccccgaccccgcccccggcgccggcggcatggtgcaccacagacacagaagcagcagcaccagaagcggcggcggcgacctgaccctgggcctggagcccagcgaggaggaggcccccagaagccccctggcccccagcgagggcgccggcagcgacgtgttcgacggcgacctgggcatgggcgccgccaagggcctgcagagcctgcccacccacgaccccagccccctgcagagatacagcgaggaccccaccgtgcccctgcccagcgagaccgacggctacgtggcccccctgacctgcagcccccagcccgagtacgtgaaccagcccgacgtgagaccccagccccccagccccagagagggccccctgcccgccgccagacccgccggcgccaccctggagagacccaagaccctgagccccggcaagaacggcgtggtgaaggacgtgttcgccttcggcggcgccgtggagaaccccgagtacctgaccccccagggcggcgccgccccccagccccaccccccccccgccttcagccccgccttcgacaacctgtactactgggaccaggacccccccgagagaggcgccccccccagcaccttcaagggcacccccaccgccgagaaccccgagtacctgggcctggacgtgcccgtgtag

SEQ ID NO: 108513 - DNA, 3723 bp, Artificial Sequence
  derived and/or modified sequence
atgcccagaggcagctggaagccccaggtgtgcaccggcaccgacatgaagctgagactgcccgccagccccgagacccacctggacatgctgagacacctgtaccagggctgccaggtggtgcagggcaacctggagctgacctacctgcccaccaacgccagcctgagcttcctgcaggacatccaggaggtgcagggctacgtgctgatcgcccacaaccaggtgagacaggtgcccctgcagagactgagaatcgtgagaggcacccagctgttcgaggacaactacgccctggccgtgctggacaacggcgaccccctgaacaacaccacccccgtgaccggcgccagccccggcggcctgagagagctgcagctgagaagcctgaccgagatcctgaagggcggcgtgctgatccagagaaacccccagctgtgctaccaggacaccatcctgtggaaggacatcttccacaagaacaaccagctggccctgaccctgatcgacaccaacagaagcagagcctgccacccctgcagccccatgtgcaagggcagcagatgctggggcgagagcagcgaggactgccagagcctgaccagaaccgtgtgcgccggcggctgcgccagatgcaagggccccctgcccaccgactgctgccacgagcagtgcgccgccggctgcaccggccccaagcacagcgactgcctggcctgcctgcacttcaaccacagcggcatctgcgagctgcactgccccgccctggtgacctacaacaccgacaccttcgagagcatgcccaaccccgagggcagatacaccttcggcgccagctgcgtgaccgcctgcccctacaactacctgagcaccgacgtgggcagctgcaccctggtgtgccccctgcacaaccaggaggtgaccgccgaggacggcacccagagatgcgagaagtgcagcaagccctgcgccagagtgtgctacggcctgggcatggagcacctgagagaggtgagagccgtgaccagcgccaacatccaggagttcgccggctgcaagaagatcttcggcagcctggccttcctgcccgagagcttcgacggcgaccccgccagcaacaccgcccccctgcagcccgagcagctgcaggtgttcgagaccctggaggagatcaccggctacctgtacatcagcgcctggcccgacagcctgcccgacctgagcgtgttccagaacctgcaggtgatcagaggcagaatcctgcacaacggcgcctacagcctgaccctgcagggcctgggcatcagctggctgggcctgagaagcctgagagagctgggcagcggcctggccctgatccaccacaacacccacctgtgcttcgtgcacaccgtgccctgggaccagctgttcagaaacccccaccaggccctgctgcacaccgccaacagacccgaggacgagtgcgtgggcgagggcctggcctgccaccagctgtgcgccagaggccactgctggggccccggccccacccagtgcgtgaactgcagccagttcctgagaggccaggagtgcgtggaggagtgcagagtgctgcagggcctgcccagagagtacgtgaacgccagacactgcctgccctgccaccccgagtgccagccccagaacggcagcgtgacctgcttcggccccgaggccgaccagtgcgtggcctgcgcccactacaaggacccccccttctgcgtggccagatgccccagcggcgtgaagcccgacctgagctacatgcccatctggaagttccccgacgaggagggcgcctgccagccctgccccatcaactgcacccacagctgcgtggacctggacgacaagggctgccccgccgagcagagagccagccccctgaccagcatcatcagcgccgtggtgggcatcctgctggtggtggtgctgggcgtggtgttcggcatcctgatcaagagaagacagcagaagatcagaaagtacaccatgagaagactgctgcaggagaccgagctggtggagcccctgacccccagcggcgccatgcccaaccaggcccagatgagaatcctgaaggagaccgagctgagaaaggtgaaggtgctgggcagcggcgccttcggcaccgtgtacaagggcatctggatccccgacggcgagaacgtgaagatccccgtggccatcaaggtgctgagagagaacaccagccccaaggccaacaaggagatcctggacgaggcctacgtgatggccggcgtgggcagcccctacgtgagcagactgctgggcatctgcctgaccagcaccgtgcagctggtgacccagctgatgccctacggctgcctgctggaccacgtgagagagaacagaggcagactgggcagccaggacctgctgaactggtgcatgcagatcgccaagggcatgagctacctggaggacgtgagactggtgcacagagacctggccgccagaaacgtgctggtgaagagccccaaccacgtgaagatcaccgacttcggcctggccagactgctggacatcgacgagaccgagtaccacgccgacggcggcaaggtgcccatcaagtggatggccctggagagcatcctgagaagaagattcacccaccagagcgacgtgtggagctacggcgtgaccgtgtgggagctgatgaccttcggcgccaagccctacgacggcatccccgccagagagatccccgacctgctggagaagggcgagagactgccccagccccccatctgcaccatcgacgtgtacatgatcatggtgaagtgctggatgatcgacagcgagtgcagacccagattcagagagctggtgagcgagttcagcagaatggccagagacccccagagattcgtggtgatccagaacgaggacctgggccccgccagccccctggacagcaccttctacagaagcctgctggaggacgacgacatgggcgacctggtggacgccgaggagtacctggtgccccagcagggcttcttctgccccgaccccgcccccggcgccggcggcatggtgcaccacagacacagaagcagcagcaccagaagcggcggcggcgacctgaccctgggcctggagcccagcgaggaggaggcccccagaagccccctggcccccagcgagggcgccggcagcgacgtgttcgacggcgacctgggcatgggcgccgccaagggcctgcagagcctgcccacccacgaccccagccccctgcagagatacagcgaggaccccaccgtgcccctgcccagcgagaccgacggctacgtggcccccctgacctgcagcccccagcccgagtacgtgaaccagcccgacgtgagaccccagccccccagccccagagagggccccctgcccgccgccagacccgccggcgccaccctggagagacccaagaccctgagccccggcaagaacggcgtggtgaaggacgtgttcgccttcggcggcgccgtggagaaccccgagtacctgaccccccagggcggcgccgccccccagccccaccccccccccgccttcagccccgccttcgacaacctgtactactgggaccaggacccccccgagagaggcgccccccccagcaccttcaagggcacccccaccgccgagaaccccgagtacctgggcctggacgtgcccgtgtag

SEQ ID NO: 108514 - DNA, 3678 bp, Artificial Sequence
  derived and/or modified sequence
atgaagctgcggctgcccgcaagtccagagacacatctggatatgcttcggcatctgtaccaggggtgccaggttgtgcagggcaatctggaactaacgtacctcccgaccaacgcaagtctgagttttttgcaagacattcaggaggtccaggggtacgtccttattgctcacaaccaggtgaggcaggtgcctctgcagagactcaggatcgtgcgcggcactcagctgttcgaggacaactacgcacttgccgtccttgataatggtgaccctttgaacaacactaccccggttactggggctagcccagggggactccgggaattgcagcttcgtagcctcactgagattctaaagggcggtgttttgattcagcgtaacccccagctctgctaccaggacaccatcttgtggaaagatatctttcacaagaataaccagctggccctaaccctcattgacactaaccgttctcgagcttgccacccgtgctcacccatgtgcaaaggtagccggtgctggggggagtcatccgaggactgccagagcctgacccggactgtgtgtgccggcggctgcgcccggtgtaagggccccttgcctaccgactgttgtcacgaacaatgtgccgccggctgcactggacctaaacactctgattgcctggcatgcctccactttaaccacagtggtatctgtgaattgcactgtcctgccctggtgacatataacaccgataccttcgaatccatgcctaaccctgaagggcgctacaccttcggtgccagttgcgtgactgcttgtccgtacaattacctgtcaaccgacgtggggtcatgtacgctcgtatgccccctgcacaatcaggaggtgacggccgaagacggaacccagaggtgcgagaagtgctcaaaaccctgcgctagggtgtgttatggacttggcatggagcacctgagggaggtgcgagcagttacttccgccaacatccaagagtttgcaggctgtaaaaagatttttgggtcattggcttttcttcctgaaagtttcgacggggatccagcttccaacactgccccattgcagccggaacagttgcaagtcttcgaaactcttgaagagatcaccggatatttgtacattagtgcctggccggattctctccccgacctgtctgtgttccagaacttgcaggtcatcagaggtcgcatccttcataatggcgcctattctctgacccttcagggcctggggatctcgtggttggggctaagatcactgcgggagctgggctctggcctggctctaatccaccacaatacgcacctctgctttgtacatacggtgccgtgggaccagctgtttcgtaacccacatcaggctcttctgcataccgccaatcgtcccgaagacgaatgcgtaggagaaggcctggcctgccaccagctctgcgcacgtggccactgttggggccctgggccaacgcaatgtgtcaattgtagtcaatttctcagaggacaggagtgtgtcgaagaatgcagagtgctgcaaggcctgccaagagagtacgtcaatgcaaggcactgtctcccttgtcatcctgagtgccagccacagaatggttcagttacctgtttcggtcccgaggccgaccagtgcgtagcctgcgctcactataaagaccctcctttctgcgtggctcgttgcccgtcgggcgtgaagccagatctgagctacatgcccatctggaagttccccgacgaggagggggcttgtcaaccatgccctatcaactgtacacactcttgtgtggacttggatgataagggatgcccggctgagcagcgcgcctcgcctcttacctccataattagtgctgtggttggcattctgctggtcgtcgtgttgggcgtggtgttcggcatccttatcaagcgacgccagcagaagattcgtaaatacacgatgcgaaggttgctacaggagacagagctggttgaacctctgactccttccggcgcaatgccgaatcaagcccagatgcgtattctgaaagaaaccgaactgcgcaaggtgaaagttctgggatcaggcgcttttggcaccgtgtacaaaggtatctggatcccggatggagagaatgtgaagatcccggtggctatcaaagtgttaagagagaacactagccctaaggccaacaaagagattctggatgaagcctacgtgatggccggtgttggatctccctatgtaagccgcctccttggaatctgcttaactagcacagttcagctggtgactcaactgatgccatatggctgccttctggaccacgtcagagaaaaccggggacgtctgggatctcaagaccttctaaattggtgtatgcagattgccaagggaatgtcctatctggaagacgtacgcttggtgcatagagacttggcagcccggaacgtgctggttaagagccccaatcatgtgaaaataaccgactttgggctcgcccgcttactggacatcgacgagaccgagtaccatgcggacggcggaaaggttccaatcaaatggatggcattagaaagtatcctgaggcgacggttcacacaccagtctgatgtgtggtcttatggggtgacagtgtgggagctcatgaccttcggcgctaagccctacgacggaatccccgcccgggagatacccgacctgctggaaaaaggagaaagacttccccagccccctatttgcaccattgacgtgtacatgatcatggtgaaatgctggatgatcgactctgaatgccggcctcgatttcgcgagctggtgtccgagttctccaggatggccagggatccacagcggttcgtggtgatccaaaacgaggaccttgggcccgcctctcccctcgatagcaccttttacaggagcctgcttgaggatgacgatatgggagacctagtggatgcagaggaatacctggttccccaacagggtttcttctgcccggaccctgcgcccggcgccggcggcatggttcatcatcgccacagatcgtcttccactcgctccgggggcggggacttaacactaggtctggagccctctgaagaagaagccccacgatcaccactggcgccctcagaaggagcaggcagcgacgtatttgacggtgatctggggatgggagctgccaagggcctgcaaagcctaccgactcatgacccctcaccacttcagcgctattcagaggatcctacggtccccctgcccagcgaaacggacgggtacgtagcgcccctgacttgcagccctcagcctgagtatgtgaatcaaccagacgtgagaccccagccccctagcccccgggagggcccactgcctgccgcacgccctgctggtgcgactctggagaggcctaaaacactttcacctggtaagaacggggtggtgaaggacgtctttgccttcgggggggccgtggaaaatccagagtaccttacacctcaggggggcgcggccccacagccccatccacctccagctttttcccccgccttcgacaacctgtactattgggaccaggacccgcctgagcgtggggcccccccctcaacattcaaaggcacacccacggccgagaatcccgaatatcttggtttagacgtgccagtatag

SEQ ID NO: 108515 - DNA, 2940 bp, Artificial Sequence
  derived and/or modified sequence
atggagttagcagccctgtgcaggtgggggctcctgctggccctcctcccccctggagctgcaagcacgcaggataattatctgagtactgatgtgggctcctgtacattggtctgtcctttgcataaccaggaagttacagctgaagatggtacccagcgttgcgagaaatgttcaaagccatgtgcacgtgtttgctacgggctcgggatggagcacctgcgcgaggtgcgggctgtaaccagtgctaatattcaggagttcgcaggctgcaagaaaatctttgggagtctggctttcctgccagagtctttcgacggcgatcccgccagtaacacagctccgttacagcccgagcaactgcaggtattcgagactctggaagaaattacagggtacctatatatcagcgcatggccagactccctgccggacttgtctgtgttccagaacctccaggtgattcgagggcggattctgcacaacggcgcatactcactcactcttcaggggctgggaatcagttggctcggcctgaggagcttaagggaactggggagtggactggctctgattcatcacaatacacacctctgctttgtccacaccgtgccttgggatcaactgtttagaaacccacatcaggctctgctccacacggctaacagaccagaagatgagtgtgtcggggaagggttggcttgtcatcaactgtgtgcacgtggccattgttggggaccaggccctacccagtgcgtcaactgcagccagtttctccggggacaggagtgtgtggaggagtgcagagtcctgcagggcttaccccgcgagtatgtcaatgccaggcactgcctcccctgccatccagaatgtcagccacagaacggctctgtgacttgcttcggccctgaagctgatcagtgcgtggcctgcgcccactataaggacccgcctttttgcgtggcccgctgtccttccggggttaaacccgacctgtcttatatgcctatatggaagttcccagacgaggaaggggcgtgtcagccatgcccaataaactgtacccattcctgtgtcgacctggacgacaagggatgccccgcagaacaacgcgcttcacccttgacaagtatcatttccgccgtggtgggtatcctgctggtggtggtacttggagtggtcttcggtatactaatcaaacgcagacagcaaaaaataaggaaatatactatgagacggctgctgcaggagactgagttggtggaaccccttactccaagcggggctatgccgaatcaggcgcaaatgagaatactgaaggagacggaactgcgaaaggttaaggtactgggatctggggcgtttggaaccgtgtataaaggtatctggataccagacggggagaacgtgaaaattccagtggccattaaggtattacgggagaatactagccctaaagcaaataaggagatcctagacgaggcttatgtgatggccggtgtcggcagtccttatgttagtagactgctgggcatctgcctcaccagcacagttcagctagtcacccagctgatgccttacggttgccttctggatcatgtccgagaaaataggggacgtctgggctcacaagacttattgaactggtgcatgcagatagctaaaggcatgtcttacctggaggatgtgcgtctagttcacagggatctagcagcccggaatgtgctggtaaagtctccaaaccatgtgaagatcactgacttcggcctcgctaggcttcttgacatcgacgagactgagtaccatgctgacggtggcaaagtgcccattaaatggatggccctggaatcaatcctcaggaggaggttcactcaccagagtgatgtgtggagctatggagtgacagtgtgggaactcatgaccttcggggccaagccctatgatggaatccccgcccgcgagatacccgatctcctagagaaaggagagcggcttccccagcctcccatctgcactatcgacgtgtacatgatcatggtcaagtgctggatgatcgactccgagtgtcggccccggttcagagagctcgttagcgaattctcgaggatggcacgcgatccacagagattcgtcgtaattcagaatgaggatttaggccccgccagccctctggattccactttttaccggagcttactggaggatgatgatatgggcgatctcgtcgacgcggaagagtatctggtgccccagcaggggttcttctgccccgatccagcacccggtgctggaggcatggttcaccaccgccacaggagttctagcacgagaagcggtgggggggatttgactctgggcctcgaaccaagcgaggaggaagcccccagaagcccactcgcacccagtgaaggagccggcagtgacgtgtttgacggtgatttagggatgggcgctgctaaggggttgcagtctctgccaacacatgaccctagcccactccagagatacagtgaggatccaactgtcccccttccatcggaaacggatgggtatgttgcaccattaacatgttctccgcagcccgagtacgtgaaccagccagatgtcagaccacagccaccgtccccgagggaaggacccctccccgccgcccggcccgccggcgcaaccttggagcggccgaaaaccctctccccaggaaaaaatggagtggtcaaggacgtgttcgcctttggtggtgcagttgaaaacccagaatatctgacgcctcaagggggggctgccccccagcctcacccacctcctgctttctccccagctttcgacaatttgtactattgggaccaggacccgcccgagcggggggcccccccatctacttttaagggcactcctactgcagagaatccagaatatctgggcttagacgttccggtctag

SEQ ID NO: 108516 - DNA, 3678 bp, Artificial Sequence
  derived and/or modified sequence
atgaaactgagactgcctgctagccctgagacacacttggatatgctgaggcacttgtatcagggttgccaagtggtgcagggcaaccttgagttgacttacttacctaccaacgccagcctgtccttcctccaggacatccaggaggttcaggggtatgtgctaatcgcccacaatcaggtgcgacaggttccccttcaaagacttcgtatagttcggggaacacagctgtttgaagataattacgctttagcagtccttgacaacggagacccactgaataacaccactcccgttactggggcttcgcctggaggcctcagggaactgcagcttcggagcctcaccgaaatcctcaaaggcggagtgctcatccagagaaacccgcaactttgctaccaggacaccatcctctggaaggacatattccacaagaacaaccagctcgctctgacattgatcgacactaatagaagtcgcgcctgtcatccctgtagtccgatgtgcaaaggctcccgctgttggggcgagtccagcgaggactgccagtccctcactaggaccgtctgtgcaggcggctgcgcccgatgtaaaggccctcttcccactgactgctgccacgagcagtgtgccgcaggatgcaccgggccaaagcacagcgactgcctggcctgtttgcatttcaatcactctgggatctgcgaacttcattgtcctgccctggtcacctacaataccgataccttcgaatcaatgccgaatcccgagggtcgatacactttcggcgcgagctgtgtgactgcctgcccctataattacctctccacagatgtgggtagctgtacgcttgtgtgccccctgcacaatcaagaagtgacggccgaggacgggactcaacggtgcgagaagtgttccaaaccgtgcgcacgcgtttgttatggcctcgggatggagcacttgcgcgaggtgagagctgtgacttctgccaacatacaggagttcgcgggctgtaagaagatcttcgggtccctggcttttctgcccgagagctttgacggtgaccctgcatcaaataccgcccccctgcagcctgagcagttgcaggtctttgaaacacttgaggaaattaccggatatttgtacatttcagcctggccagactctttgcctgacctgtccgtgtttcagaatttacaggtgatcagaggtagaatactgcacaatggggcatattctttaaccctacagggacttggaatctcctggctgggactaagaagtctcagggaactgggatctgggttggcccttatccaccacaacacccatctttgctttgtgcacactgtgccttgggatcagctgttcagaaatccccaccaggccctccttcacacggcgaaccgcccggaggacgagtgcgtcggcgagggcttggcatgccaccagctgtgtgctaggggacattgctggggaccaggacccacccagtgtgtgaattgttcacagtttttgagaggccaggaatgcgtagaggaatgtcgagtcctccagggactgccccgtgagtacgtcaacgcacgccactgcctcccttgtcatccagagtgccagccccaaaacgggagcgtgacctgttttgggccagaagcagaccagtgtgttgcgtgcgcccactacaaagatccacctttttgcgtcgcgagatgcccctccggtgtgaaacctgatctatcatatatgcccatttggaagtttcctgatgaggagggcgcttgccagccctgccccattaattgtacccacagctgtgtcgacctggacgacaaggggtgccccgccgaacaacgggcaagccccctgaccagcattatctcagctgtcgtaggcattcttctagtggtggtgctgggggtggtttttggaattctgatcaaacggcggcaacagaagatcaggaaatacaccatgcgaagactgctgcaggagaccgaactggtggagcccttgacgcccagcggagctatgcctaaccaagctcaaatgcgcatcctcaaggaaaccgagcttaggaaggtaaaggtgctgggctctggggcatttggaacagtctataaggggatctggatccctgacggcgagaatgtgaagatccccgttgccatcaaggtccttcgtgagaacacctctccaaaggcaaataaagagatcctggatgaggcatacgtgatggccggagtggggtctccgtatgtcagccgactactcgggatctgtctgacatccaccgtccagctggtcactcagctcatgccctacgggtgcctgctggatcacgtgcgagagaaccgaggcaggttgggctctcaggacttactgaactggtgcatgcagatcgccaagggcatgagctatttagaggacgtgaggctggtgcatagggacctcgcggcaagaaatgttctggtaaagagtcctaaccatgtgaaaataaccgactttggacttgcacgactgctggacattgacgaaactgaatatcacgccgacggaggcaaggttcccattaagtggatggccctggaatctatccttcggcgtagattcacacaccagagcgacgtctggtcatatggagttactgtgtgggagttgatgacgttcggcgcaaaaccttatgacggcattcccgctagagagatccctgacctgcttgaaaagggcgaacgtctgccacagcctcccatttgcaccatagacgtttacatgattatggttaaatgctggatgattgactccgagtgccgtcctcgtttcagggagttagtgagcgaatttagccgtatggccagagacccgcaaaggtttgtggtaatccagaacgaggatctcggtcctgcatcccctctggactctactttttataggtccctcttggaggatgacgatatgggggaccttgttgacgccgaggaatacctggtcccacaacagggcttcttctgccctgaccctgcccccggtgcaggagggatggtgcatcacagacatcgtagctcctctacaagatcagggggaggtgacctgacactgggactcgagccttctgaagaagaggctccgcggtctcctctcgcgccgtcggaaggggcggggtctgacgtgttcgacggcgaccttggtatgggggcggccaaagggttacaaagtctgccaacacatgatcccagcccccttcagcgctactcagaagacccaacagtgccactgccctctgagaccgatgggtacgtagctccgctcacctgctccccacaacctgaatacgtgaatcagcccgacgtgaggcctcagccgccctcacccagagaaggtcctcttcctgccgcccgaccagcgggcgctacactcgaacgtcctaagaccctttcccctggtaaaaacggcgtggtgaaggacgttttcgccttcggcggggcagtggagaaccccgagtaccttacaccccaaggaggcgccgctccccaacctcacccaccacccgcattcagtcccgcatttgacaacttatactattgggatcaggatccccccgagagaggagcgcccccaagcacattcaaggggacgcctaccgccgagaatcccgagtatctagggctggacgtccccgtgtag

SEQ ID NO: 108517 - DNA, 3723 bp, Artificial Sequence
  derived and/or modified sequence
atgccaaggggcagctggaagcctcaagtctgcactggcactgacatgaaactgcggttgccagcctccccggagacccatctggatatgttgcgccatttataccagggctgccaggtggtgcagggaaacctagagttgacttacctccccactaacgcttccttaagcttcctgcaggacatacaagaggtgcagggatacgtgctcattgctcacaatcaggtcagacaggttccgctccaaaggttacggatcgttagaggaacccagcttttcgaggataactatgccttggccgttctggacaatggggatccattgaataataccactcctgtcaccggcgcttccccgggtggtctgcgtgaattgcagctgcggagtctgactgaaatacttaagggaggcgtgctgatccagagaaatccacagctctgctaccaagataccatcctgtggaaagacatcttccacaagaacaaccaactcgccctgaccctaatcgacaccaaccgctcccgagcttgtcatccctgctcccctatgtgcaaaggctccaggtgctggggagagtccagcgaagattgtcaaagcctgacgcgcactgtgtgcgcaggtggatgcgcacgctgcaagggaccactgccaacagactgctgccacgaacaatgcgccgccggctgcaccggacccaaacactctgactgtttggcctgcctacacttcaaccacagcggcatttgcgagttacattgcccagcattggtgacgtataacactgacacttttgaaagcatgcccaatcctgagggtcggtacactttcggggcatcctgtgtaacggcgtgtccttataactacctgtctacagacgttggttcctgcacacttgtctgtccactccacaaccaggaagtcaccgctgaggatggaactcagcgctgcgagaaatgcagcaagccctgcgcaagagtctgttatggcctcggcatggagcatttacgcgaagtgcgagcagtcacgtccgctaacattcaggagtttgctgggtgtaagaagatctttggctcgctagctttcctgcctgagtccttcgacggggatccagcgagcaatactgccccgctccagcccgagcaactgcaggtgttcgagacgctggaggaaatcaccggctatctgtatatctctgcatggcccgactctctgcccgacctgtcggtgttccagaatttgcaagtgattcgaggaagaatactgcataacggcgcctattcattgacgcttcagggtttgggcatctcgtggctcggcctcagaagtcttcgcgaattaggaagcggactcgcccttattcaccacaatactcatctctgcttcgtgcacaccgtgccttgggatcagttgtttaggaatcctcaccaggctctgttgcatacagctaataggccagaggatgagtgcgttggggagggtttagcctgtcatcagctctgcgcccgcggccactgttgggggcccggccccactcagtgtgtgaattgttctcaattccttaggggccaggagtgcgtggaggaatgtagggtcctccagggactacctcgggagtacgtgaatgcaaggcactgtcttccttgccaccctgagtgtcagccacagaacggctctgtcacatgctttggaccggaagctgatcagtgtgtggcctgcgcgcactataaggaccccccattctgtgtggcccggtgcccaagcggcgttaagccagatctgtcctatatgccaatttggaagtttcctgatgaggagggtgcttgccagccatgccctatcaattgtactcacagttgtgtggacctagatgataagggctgccccgccgaacagagagccagtccgctgacatcaatcatttccgcagtggtgggtattctgttggtggtggtactaggagttgtgtttggaattctgattaaacgtaggcagcagaaaataagaaagtacacaatgcgaagattgctgcaggaaacggaattggtggagccacttacaccttctggcgccatgcctaaccaggcccaaatgagaatcttaaaagaaactgaactgcggaaggtgaaagtgctgggctccggagcctttggcacagtatataaaggcatatggatcccagatggggaaaacgttaagattcccgttgcaataaaagtgttaagagaaaatacaagtcctaaagctaataaggaaatcctcgatgaggcctacgtgatggcaggcgtgggaagcccttatgtgtctcggctgttggggatctgtcttacttctactgtgcagctcgtgacccaactgatgccctatggatgtctgctggaccacgtgcgcgagaacagaggccgcctcggatctcaggatctgctcaactggtgtatgcagatcgcaaaggggatgtcgtacctggaggacgtccggctcgtgcatagggacctcgctgcaaggaatgttctggtgaagtctcccaatcacgtgaagatcaccgattttggcctggcgcgtctactggatattgatgaaaccgaatatcacgctgacggtgggaaggtgcctattaaatggatggccctggagagcattttgagaagacgttttacgcaccagtcagatgtgtggagctacggagtgacggtctgggaattgatgacttttggagctaagccttatgatgggatcccagcacgggagattcccgacctgctagaaaaaggagagcgtctgccccagccccctatctgtacgatagacgtgtacatgattatggtgaagtgttggatgatcgattctgagtgtaggccccgcttcagagaacttgtgagcgagtttagtagaatggccagggatccccagagattcgtggtcatccaaaacgaagaccttgggcctgcctccccacttgactccaccttttaccgttcactcctggaagatgatgacatgggtgacctcgtcgacgccgaagagtatcttgttcctcaacagggctttttctgccccgaccccgcccccggtgccggggggatggtgcaccacagacatagatcgtcttctacaagaagcggcggcggggaccttacactgggactggagccttcagaggaggaagcaccaaggtctccgctcgcaccttcagaaggagccgggagcgatgtattcgacggggatctagggatgggcgctgccaagggactccagagcctaccgacccacgatccatccccattgcagaggtacagtgaggaccccacagtgcccctgccctccgaaacagatgggtacgtggcccctctgacctgtagccctcaaccagagtacgtgaatcaacccgacgtgaggcctcaaccacctagccctcgggagggccctctgccagcagcgagaccggccggcgctactctggaaagacctaagacgctctctccgggaaaaaacggggtggtgaaggatgtgttcgcattcggaggggcggtggagaaccccgagtatttgacgcctcaaggcggagcggccccacagcctcatcctccacccgcattttcccctgcatttgacaatctgtattattgggaccaggatcctccggagaggggagccccgccttcaacgtttaagggcaccccaactgcagagaatcctgagtatctgggcctggatgtgcccgtctag

SEQ ID NO: 108518 - DNA, 3678 bp, Artificial Sequence
  derived and/or modified sequence
atgaagctgcggctgcctgccagccctgagacccacctggacatgctgcggcacctgtaccagggctgccaggtggtgcagggcaacctggagctgacctacctgcccaccaatgccagcctgtccttcctgcaggacatccaggaggtgcagggctacgtgctgattgcccacaaccaggtgcggcaggtgcccctgcagaggctgagaattgtgcggggcacccagctgtttgaggacaactatgccctggccgtgctggacaatggagaccccctgaacaacaccacccctgtgactggagccagccctgggggcctgcgggagctgcagctgcggagcctgacagagatcctgaagggcggcgtgctgatccagaggaacccccagctgtgctaccaggacaccatcctgtggaaggacatcttccacaagaacaaccagctggccctgaccctgattgacaccaacagaagccgggcctgccacccctgcagccccatgtgcaagggcagccgctgctggggcgagagcagcgaggactgccagagcctgaccaggacagtgtgtgccggcggctgtgcccgctgcaagggccccctgcccacagactgctgccacgagcagtgtgccgccggctgcaccggccccaagcacagcgactgcctggcctgcctgcacttcaaccacagcggcatctgtgagctgcactgcccagccctggtgacctacaacacagacacctttgagagcatgcccaaccctgagggccgctacacctttggagccagctgtgtgacagcctgcccctacaactacctgagcacagatgtgggcagctgcaccctggtgtgccccctgcacaaccaggaggtgacagcagaagatggcacccagagatgtgagaagtgcagcaagccctgtgcccgggtgtgctacggcctgggcatggagcacctgcgggaggtgcgggctgtgaccagcgccaacatccaggagtttgctggctgcaagaagatcttcggcagcctggccttcctgcctgagagctttgatggagaccctgccagcaacacagcccccctgcagcctgagcagctgcaggtgtttgagaccctggaggagatcaccggctacctgtacatcagcgcctggccagacagcctgcctgacctgtctgtgttccagaacctgcaggtgatccggggccgcatcctgcacaacggggcctacagcctgaccctgcagggcctgggcatctcctggctgggcctgcggagcctgcgggagctgggcagcggcctggccctgatccaccacaacacccacctgtgctttgtgcacacagtgccctgggaccagctgttcaggaacccccaccaggccctgctgcacacagccaacagaccagaagatgaatgtgtgggggagggcctggcctgccaccagctgtgtgcccggggccactgctggggccctggccccacccagtgtgtgaactgcagccagttcctgcggggccaggagtgtgtggaggagtgccgggtgctgcagggcctgccccgggagtatgtgaatgcccggcactgcctgccctgccaccctgagtgccagccccagaatggatctgtgacctgctttggacctgaggccgaccagtgtgtggcctgtgcccactacaaggacccccccttctgtgtggcccgctgccccagcggcgtgaagccagacctgagctacatgcccatctggaagttcccagatgaggagggcgcctgccagccctgccccatcaactgcacccacagctgtgtggacctggatgacaagggctgcccagctgagcagagggccagccccctgaccagcatcatctctgctgtggtgggcatcctgctggtggtggtgctgggcgtggtgtttggcatcctgatcaagaggcggcagcagaagatcaggaagtacaccatgaggcggctgctgcaggagacagagctggtggagcccctgaccccatctggggccatgcccaaccaggcccagatgaggatcctgaaggagacagagctgaggaaggtgaaggtgctgggcagcggggcctttggaacagtgtacaagggcatctggatcccagatggagaaaatgtgaagatccctgtggccatcaaggtgctgcgggagaacaccagccccaaggccaacaaggagatcctggatgaggcctacgtgatggccggcgtgggcagcccctacgtgtcccggctgctgggcatctgcctgaccagcacagtgcagctggtgacccagctgatgccctacggctgcctgctggaccacgtgcgggagaacagaggccgcctgggcagccaggacctgctgaactggtgcatgcagatcgccaagggcatgagctacctggaggatgtgcggctggtgcaccgggacctggccgccagaaatgtgctggtgaagagccccaaccacgtgaagatcacagactttggcctggcccggctgctggacattgatgaaacagagtaccacgcagatggcggcaaggtgcccatcaagtggatggccctggagagcatcctgcggcggcgcttcacccaccagagtgatgtgtggagctatggagtgacagtgtgggagctgatgaccttcggggccaagccctatgatggcatcccagcccgggagatcccagacctgctggagaagggggagcggctgccccagccccccatctgcaccattgatgtgtacatgatcatggtgaagtgctggatgattgattctgagtgccggccccgcttccgggagctggtgtctgagttcagcaggatggcccgggacccccagagatttgtggtgatccagaatgaagacctgggccctgccagccccctggacagcaccttctaccgcagcctgctggaggatgatgacatgggagacctggtggatgctgaggagtacctggtgccccagcagggcttcttctgcccagaccctgcccctggagctgggggcatggtgcaccaccgccacaggagcagcagcaccaggtctgggggcggggacctgaccctgggcctggagcccagcgaggaggaggcccccaggagccccctggcccccagcgagggcgccggcagtgatgtgtttgatggagacctgggcatgggcgccgccaagggcctgcagagcctgcccacccatgaccccagccccctgcagcgctacagcgaggaccccaccgtgcccctgcccagcgagacagatggctacgtggcccccctgacctgcagcccccagccagaatatgtgaaccagccagatgtgcggccccagccccccagcccccgggagggccccctgcctgctgcccggcctgctggggccaccctggagcggcccaagaccctgagccctgggaagaatggagtggtgaaggatgtgtttgcctttggaggagctgtggagaaccctgagtacctgaccccccagggcggggccgccccccagccccaccccccaccagccttctccccagcctttgacaacctgtactactgggaccaggaccccccagagcggggggccccacccagcaccttcaagggcacccccacagctgagaaccctgagtacctgggcctggatgtgcctgtgtag

SEQ ID NO: 108519 - DNA, 2940 bp, Artificial Sequence
  derived and/or modified sequence
atggagctggccgccctgtgccgctggggcctgctgctggccctgctgcccccaggggccgccagcacccaggacaactacctgagcacagatgtgggcagctgcaccctggtgtgccccctgcacaaccaggaggtgacagcagaagatggcacccagagatgtgagaagtgcagcaagccctgtgcccgggtgtgctacggcctgggcatggagcacctgcgggaggtgcgggctgtgaccagcgccaacatccaggagtttgctggctgcaagaagatcttcggcagcctggccttcctgcctgagagctttgatggagaccctgccagcaacacagcccccctgcagcctgagcagctgcaggtgtttgagaccctggaggagatcaccggctacctgtacatcagcgcctggccagacagcctgcctgacctgtctgtgttccagaacctgcaggtgatccggggccgcatcctgcacaacggggcctacagcctgaccctgcagggcctgggcatctcctggctgggcctgcggagcctgcgggagctgggcagcggcctggccctgatccaccacaacacccacctgtgctttgtgcacacagtgccctgggaccagctgttcaggaacccccaccaggccctgctgcacacagccaacagaccagaagatgaatgtgtgggggagggcctggcctgccaccagctgtgtgcccggggccactgctggggccctggccccacccagtgtgtgaactgcagccagttcctgcggggccaggagtgtgtggaggagtgccgggtgctgcagggcctgccccgggagtatgtgaatgcccggcactgcctgccctgccaccctgagtgccagccccagaatggatctgtgacctgctttggacctgaggccgaccagtgtgtggcctgtgcccactacaaggacccccccttctgtgtggcccgctgccccagcggcgtgaagccagacctgagctacatgcccatctggaagttcccagatgaggagggcgcctgccagccctgccccatcaactgcacccacagctgtgtggacctggatgacaagggctgcccagctgagcagagggccagccccctgaccagcatcatctctgctgtggtgggcatcctgctggtggtggtgctgggcgtggtgtttggcatcctgatcaagaggcggcagcagaagatcaggaagtacaccatgaggcggctgctgcaggagacagagctggtggagcccctgaccccatctggggccatgcccaaccaggcccagatgaggatcctgaaggagacagagctgaggaaggtgaaggtgctgggcagcggggcctttggaacagtgtacaagggcatctggatcccagatggagaaaatgtgaagatccctgtggccatcaaggtgctgcgggagaacaccagccccaaggccaacaaggagatcctggatgaggcctacgtgatggccggcgtgggcagcccctacgtgtcccggctgctgggcatctgcctgaccagcacagtgcagctggtgacccagctgatgccctacggctgcctgctggaccacgtgcgggagaacagaggccgcctgggcagccaggacctgctgaactggtgcatgcagatcgccaagggcatgagctacctggaggatgtgcggctggtgcaccgggacctggccgccagaaatgtgctggtgaagagccccaaccacgtgaagatcacagactttggcctggcccggctgctggacattgatgaaacagagtaccacgcagatggcggcaaggtgcccatcaagtggatggccctggagagcatcctgcggcggcgcttcacccaccagagtgatgtgtggagctatggagtgacagtgtgggagctgatgaccttcggggccaagccctatgatggcatcccagcccgggagatcccagacctgctggagaagggggagcggctgccccagccccccatctgcaccattgatgtgtacatgatcatggtgaagtgctggatgattgattctgagtgccggccccgcttccgggagctggtgtctgagttcagcaggatggcccgggacccccagagatttgtggtgatccagaatgaagacctgggccctgccagccccctggacagcaccttctaccgcagcctgctggaggatgatgacatgggagacctggtggatgctgaggagtacctggtgccccagcagggcttcttctgcccagaccctgcccctggagctgggggcatggtgcaccaccgccacaggagcagcagcaccaggtctgggggcggggacctgaccctgggcctggagcccagcgaggaggaggcccccaggagccccctggcccccagcgagggcgccggcagtgatgtgtttgatggagacctgggcatgggcgccgccaagggcctgcagagcctgcccacccatgaccccagccccctgcagcgctacagcgaggaccccaccgtgcccctgcccagcgagacagatggctacgtggcccccctgacctgcagcccccagccagaatatgtgaaccagccagatgtgcggccccagccccccagcccccgggagggccccctgcctgctgcccggcctgctggggccaccctggagcggcccaagaccctgagccctgggaagaatggagtggtgaaggatgtgtttgcctttggaggagctgtggagaaccctgagtacctgaccccccagggcggggccgccccccagccccaccccccaccagccttctccccagcctttgacaacctgtactactgggaccaggaccccccagagcggggggccccacccagcaccttcaagggcacccccacagctgagaaccctgagtacctgggcctggatgtgcctgtgtag

SEQ ID NO: 108520 - DNA, 3723 bp, Artificial Sequence
  derived and/or modified sequence
atgccccggggctcctggaagccccaggtgtgcaccggcacagacatgaagctgcggctgcctgccagccctgagacccacctggacatgctgcggcacctgtaccagggctgccaggtggtgcagggcaacctggagctgacctacctgcccaccaatgccagcctgtccttcctgcaggacatccaggaggtgcagggctacgtgctgattgcccacaaccaggtgcggcaggtgcccctgcagaggctgcgcatcgtgcggggcacccagctgtttgaggacaactatgccctggccgtgctggacaacggggaccccctgaacaacaccacccctgtgactggagccagccctgggggcctgcgggagctgcagctgcggagcctgacagagatcctgaagggcggcgtgctgatccagaggaacccccagctgtgctaccaggacaccatcctgtggaaggacatcttccacaagaacaaccagctggccctgaccctgattgacaccaacagaagccgggcctgccacccctgcagccccatgtgcaagggcagccgctgctggggcgagagcagcgaggactgccagagcctgaccaggacagtgtgtgccggcggctgtgcccgctgcaagggccccctgcccacagactgctgccacgagcagtgtgccgccggctgcaccggccccaagcacagcgactgcctggcctgcctgcacttcaaccacagcggcatctgtgagctgcactgcccagccctggtgacctacaacacagacacctttgagagcatgcccaaccctgagggccgctacaccttcggggccagctgtgtgacagcctgcccctacaactacctgagcacagatgtgggcagctgcaccctggtgtgccccctgcacaaccaggaggtgacagcagaagatggcacccagagatgtgagaagtgcagcaagccctgtgcccgggtgtgctacggcctgggcatggagcacctgcgggaggtgcgggctgtgaccagcgccaacatccaggagtttgctggctgcaagaagatcttcggcagcctggccttcctgcctgagagctttgatggagaccctgccagcaacacagcccccctgcagcctgagcagctgcaggtgtttgagaccctggaggagatcaccggctacctgtacatcagcgcctggccagacagcctgcctgacctgagcgtcttccagaacctgcaggtgatccggggccgcatcctgcacaatggagcctacagcctgaccctgcagggcctgggcatctcctggctgggcctgcggagcctgcgggagctgggcagcggcctggccctgatccaccacaacacccacctgtgctttgtgcacacagtgccctgggaccagctgttcaggaacccccaccaggccctgctgcacacagccaacagaccagaagatgaatgtgtgggggagggcctggcctgccaccagctgtgtgcccggggccactgctggggccctggccccacccagtgtgtgaactgcagccagttcctgcggggccaggagtgtgtggaggagtgccgggtgctgcagggcctgccccgggagtatgtgaatgcccggcactgcctgccctgccaccctgagtgccagccccagaatggatctgtgacctgcttcggccctgaggccgaccagtgtgtggcctgtgcccactacaaggacccccccttctgtgtggcccgctgccccagcggcgtgaagccagacctgagctacatgcccatctggaagttcccagatgaggagggcgcctgccagccctgccccatcaactgcacccacagctgtgtggacctggatgacaagggctgcccagctgagcagagggccagccccctgaccagcatcatctctgctgtggtgggcatcctgctggtggtggtgctgggcgtggtgtttggcatcctgatcaagaggcggcagcagaagatcaggaagtacaccatgaggcggctgctgcaggagacagagctggtggagcccctgacccccagcggggccatgcccaaccaggcccagatgaggatcctgaaggagacagagctgaggaaggtgaaggtgctgggcagcggggccttcggcaccgtgtacaagggcatctggatcccagatggagaaaatgtgaagatccctgtggccatcaaggtgctgcgggagaacaccagccccaaggccaacaaggagatcctggatgaggcctacgtgatggccggcgtgggcagcccctacgtgtcccggctgctgggcatctgcctgaccagcacagtgcagctggtgacccagctgatgccctacggctgcctgctggaccacgtgagagaaaatagaggccgcctgggcagccaggacctgctgaactggtgcatgcagatcgccaagggcatgagctacctggaggatgtgcggctggtgcaccgggacctggccgccagaaatgtgctggtgaagagccccaaccacgtgaagatcacagactttggcctggcccggctgctggacattgatgaaacagagtaccacgcagatggcggcaaggtgcccatcaagtggatggccctggagagcatcctgcggcggcgcttcacccaccagagtgatgtgtggagctatggagtgacagtgtgggagctgatgacctttggagccaagccctatgatggcatcccagcccgggagatcccagacctgctggagaagggggagcggctgccccagccccccatctgcaccattgatgtgtacatgatcatggtgaagtgctggatgattgacagtgaatgtcggccccgcttccgggagctggtgtctgagttcagcaggatggcccgggacccccagagatttgtggtgatccagaatgaagacctgggccctgccagccccctggacagcaccttctaccgcagcctgctggaggatgatgacatgggagacctggtggatgctgaggagtacctggtgccccagcagggcttcttctgcccagaccctgcccctggggccggcggcatggtgcaccaccgccacaggagcagcagcaccaggtctgggggcggggacctgaccctgggcctggagcccagcgaggaggaggcccccaggagccccctggcccccagcgagggcgccggcagtgatgtgtttgatggagacctgggcatgggcgccgccaagggcctgcagagcctgcccacccatgaccccagccccctgcagcgctacagcgaggaccccaccgtgcccctgcccagcgagacagatggctacgtggcccccctgacctgcagcccccagccagaatatgtgaaccagccagatgtgcggccccagccccccagcccccgggagggccccctgcctgctgcccggcctgctggggccaccctggagcggcccaagaccctgagccctgggaagaatggagtggtgaaggatgtgtttgccttcggcggcgctgtggagaaccctgagtacctgaccccccagggcggggccgccccccagccccaccccccaccagccttcagccctgcctttgacaacctgtactactgggaccaggaccccccagagcggggggccccacccagcaccttcaagggcacccccacagcagaaaatcctgagtacctgggcctggatgtgcctgtgtag

SEQ ID NO: 108521 - DNA, 3678 bp, Artificial Sequence
  derived and/or modified sequence
atgaagctgcggctgcccgccagccccgagacccacctggacatgctaaggcacctctaccagggatgtcaggtggtccagggcaatctagagctgacttacctgccaaccaacgcttcactgtcgttccttcaggatattcaagaagtccaggggtatgtgcttattgctcacaaccaagtgagacaagtccctttgcagcggctcaggatagttagagggacacaactgtttgaggacaactacgctctcgcagtcctggataatggcgaccctctcaacaacaccacacccgtgactggagcttcaccaggtggcctcagggaactgcagttacggtccctcaccgaaatcttaaagggcggagtcctgattcaacgcaatcctcagctgtgctaccaagacacaatcctttggaaagatatcttccacaagaataatcagttggccctgaccctgatcgacacaaacagatctcgagcatgtcatccatgcagcccaatgtgtaagggcagcagatgttggggagagagttctgaagattgccagtctctgacaaggactgtatgcgctggggggtgtgcccgatgcaagggcccccttccaactgactgttgtcatgagcagtgtgcagcaggatgtaccggccctaaacatagcgattgtctcgcgtgtcttcacttcaaccacagcggcatctgtgaactgcactgtccggcactcgtgacttacaacacagacacgttcgagtctatgcccaatcctgaggggaggtatacttttggcgcttcatgcgtgaccgcttgcccatataattacctgtccaccgatgtcggttcatgtaccctggtgtgccccctgcataaccaagaggttacagccgaggatggaacccagaggtgcgagaagtgctcaaagccgtgtgcgagagtgtgttacggcctggggatggaacatctgcgggaggtacgggcagtgactagtgctaacatacaggagtttgcaggctgcaagaagatttttggttctcttgcctttctccccgagtcattcgatggagatcccgccagtaataccgcacctttacagccggagcagttacaggtcttcgaaacactggaagagatcacaggctatttatatatcagcgcctggccagacagcctgcccgatttgtcggtgtttcagaatctgcaggtgatacgcggccgaattttacacaatggggcatactccctcacgttgcagggattgggaatctcttggttgggcttgagaagcctgagagaattgggatcggggctagctctgatccaccacaacacccacctttgttttgtgcatacagtgccttgggaccagttattcagaaatcctcatcaagccctgttacatacggccaatcggccagaggatgaatgtgtcggcgagggcttagcatgtcaccagctctgtgctagaggccactgctggggacctggacctactcaatgcgtaaattgtagtcagtttcttaggggacaggagtgcgtagaagaatgcagagtcctgcaaggcctgcccagagaatacgtgaacgctagacactgtttgccctgccacccggagtgtcagccccagaacggttctgtcacctgctttgggcctgaggctgatcaatgcgttgcgtgcgcccactacaaagacccaccattctgcgttgcccgttgtccttccggagtgaagccggacctgtcttatatgcctatctggaagttcccagatgaggagggcgcttgccagccctgcccgatcaactgtacacactcatgcgtcgaccttgacgacaagggctgtcccgccgagcagcgggcttctcctctgacttctataatatcagcggtggttggcatcctgctagttgtggtgcttggcgtggtgtttggcattcttattaaaaggagacagcagaagatccggaagtacaccatgaggaggctcctgcaggaaaccgaactcgtggagcctctaacacctagtggagcaatgcccaatcaggcacagatgcgtattctgaaggagaccgaattacgaaaggttaaagtactggggtccggggcattcggaaccgtatataagggaatctggattccagatggagagaacgtcaagatccctgtggcgattaaggtcctgagggaaaacaccagcccaaaagcaaataaggagattctggacgaagcttacgtgatggcaggagtggggagcccctatgtgtccagactcttgggcatctgtctgacctcaacagtccagctcgtaacacagttgatgccctatggctgtttgctggaccacgtccgcgagaatcggggcaggctcggttctcaagatttacttaattggtgtatgcagattgcaaagggtatgagctacttggaagacgtccgccttgtacatcgggatctggctgcgagaaatgtgttagtcaaaagtccaaatcatgtgaaaattacggactttggtctggcaagactgcttgacatcgacgagaccgagtaccacgctgacgggggcaaggtgcctattaagtggatggctctcgaatccatcctgcgtagacggttcacacaccagtccgacgtgtggtcctatggagtgactgtgtgggagctcatgacatttggagcaaagccctacgacggtatacccgcgagagagattcctgacctgttagagaagggcgagcgactcccgcagccccccatctgtacaatagacgtgtatatgatcatggtgaagtgttggatgatcgatagtgaatgtagaccgaggtttcgggaactcgtcagtgagttctcacgaatggcacgggatcctcaacggtttgttgttattcagaatgaggaccttggaccagcgagccctctggattccactttctaccgaagcttgctggaggatgacgacatgggagacctggtggatgctgaggaatatttggttccacagcaggggttcttttgccccgaccctgccccgggtgcgggcggcatggtgcaccatcggcacaggagcagtagcacaagatccggtggcggcgacctcactctcggcttagaaccttccgaggaagaagcgccccggtctcctctggcccctagcgagggcgccggctcagatgtgttcgacggcgatcttggaatgggggctgccaaaggcctgcagtctctacctacccacgacccttcacctctgcagcggtatagcgaagaccccaccgttcctctccccagtgagactgacggctatgtggctcccttgacttgcagtccccaacccgagtacgtgaaccagcccgatgtccgacctcagcccccctcacccagagagggccctctgcctgcagcacgacccgctggagccacattggaacgccccaaaacactgagtcccggtaagaacggagtcgtaaaagacgtcttcgcattcggcggggctgtggagaatcctgagtacttgaccccacagggcggcgccgccccgcaaccgcatccgccccctgcattttctcccgctttcgataacctgtactactgggaccaggacccgccagaacgaggtgccccccccagcacttttaaaggcacaccaacagccgaaaatccagagtatttgggcctggacgtccctgtatag

SEQ ID NO: 108522 - DNA, 2940 bp, Artificial Sequence
  derived and/or modified sequence
atggagctggccgccctgtgccggtggggcctgctgctggccctgctccctccaggggctgcttccacccaggacaactacctatccacagatgttggttcctgcacactcgtctgcccccttcacaatcaagaagtgaccgcggaagatggaactcagcgatgcgagaagtgcagcaagccgtgtgctcgggtttgctatggactggggatggaacacttaagggaggttcgggccgtgacaagtgccaatattcaagagttcgctgggtgtaagaagattttcggtagcctggcatttctcccagagtcatttgatggagaccctgccagcaacacagcaccactgcagcccgagcagctacaggtttttgaaacactcgaggaaatcaccgggtatctatatattagcgcttggccagattccctccccgatctgagcgtgttccagaatctgcaggtcatccgaggtcgaatcctccacaatggagcctacagcctgacactccaggggttgggcattagttggttgggcctgcgtagccttagggagctgggctctgggctcgcactgattcaccacaacacccatctatgcttcgttcatacagttccctgggaccagctttttcgaaatccacatcaggctctgctgcatacagccaataggccagaggacgaatgtgttggtgaaggcctcgcctgccaccagctgtgcgcgaggggacactgttggggacccggtcctacccagtgtgtaaactgttcgcagtttctacgtggacaagaatgtgtcgaagagtgtagggttctccagggactcccacgcgagtatgttaatgcccggcactgccttccctgtcatcccgaatgccagccacagaacgggtcagttacttgcttcgggccagaagctgatcaatgcgtcgcatgtgcccattataaggatcctccgttttgcgttgcacgctgtcccagcggcgtcaagcctgatctgagctacatgccaatatggaaattcccagacgaggaaggggcatgtcagccttgtccaatcaattgcacccattcttgcgtggacctcgacgacaagggctgtcccgctgaacagagggcttctcctctcacttcaattatttccgccgtggtgggaatcctcctcgtggtggtgttgggggtggtttttgggattctcattaagcgccgccagcagaagataaggaagtacaccatgcgtcggcttctgcaggaaacagagctcgtggaacctttgaccccatcgggggcaatgccaaaccaggctcagatgcgaatccttaaggaaacggaactgcggaaagtcaaggttctggggagcggagcctttggaacggtctacaaagggatctggatccccgatggcgaaaacgtcaaaataccagttgccattaaagtcctcagagagaatacaagtcccaaggctaacaaggagatccttgacgaggcatatgtcatggccggggtcggtagcccttacgtgagcagactgctcggcatatgccttacctcaacagtgcagcttgtgactcaattaatgccatatggttgcttattagaccacgtacgagagaaccggggccgtttgggatcccaggacctgctgaactggtgtatgcagatcgcaaagggcatgtcctatttggaggacgtccgcttagttcaccgggacctcgcagctaggaatgtgctcgttaagagccccaaccatgtgaagatcacagatttcggtctggcacgtcttctggatattgacgaaacagaataccatgctgatggcggcaaagtgcccattaagtggatggccctagaaagtattttacggcgccgattcacccaccagtccgatgtctggtcttacggagttacagtttgggaactgatgacttttggcgctaagccttatgacggaatacccgcccgtgagataccagaccttctggagaagggcgaacgtctgccgcagccacccatatgcacaattgacgtctatatgatcatggtcaagtgctggatgatcgacagcgaatgcagacctcgatttagggagctggtgtctgaattttcccgcatggccagagacccgcaacggtttgtggtaatccagaacgaggatctcggccccgcgtcaccgttagacagtacattctacagaagcctcctggaggatgacgatatgggggacctggtggacgccgaggaatatttagtgccccagcaggggtttttctgcccagatcccgcccccggggctggtggaatggtgcaccaccgccatcgaagctcttctaccagaagcgggggcggggacctcacgctggggttagagccctccgaggaggaggcgccccggtcacccttggctccgtccgagggagccggcagtgacgttttcgacggggacctcggtatgggtgccgcaaaggggctacagtcactgccaactcatgatccatcaccactgcaacggtactctgaggacccgactgtgccccttccctccgagacagacggatacgtggctcctcttacttgctctccgcagccagagtacgtgaatcaaccagatgtgagaccacagccacccagccccagggagggaccactgccagccgcccggcctgccggtgccaccctggaacgccccaagacactctcacccggaaaaaacggtgtggtgaaggatgtattcgcctttgggggcgccgtggagaacccggagtacctgactccgcaaggtggggctgctccccagcctcaccctccaccggcgtttagccccgcgttcgataatttatactactgggatcaagaccctcccgaacggggcgcgccgccctccactttcaagggcacacctacagcagagaacccagagtacctcggattggacgtaccggtctag

SEQ ID NO: 108523 - DNA, 3678 bp, Artificial Sequence
  derived and/or modified sequence
atgaagctgcggctgcccgccagccccgagacccacctggacatgctgcgccacctctatcaaggatgtcaagtggtgcagggcaatctagagctaacttacctgcctaccaacgctagtctgtcattcctgcaggacattcaggaagtgcaagggtatgtgcttattgctcacaaccaggtgagacaggttcctctgcagcgcctaagaattgtccgaggaactcagctgtttgaggacaactacgcccttgccgttctggataacggggacccgctcaataataccacccctgtaaccggcgccagcccaggtggattgcgggagcttcaactcagatctttgaccgagattctgaagggaggagttctgatccagcggaatccacaactttgctaccaggacacaatcctttggaaggacatcttccataaaaataaccagctggctctgactctcatcgacacaaacaggtcgcgtgcttgtcacccatgtagccctatgtgcaaaggatcacgctgttggggcgagagttccgaggactgtcagagtcttacccgaaccgtctgtgccggcggatgcgctcgatgtaaggggccgctaccaacagattgttgccatgagcagtgtgctgcagggtgtaccggacctaaacattctgactgcctagcatgtctccacttcaatcactcagggatctgcgagttacactgtcccgccctggtgacttataacacagatacatttgaaagcatgcccaatcccgagggaaggtatacatttggagcctcctgcgtgactgcttgtccctacaattatctgtctacagatgtgggcagttgtaccttagtgtgcccgctgcataatcaagaggttacagccgaggatgggacgcagcggtgtgaaaaatgttccaagccatgtgcacgcgtgtgctacggtctgggtatggaacatctgagagaagtgagagcagtcactagcgcaaacatacaagagtttgcagggtgtaagaagatttttggctcactcgcttttctccccgagtcgtttgacggagatcctgcaagcaatactgctccactgcaacctgaacagctccaggtatttgaaacccttgaagaaattaccgggtacttgtatatttcagcctggcccgattctttacctgatttatccgtgtttcaaaacctccaagtgatccggggccgcatacttcacaacggggcctactcacttacgttgcagggcctgggcatcagctggctcgggctgcgctccttacgcgagttgggtagcggcctagcattgattcaccacaacacacacctctgttttgttcacactgtgccatgggatcaactgttccgaaatcctcaccaagctctactgcacaccgccaatcggcccgaagatgagtgcgttggtgagggcttggcatgccaccaactttgtgccagaggccattgctggggaccaggacctactcaatgtgtgaactgcagccagttccttaggggccaagaatgcgtcgaggagtgtagagtactgcaggggctgccacgggaatacgtgaacgcgcgacattgcctgccttgccaccctgaatgccagccccagaatggttctgtcacttgcttcggcccagaggcagaccaatgtgtagcgtgtgcccactataaggatccgcctttttgcgtcgcacgctgcccctcgggcgtgaagcccgacctcagctacatgccaatctggaagttccctgatgaggagggtgcctgtcagccttgccccattaattgtacgcatagctgtgtcgatctggatgataaaggatgtccggcagaacagagggcctctcctctcacctcgatcatcagtgccgtggtaggaatattgctcgtggtagtgctcggcgttgtgttcgggattctgattaaaaggcgccagcaaaagatacgcaaatataccatgcgcagactcttacaggagactgagttggtagagcccctgacgccctctggtgccatgcccaaccaggcccaaatgcgcatcctcaaggagactgagctgcggaaggtgaaagtgctaggttccggggcttttggcaccgtgtacaaggggatttggattcccgacggcgagaacgttaaaatccctgtcgcaatcaaagtcctccgtgagaacacctctcctaaggccaataaggagatattggatgaagcctacgtgatggccggggtgggtagtccctacgtgtcacggctcttagggatttgcctaacttctaccgttcagttggttacccagttaatgccctacggctgcctgttagaccacgtgcgcgaaaacaggggaaggttaggatcacaagatctccttaattggtgtatgcagatcgcaaaaggaatgtcctatttagaagacgtgcgactagtccatagagacttagccgcgaggaacgtgctcgttaagtcccccaatcatgtgaaaatcaccgacttcgggctggcccggctgctggatatcgatgaaacggaatatcacgcggatggcggtaaggtgccaatcaagtggatggctcttgaatcaattctacgtaggcgatttacacaccagagcgatgtgtggtcctacggtgttacggtctgggaactgatgaccttcggagcaaagccttatgatggaatccccgcccgtgagatccccgatctgctcgagaaaggggagcgtctccctcagccaccaatttgtacaattgatgtttacatgataatggtgaaatgctggatgattgacagtgagtgtaggccgcggttcagagaactagtatctgagttcagcagaatggcgcgcgatcctcagcggtttgttgtcatccagaacgaagacttaggacccgccagtccactcgattcgaccttttataggagtttgctcgaagatgatgatatgggtgacctcgtggatgccgaagagtacttagtcccacagcaaggattcttctgtcccgacccggcccccggagcaggcgggatggtccaccatcgtcatcgctctagctcaactcggagcggaggcggcgacttgactctgggcctggagccgtctgaggaggaagccccacggtcccccctggctcctagcgaaggtgccggatcagatgtcttcgatggcgacttggggatgggagctgccaaaggattgcagtctttacctacccacgaccctagccctcttcagcgatactctgaggacccaacggttccgctacctagcgagactgatggatacgtggcacccctaacgtgttcaccgcagccggagtatgtaaatcaacctgacgttagacctcagccaccgagccctcgagaagggcctctgcccgctgctaggcctgccggagctacacttgaaaggcccaagacactgtcccccgggaaaaacggtgtcgttaaagatgtcttcgctttcggaggcgcagtcgagaatccagaatacttgactcctcaggggggcgccgctcctcagcctcatccgcccccagcattttctcctgcgtttgataacctgtactactgggatcaggaccctccagagcggggggcgccaccttctacctttaaagggactccaaccgctgaaaaccccgaatatctggggctggacgtgcccgtgtag

SEQ ID NO: 108524 - DNA, 3723 bp, Artificial Sequence
  derived and/or modified sequence
atgccccggggcagctggaagccccaggtgtgcaccggcaccgacatgaaattgcgcctgccagctagtccagagacacacttggacatgctgaggcacctctatcaagggtgtcaagtggtgcagggcaacttagaacttacatacttgcctactaatgcctcactctcatttcttcaggacattcaggaagtgcagggatatgtgctgattgcccacaaccaagtaagacaggtaccattacaacgtctgcggatcgttcggggaacgcagctttttgaagacaattacgccctggccgttctggataacggcgaccccctgaacaacactacacctgttacaggggcatctccgggcggactgcgtgaactccagctcaggagccttactgagatacttaaaggaggggttcttatacaaaggaatccacaactatgttaccaggacaccattttgtggaaggatatctttcataaaaataaccagttggcgctgacactcattgacactaaccgctcgagagcatgccacccctgtagcccaatgtgcaagggctcacgctgctggggggaaagcagtgaggactgtcagagcctcactcggacagtctgtgccgggggctgcgcgcgctgcaagggccctttgccaacagactgctgtcatgaacagtgtgctgctggctgtaccggccccaaacattcggattgtttggcatgcttgcattttaaccacagcggcatctgcgagctccactgtcccgctcttgtaacgtacaacaccgataccttcgagtccatgccaaaccctgaaggccgttacacctttggagcctcttgtgtaacggcttgcccatataactacctgagtacggatgtaggctcttgtactctggtgtgtcccttgcacaatcaggaagtaactgccgaggacggcacacaacggtgcgagaaatgttcaaaaccgtgcgcccgcgtctgctatggcttggggatggaacatctccgcgaggtcagggccgtgacttcagctaatattcaggagttcgcgggctgcaagaaaattttcggctctctggccttcctgcccgagagttttgacggcgatccggcgagcaataccgcaccactccagcctgagcagctccaagtgtttgaaacactggaggagatcacagggtatctgtacatctccgcctggccggacagtctgcccgacctgtctgtatttcaaaatctgcaggtcattagagggaggattctgcataatggcgcctacagcctgactctgcagggactgggcattagttggttaggtctccgctctctgcgagagcttggcagtgggctagccctgatacatcataacacccatctgtgctttgtccatacggtcccatgggatcagttgttccggaacccccaccaggccttactgcataccgctaatcggccagaagacgaatgtgtcggcgaggggttagcctgccaccaactgtgcgcaagaggacactgctggggacccgggcccactcagtgcgtcaattgttcgcagttcctgcgcgggcaggagtgcgtggaggaatgtcgagtgctgcaaggtctgcctagagagtacgtgaatgcccgccactgtctgccctgccaccctgagtgtcagccacagaatggatcagtgacgtgcttcggacccgaagcagaccagtgtgttgcctgcgcccactacaaggatccacccttttgtgtggcaaggtgtccctctggggtcaagcctgacctgtcatacatgcctatttggaaatttcccgatgaggagggtgcatgccagccgtgccctatcaattgtacccattcttgcgttgacttagacgacaagggatgtcctgccgagcaacgtgcttctccactcacgtcaattatttccgcagttgttggcatcttgctcgttgttgtgctaggtgttgttttcggtatcctgattaagcgtaggcagcaaaaaatcagaaaatatactatgagacgtctcctccaggagacagaacttgtggaacccctgactccatctggagctatgccaaaccaggcccaaatgcggattttgaaagagaccgaactccggaaagtcaaggtccttggaagtggcgccttcggcacagtctataagggtatctggattcccgatggggagaacgtcaagattcccgtggcaatcaaggtgttgcgcgagaacacctcacctaaagccaataaagaaatccttgacgaggcttatgttatggctggtgtcggctctccgtatgtgtcccgactcctcggcatttgcctaacctccaccgtgcagttagtcacccaactgatgccctatggctgcctccttgatcacgtccgggaaaaccggggcaggctcggatcccaggatctgctgaattggtgtatgcagattgcaaagggaatgtcctatctggaggatgtacggctggtccatcgggatttggcagcccgcaatgtgcttgttaaatcccccaatcacgtcaagataaccgattttggcttagccagactgttggacatcgacgaaaccgagtaccatgcggatggagggaaggtgccaataaaatggatggcactcgagagcattctccggcgcaggttcacacaccagagtgacgtctggagctacggcgtgacagtgtgggaactcatgacattcggtgcaaagccttacgacggcataccagcaagggagatccctgacctgctggagaagggcgaaaggcttcctcagcctcctatctgtaccattgacgtgtacatgattatggtgaagtgttggatgatagatagcgaatgccggcccagattccgggagttagtctctgagttttccagaatggccagagatccccagagatttgtggtgatccagaacgaagacctcggtccggccagcccgctcgattccacattctatcgctctcttctggaggatgatgatatgggagatctggtggatgccgaggagtatctggtgcctcagcaggggtttttctgcccagatcctgcacccggcgctggcggtatggtccaccaccgccatcgctcttctagcacacgatctgggggcggcgacctgacgctgggactggaacctagtgaggaagaagctccacgttccccgctggctccatccgagggggccggaagtgatgtgttcgatggagatctggggatgggcgccgccaaagggctacagtccctcccgacgcatgacccaagcccgctgcagcgatatagtgaagatcccactgttcctctgccctctgaaaccgacggctacgtggccccgttgacctgcagtccccaaccagagtatgtaaaccaacccgacgttcgcccacagccaccctcccccagagaggggccactgcccgccgcgaggccggctggggcgacattagaaagaccgaaaacactgagcccgggaaagaacggggtggtcaaagatgtattcgctttcggcggggccgtagaaaatcctgaatatctcacaccacaggggggtgccgccccacaacctcaccctccacccgctttcagtccagcttttgacaacctctattactgggatcaggaccccccagagaggggggctcctccgtcaacctttaaaggcacccctactgccgagaacccagaatatctcggccttgacgtgcccgtttag

SEQ ID NO: 108525 - DNA, 3678 bp, Artificial Sequence
  derived and/or modified sequence
atgaaactccgactccccgctagtccagaaacccatcttgatatgctgaggcacctgtatcaggggtgtcaggtcgttcagggaaaccttgagctcacatatctccctacaaacgccagcctgtctttcctgcaggacatccaggaagtgcagggctatgtgttaattgcccacaatcaagtacggcaggttccattacagcggttacggatagtaaggggcacccaactgttcgaagataattacgcactggcagtcctcgacaacggggacccattaaataacaccacacccgtcacaggagcttcgcctggcggactgagggagcttcagctgagatctctgacggagatccttaaaggaggcgtgctaatacagcgcaacccccagctctgttaccaggacacaatcttgtggaaggatatatttcacaagaataatcagctggcgctgacgctgatagatacgaacaggagtagagcttgccatccatgctctcccatgtgcaagggtagcagatgctggggagagagtagcgaagattgtcaatccctgaccaggacggtgtgtgcgggagggtgtgccagatgtaaaggaccattgcctaccgactgctgccatgagcagtgcgcagccggttgtactggtcccaagcacagtgactgtctcgcctgtctgcacttcaaccattccggaatatgcgagttgcactgccccgcactggtgacttataacaccgacacatttgagtcgatgcctaaccccgagggaaggtatacatttggtgcgagctgtgtgacggcctgcccctacaattacctcagtaccgacgtcgggtcctgcactctggtgtgccccctgcacaatcaggaggtaacggcggaggacggtacccagaggtgtgagaaatgctcaaagccttgcgctagagtttgttacggactggggatggaacacctgagggaggtacgcgctgtgacgagtgcaaacatacaggaattcgctggctgtaaaaagatctttggcagcctcgctttcctccccgaatcattcgatggggatcctgcaagcaacaccgcgcctcttcagccagagcagctgcaggtatttgagaccttagaggaaatcaccggctatttatatatatctgcgtggcctgacagcctgccagacctatcagtgttccaaaatcttcaggtcatccggggtcgcatcctacataatggggcttactcactcacccttcagggcctcggaatatcttggcttggcctgaggtccctccgggagctgggtagtggactggcacttattcatcacaacacacatctgtgctttgtgcatacggtaccttgggatcaactcttccggaacccccatcaagctctgctgcatactgccaatagacctgaggatgagtgtgtgggggaaggattggcatgccatcagctatgcgctcgcggtcactgttggggtcctgggcctacccagtgtgtcaactgttctcagtttctccgtggacaggagtgcgtggaagagtgcagggtcttacaggggctcccaagggagtatgtgaacgccaggcattgcttaccctgccatcctgagtgccagccccagaatggctctgtaacctgtttcggccctgaagccgaccagtgcgtggcttgcgcccactacaaggatcctcccttttgcgtggcgcgttgcccttccggagtgaaaccagatttgtcctacatgccgatctggaagttcccagatgaggagggagcctgtcagccctgccctattaattgcacccactcctgtgtggaccttgacgacaaggggtgtcctgccgagcagcgcgcatccccattgacctctatcatctcagctgtcgttggcattctgctagtcgtggtgttaggtgtggtgtttggaattctgattaagcggcgacagcagaaaattcgcaagtatacaatgcgcagactgctgcaggagacagaattagtggagccccttactccgtccggggcaatgcccaatcaggcacagatgcggattctcaaagagaccgaacttaggaaagtcaaagtcttaggctccggcgctttcggcactgtgtacaagggcatatggattcctgacggcgagaatgtgaagattcctgtcgctatcaaagtcctgagagagaacaccagcccaaaagccaacaaagagatcctcgacgaggcttacgtgatggccggagtggggagtccatatgtctcaagacttctaggaatttgcctgaccagcactgtgcagctggtgacacagctcatgccatacggttgcctcctggaccacgtgagagagaaccgaggtagattaggaagccaggatctgctcaactggtgtatgcagatagccaaaggcatgtcttatttggaagatgtgcggctggtccatcgcgaccttgctgccaggaatgtgctggtgaaaagtcccaatcacgtgaagattactgatttcggcctggccagattgctggacattgatgaaaccgagtatcatgctgatggcggaaaggtgcccattaaatggatggcactggagagcattctgcgccgacggttcacccaccagtccgatgtgtggtcttacggggtaactgtgtgggaactcatgacatttggagctaaaccatatgacgggatacctgctcgagagatacccgacttgctagagaaaggagagaggctgccacagccgccaatatgcaccattgatgtctatatgataatggtcaaatgctggatgattgattcagagtgcaggcctaggttccgggaactagtctccgagttttctcgaatggcacgggaccctcaaagattcgttgtgattcagaatgaggatctggggccagcctcccctcttgattccaccttctaccgctcactgttggaagacgacgacatgggtgacctagtcgacgccgaagaatacttggttccccagcaggggttcttctgccctgatcctgcaccaggagccggaggcatggttcatcaccgacaccgttcttcctccactcgcagcggagggggagatctgactctcggcctcgagccttcagaagaagaggcgccaaggagccccttggctcctagcgagggagcaggctcggatgtgtttgacggcgatctgggtatgggggctgcaaagggtctccaaagcctgcccacacacgatccatctcctcttcagagatacagcgaggacccaacggtccctttgccatccgaaaccgacggatacgtcgccccactgacatgcagcccccagcctgagtacgtaaatcagccggatgtccggcctcaaccacctagccccagagagggcccactgcccgctgcccgtcccgcaggggctaccctggagcggccaaagacactttcccccggaaaaaatggagtggtgaaagacgtttttgctttcggtggtgccgtggagaatcctgaatacctgactccacaggggggagctgcccctcagccgcatcccccacccgcattcagtcccgcttttgacaatctctactattgggatcaagatccccctgagcgtggcgctccccctagtacattcaaggggacccctaccgccgaaaatccggagtacctgggactggacgtgccggtctag

SEQ ID NO: 108526 - DNA, 2940 bp, Artificial Sequence
  derived and/or modified sequence
atggagctggctgctctgtgtcgctgggggctgctgctggccctgctcccccctggtgccgcaagtactcaggataactacctttcaacagacgttggctcatgcacactagtatgcccccttcataatcaggaagtgaccgctgaggatgggacccagcgatgtgagaagtgcagtaaaccctgcgctcgtgtgtgctacggcctggggatggagcatttgcgcgaagtaagggcagtgaccagcgcaaatattcaggaatttgcgggatgcaagaaaatcttcggctctctcgcctttctgcctgaatcctttgatggcgaccctgcctctaataccgccccacttcagcccgaacaactccaggtgttcgagactctggaagagataaccggctacctgtatatttctgcttggcccgatagtctgcccgatctgtcagtctttcagaacctacaagttattcgcggacgcattctccacaacggggcttatagcctcaccttacagggcttaggcatcagctggttggggctgcggagtctgcgggaactgggaagtggactggctcttatccaccataacactcacctgtgctttgtgcacaccgtcccatgggaccagcttttcagaaatcctcaccaggcgctgttgcataccgcaaacaggccagaggacgagtgtgtcggtgagggtcttgcttgtcaccagctatgcgcaagaggacactgctgggggccaggcccaactcagtgcgtgaactgctcccaattcctgaggggccaagagtgtgtcgaggagtgccgggtgttacaagggctccctcgggagtacgtgaatgccagacactgtctgccctgtcaccccgaatgtcaaccacaaaacggctctgtgacatgctttggaccagaagccgatcagtgcgtggcatgtgctcactataaggatccccctttctgcgtggcgcgatgcccttcaggggtgaagcctgacctctcctacatgccaatttggaagttccctgatgaagagggcgcttgccaaccttgccccatcaattgtacccacagttgtgtggacctcgacgataagggctgccctgccgaacaacgcgcatctcctctcacctctattatctccgcggtggtggggatcctgcttgtggtcgtgttaggagttgtgttcggcatcctgattaagagacggcagcaaaagataaggaagtataccatgcgccgactgctgcaggaaaccgagcttgtggagccattgacaccgagcggggcaatgccaaaccaggcccagatgaggattctgaaggagactgaactcagaaaggtgaaggttctgggaagcggtgccttcggaaccgtctataaagggatatggattcccgatggagaaaacgtcaagattccggtcgccatcaaagtgctgagggagaatacctctccaaaggccaacaaagaaattcttgacgaagcttacgtgatggccggagtggggtccccatacgtgtcacgcttgctaggcatatgtctcacgagtaccgtacagctcgtgacacaattaatgccatatgggtgtctgctggaccacgtgcgggaaaaccgcggaaggcttggttcccaggatctactgaactggtgtatgcaaattgcaaaaggaatgtcctacctagaggatgttcgacttgtccatagggacctggccgcaagaaatgtcctcgtgaaaagccctaaccatgtgaagatcacagatttcggcctggccagactgcttgatatcgacgagacagagtaccatgcagatggaggaaaagttccaataaagtggatggccctcgaaagtattctccggcgacgcttcacccaccagagtgacgtttggtcgtacggagtgactgtgtgggagttgatgacattcggcgctaagccatatgatggcattccggctagagagatacctgatctgctggagaaaggcgagcgcctaccccagccgccaatatgtacaattgatgtctacatgatcatggtcaagtgttggatgatcgacagcgagtgtcgccctcgatttagggagttggtaagcgagtttagcagaatggccagagacccacagcggttcgtggtgatccagaatgaggatttaggaccagcctcccctctcgactccaccttctatcgctctctcttggaagacgatgacatgggggacctggtcgacgctgaagaatacctggtgccacagcagggatttttctgccccgatccagccccaggggcagggggaatggttcaccaccggcaccgatcttcatcaacaaggtctggcggaggggatctcaccctgggcctggagccctccgaagaagaggcacctagatccccactggctccatccgaaggcgctggtagtgatgtatttgacggcgacctgggcatgggcgcagctaaaggactgcagtccctgcccacgcatgacccatctcccctacagcgctactctgaggatcccaccgttccactgccaagcgaaaccgacgggtacgtggctcctttgacctgctccccacagcccgaatacgtgaaccagcctgacgtccggcctcagcctccgtcccctcgggaaggccctttacctgccgctagaccagccggagcaactcttgagagacccaaaactttgtctcccggtaagaacggagtagttaaggatgtgtttgcctttggtggtgcagtggagaaccccgagtacctgaccccccaggggggtgccgctccgcagccccaccccccacctgccttttcccccgcattcgacaacctctattattgggaccaagatccacccgagcgtggcgcacccccatccaccttcaaggggacgccgactgctgaaaaccctgagtatttagggctcgacgtaccagtctag

SEQ ID NO: 108527 - DNA, 3678 bp, Artificial Sequence
  derived and/or modified sequence
atgaaactcaggctgcccgcttcaccagaaactcacctggacatgctaaggcatctatatcagggatgccaggtggttcaggggaatctggaacttacctacctgccaacaaacgcaagtctgagttttctgcaagatattcaggaagtgcaaggatacgtactgattgcacacaaccaggtcaggcaggttcccctgcaaagactgcgaatagttagggggacccaattgttcgaggacaattacgcgctcgcagtactggacaacggtgacccgctaaacaatacaaccccagtaacaggagccagtcctgggggactgcgagagctgcagttaaggtccctcaccgagatcctaaagggtggcgtgctcatacagcggaacccccagttatgctatcaggacaccatattgtggaaggatatctttcacaagaacaatcagctggcgctcaccctgattgataccaaccgaagcagagcttgccatccctgtagccctatgtgcaaaggtagccgctgctggggtgagtctagcgaggattgtcaatccctgaccaggacggtgtgcgctggagggtgcgctaggtgtaaggggccactaccaaccgactgctgtcatgagcaatgcgccgcaggctgcaccggccctaaacattcagattgcttagcctgtctccacttcaaccactccggtatctgcgagttacactgtccagcattggtgacctacaacaccgacacctttgaatccatgccaaatccagaaggaagatacacctttggggcaagttgtgtgacagcatgtccatacaactacttatctacagacgtggggtcatgcaccctcgtgtgccctctgcacaatcaggaagtcacggctgaagacggcacccaacgctgcgaaaaatgcagtaagccatgtgcccgagtatgctatgggctaggcatggagcacctccgcgaggtacgggcagtaacatctgccaatatccaggaatttgctggctgcaaaaagatattcgggtccttggcattcctcccggaatccttcgacggggaccccgcaagtaatactgctcctcttcagcctgagcaacttcaggtgttcgaaacacttgaggagatcaccggctacctttacatttcagcttggcccgactcattgccagatctgagtgtctttcagaacctgcaggttatccggggtcggatattgcataacggagcatatagtctcactctgcagggcctgggtatctcatggttaggcctgcggagtctgagagagctcggcagcggcctagccctgattcaccacaatacgcatctgtgctttgtccacaccgttccctgggaccagctttttcgcaacccccatcaggctttgctccacaccgctaatcgcccagaggacgaatgcgttggcgaggggctggcgtgtcatcaactgtgtgccagaggccattgttgggggccaggccctacacaatgcgtgaactgcagccagttcctacgcggtcaggaatgtgtggaagagtgtagagtgctccagggtttgcctcgtgaatacgtcaatgcacgacactgtctgccctgtcatccggagtgccaaccccagaacggctccgtgacttgcttcggcccagaggccgaccagtgtgtagcatgcgctcattacaaggatcccccattctgtgtagccagatgccccagtggggtgaaacctgatctgtcctatatgccgatctggaagttcccagatgaggagggcgcttgccagccctgccctatcaattgcacgcattcatgcgttgacttagatgacaaaggatgccccgctgaacagcgggctagccctctgacttccataatcagcgcagtcgtcggcatactgcttgtggtggttttgggagtcgtgttcgggatcctgattaagcgacgccaacaaaaaattcgcaagtacaccatgcggagactcttgcaggaaaccgaactagtcgagccgctcacaccttccggggctatgccaaaccaagcccagatgcggattcttaaggagaccgagctgaggaaagtcaaagtactagggagcggggcatttggtacagtttacaaggggatatggatcccagacggtgagaacgtcaaaatcccagtggctattaaagtgctgcgcgaaaacacctcaccgaaggctaacaaggagatccttgacgaggcttacgtcatggccggtgtgggctctccttacgtgtccaggcttcttggcatctgcttgacatccactgttcagctcgtgacccagctgatgccctacggctgtctgttagatcacgttagagaaaatagggggcgactgggatcccaggatttactgaactggtgtatgcagatcgccaaaggaatgagttacttagaagatgttaggctggtccatagagatctcgccgctaggaacgtattagtgaaaagcccgaatcatgttaaaattaccgactttgggttggcgcgtcttctggacatagacgagactgaatatcatgctgatgggggtaaggtcccaatcaagtggatggctctggaatccattctgcggaggaggtttactcaccagtcagatgtctggtcatacggtgtgacagtgtgggagctgatgacctttggagctaagccgtacgacggcataccagccagagagatcccggatctcttggagaaaggcgaacggctaccccagccgcctatctgtacaatcgacgtctatatgattatggttaagtgctggatgatagactctgaatgccgtcctcggttcagggagttagtcagtgagtttagcagaatggctcgcgatcctcaacggttcgttgtcatccagaacgaggacctgggtccagcttcccctctggattccaccttctacagatcattactggaggatgacgacatgggggatctggtggacgccgaggaatacctcgttccccagcagggcttcttttgtcctgaccccgctcctggcgcaggcggtatggtccaccaccgacatcgcagtagctcgaccaggagcgggggaggcgacctgaccttgggtcttgagccctctgaggaggaagctccacggtccccactggctcctagcgaaggcgcaggtagcgacgtttttgatggagatttgggaatgggtgccgcaaaaggcctacagagtctgcccacccatgacccaagcccccttcagcgatattccgaagacccaactgtcccgctgcccagtgagactgacgggtacgtcgcacccctgacatgcagtccacagcctgagtacgtgaatcagcccgatgtaaggccccagcctccctccccacgggagggacccctgcccgctgcacggccagcgggtgccacacttgaacgtccaaagacactgtcccctggtaaaaacggagtcgttaaagacgtcttcgccttcgggggagctgtggaaaacccagagtatcttaccccacagggaggcgctgcccctcaaccccacccacctcccgcattctctcccgcattcgacaacttatattattgggatcaggatcccccagagaggggcgctcctccaagcacattcaagggtacgcccacggcagagaaccccgagtatcttggacttgatgttcctgtatag

SEQ ID NO: 108528 - DNA, 3723 bp, Artificial Sequence
  derived and/or modified sequence
atgccaagaggtagttggaagccacaagtgtgcaccggcaccgacatgaaactgaggcttccagcctcccccgagacgcatcttgatatgctccgtcatctttaccaggggtgccaggtggtgcaaggaaacctggaactcacttacctgccaaccaatgcatcactgagttttctccaggacatacaggaagtacaggggtatgtgctgattgcacataatcaggtgcgccaggtgcccctccagaggctgaggattgttcgaggaacccaactcttcgaggacaattatgcgctggctgtgctggataacggggatccccttaacaacacaactccagtaacgggtgcatcaccgggagggttgagagagctccagctgcgctcactgacggagatactgaagggcggagtgctgattcagcggaacccgcagttgtgctatcaagacactatcctgtggaaggacatcttccacaaaaataatcagctcgcgcttacactcatagacaccaaccgcagcagggcatgccatccctgctcgcctatgtgcaagggaagccgttgctggggcgagtcctctgaggattgccagtcgctgaccaggacggtgtgcgccggaggatgtgctcggtgcaagggtccccttccgaccgactgttgccacgaacagtgcgccgcaggatgtacaggacccaagcattccgactgcctcgcctgcctgcactttaatcactccggtatttgcgagcttcactgtccagcattagtgacatataacaccgatacttttgagtcaatgccgaatccagaaggtcggtatacgttcggcgcttcttgcgtgactgcctgtccatataattacctatccaccgatgtgggcagttgtacactggtttgtcccctgcacaaccaagaagtgactgccgaggatggcacccagagatgtgaaaagtgttccaaaccttgcgcccgagtgtgctacggtcttgggatggaacacctacgagaggtacgcgcagtgacaagtgcgaatatccaagaattcgccggatgcaaaaagatttttggcagcctagccttcctgcctgagtcttttgatggagaccccgcatccaacactgcccctctgcagccggaacagctgcaggtgttcgaaactctggaggagattactggctacctgtacatcagtgcttggcccgacagtctgccagatctctcagtgtttcagaacctccaggtgatccggggacgcatcctgcataacggagcttattctctaacactccagggattgggcatctcttggctcggcctcaggtctctgcgtgagctgggctccggactggctctgatccaccataacactcacctgtgcttcgtccatacagttccatgggaccagctgttccgtaacccacatcaagctctcctgcacaccgcaaacagacctgaggacgaatgcgtaggagaggggctggcatgccaccagctgtgtgccaggggccactgctggggcccaggtcccacgcagtgcgtgaactgtagccagttcctgcggggacaggagtgcgtggaggaatgcagagttctccagggtttgcccagggagtacgtgaacgcacgccattgtctgccctgtcacccggagtgtcagccacaaaacggatcagtaacgtgtttcggtccagaggctgatcagtgcgtggcctgtgctcactataaagaccccccattttgtgtggcaaggtgcccatctggcgtgaagcccgatcttagctatatgcccatttggaaatttcctgatgaagagggcgcatgccagccttgtcccataaactgtacacactcttgtgtcgatttggatgacaagggatgccctgccgagcagcgggctagtccactgacctcgatcataagcgctgtagtgggcatcttgctggtcgtggtacttggggtcgtcttcggaatcctgatcaagcggcgacagcaaaaaattagaaaatacacaatgagaaggctgctgcaggaaaccgagctcgtggaaccactaactccgagcggagccatgccgaatcaggcgcaaatgcgcatattgaaggagaccgagctgcggaaagttaaggtcctggggagcggcgctttcggaactgtttacaaaggcatctggatcccagacggcgagaatgtgaaaattcctgttgcaataaaagtcttacgagagaacacatctcctaaagccaataaggagattctcgatgaggcttacgtgatggccggagttggttctccttatgtctctcgtcttctgggaatttgccttaccagtaccgtacaactggtaacacagctcatgccttatggttgcctcctggaccacgtgcgcgagaatcggggtcggctgggctctcaagatcttttgaactggtgcatgcagattgccaagggaatgagctatcttgaagatgtgcggttagtgcatcgagatttggcagcacgcaacgtcctcgtcaagagccctaatcacgtgaagataaccgacttcggtctggcaaggttgctggatatcgacgagacagagtatcacgccgacgggggtaaagtgccaattaaatggatggccttagaatctatcctcagacgcaggttcacccatcaaagcgacgtgtggtcgtatggagtgaccgtgtgggagctaatgacttttggtgcgaagccttacgatggaattccagcacgcgaaatccccgacctgctggaaaagggcgaaaggttacctcagccccctatttgtactatcgatgtgtatatgatcatggttaagtgctggatgatcgactctgagtgtaggcctagattccgagaattggtgagcgaatttagtcggatggccagagatccacagcggtttgtggtcattcaaaacgaggatctggggcctgctagcccactagacagtaccttttataggtctctgctggaagatgacgacatgggagaccttgtggacgcagaggaatatctggtgcctcaacagggattcttctgtcccgacccagcacccggagccggtggtatggttcaccatcgccatcgttctagcagtacaagatccggcggtggagacctcacactggggctcgagcccagcgaagaggaggccccacggtccccattggcaccgagtgaaggagctggcagtgacgtgttcgacggcgatctggggatgggagccgcaaagggtctacaatctttacccactcacgatccttcccctctgcagagatatagcgaggatcctaccgtgccactgccaagcgaaacggatgggtatgtggcaccattgacatgctccccgcagccagagtatgtcaatcaacccgacgtgagaccccagccccctagtccccgagaaggacccctccccgcagctcgacctgctggcgcaaccctagaacgccctaagacactgtcccctgggaagaatggcgtcgtcaaggatgtctttgccttcggcggtgctgtagaaaaccctgaatatcttacgccccaagggggtgctgccccacaaccccaccctcctccggcattttctcctgcattcgataacctctactactgggatcaagatcctcctgagcgcggtgcccctcccagcactttcaaggggacccccaccgccgagaatccagagtaccttggactcgacgtaccagtgtag

SEQ ID NO: 108529 - DNA, 3238 bp, Artificial Sequence
  derived and/or modified sequence
gcgcttgctcccaatcacaggagaaggaggaggtggaggaggagggctgcttgaggaagtataagaatgaagttgtgaagctgagattcccctccattgggaccggagaaaccaggggagccccccgggcagccgcgcgccccttcccacggggccctttactgcgccgcgcgcccggcccccacccctcgcagcaccccgcgccccgcgccctcccagccgggtccagccggagccatggggccggagccgcagtgagcaccatggagctggcggccttgtgccgctgggggctcctcctcgccctcttgccccccggagccgcgagcacccaagacaactacctttctacggacgtgggatcctgcaccctcgtctgccccctgcacaaccaagaggtgacagcagaggatggaacacagcggtgtgagaagtgcagcaagccctgtgcccgagtgtgctatggtctgggcatggagcacttgcgagaggtgagggcagttaccagtgccaatatccaggagtttgctggctgcaagaagatctttgggagcctggcatttctgccggagagctttgatggggacccagcctccaacactgccccgctccagccagagcagctccaagtgtttgagactctggaagagatcacaggttacctatacatctcagcatggccggacagcctgcctgacctcagcgtcttccagaacctgcaagtaatccggggacgaattctgcacaatggcgcctactcgctgaccctgcaagggctgggcatcagctggctggggctgcgctcactgagggaactgggcagtggactggccctcatccaccataacacccacctctgcttcgtgcacacggtgccctgggaccagctctttcggaacccgcaccaagctctgctccacactgccaaccggccagaggacgagtgtgtgggcgagggcctggcctgccaccagctgtgcgcccgagggcactgctggggtccagggcccacccagtgtgtcaactgcagccagttccttcggggccaggagtgcgtggaggaatgccgagtactgcaggggctccccagggagtatgtgaatgccaggcactgtttgccgtgccaccctgagtgtcagccccagaatggctcagtgacctgttttggaccggaggctgaccagtgtgtggcctgtgcccactataaggaccctcccttctgcgtggcccgctgccccagcggtgtgaaacctgacctctcctacatgcccatctggaagtttccagatgaggagggcgcatgccagccttgccccatcaactgcacccactcctgtgtggacctggatgacaagggctgccccgccgagcagagagccagccctctgacgtccatcatctctgcggtggttggcattctgctggtcgtggtcttgggggtggtctttgggatcctcatcaagcgacggcagcagaagatccggaagtacacgatgcggagactgctgcaggaaacggagctggtggagccgctgacacctagcggagcgatgcccaaccaggcgcagatgcggatcctgaaagagacggagctgaggaaggtgaaggtgcttggatctggcgcttttggcacagtctacaagggcatctggatccctgatggggagaatgtgaaaattccagtggccatcaaagtgttgagggaaaacacatcccccaaagccaacaaagaaatcttagacgaagcatacgtgatggctggtgtgggctccccatatgtctcccgccttctgggcatctgcctgacatccacggtgcagctggtgacacagcttatgccctatggctgcctcttagaccatgtccgggaaaaccgcggacgcctgggctcccaggacctgctgaactggtgtatgcagattgccaaggggatgagctacctggaggatgtgcggctcgtacacagggacttggccgctcggaacgtgctggtcaagagtcccaaccatgtcaaaattacagacttcgggctggctcggctgctggacattgacgagacagagtaccatgcagatgggggcaaggtgcccatcaagtggatggcgctggagtccattctccgccggcggttcacccaccagagtgatgtgtggagttatggtgtgactgtgtgggagctgatgacttttggggccaaaccttacgatgggatcccagcccgggagatccctgacctgctggaaaagggggagcggctgccccagccccccatctgcaccattgatgtctacatgatcatggtcaaatgttggatgattgactctgaatgtcggccaagattccgggagttggtgtctgaattctcccgcatggccagggacccccagcgctttgtggtcatccagaatgaggacttgggcccagccagtcccttggacagcaccttctaccgctcactgctggaggacgatgacatgggggacctggtggatgctgaggagtatctggtaccccagcagggcttcttctgtccagaccctgccccgggcgctgggggcatggtccaccacaggcaccgcagctcatctaccaggagtggcggtggggacctgacactagggctggagccctctgaagaggaggcccccaggtctccactggcaccctccgaaggggctggctccgatgtatttgatggtgacctgggaatgggggcagccaaggggctgcaaagcctccccacacatgaccccagccctctacagcggtacagtgaggaccccacagtacccctgccctctgagactgatggctacgttgcccccctgacctgcagcccccagcctgaatatgtgaaccagccagatgttcggccccagcccccttcgccccgagagggccctctgcctgctgcccgacctgctggtgccactctggaaaggcccaagactctctccccagggaagaatggggtcgtcaaagacgtttttgcctttgggggtgccgtggagaaccccgagtacttgacaccccagggaggagctgcccctcagccccaccctcctcctgccttcagcccagccttcgacaacctctattactgggaccaggacccaccagagcggggggctccacccagcaccttcaaagggacacctacggcagagaacccagagtacctgggtctggacgtgccagtgtgaaccagaaggccaagtccgcagaagccctgatgtgt

SEQ ID NO: 108530 - DNA, 4341 bp, Artificial Sequence
  derived and/or modified sequence
atgccccgggggtcctggaagccacaagtgtgcaccggcacagacatgaagctgcggctccctgccagtcccgagacccacctggacatgctccgccacctctaccagggctgccaggtggtgcagggaaacctggaactcacctacctgcccaccaatgccagcctgtccttcctgcaggatatccaggaggtgcagggctacgtgctcatcgctcacaaccaagtgaggcaggtcccactgcagaggctgcggattgtgcgaggcacccagctctttgaggacaactatgccctggccgtgctagacaatggagacccgctgaacaataccacccctgtcacaggggcctccccaggaggcctgcgggagctgcagcttcgaagcctcacagagatcttgaaaggaggggtcttgatccagcggaacccccagctctgctaccaggacacgattttgtggaaggacatcttccacaagaacaaccagctggctctcacactgatagacaccaaccgctctcgggcctgccacccctgttctccgatgtgtaagggctcccgctgctggggagagagttctgaggattgtcagagcctgacgcgcactgtctgtgccggtggctgtgcccgctgcaaggggccactgcccactgactgctgccatgagcagtgtgctgccggctgcacgggccccaagcactctgactgcctggcctgcctccacttcaaccacagtggcatctgtgagctgcactgcccagccctggtcacctacaacacagacacgtttgagtccatgcccaatcccgagggccggtatacattcggcgccagctgtgtgactgcctgtccctacaactacctttctacggacgtgggatcctgcaccctcgtctgccccctgcacaaccaagaggtgacagcagaggatggaacacagcggtgtgagaagtgcagcaagccctgtgcccgagtgtgctatggtctgggcatggagcacttgcgagaggtgagggcagttaccagtgccaatatccaggagtttgctggctgcaagaagatctttgggagcctggcatttctgccggagagctttgatggggacccagcctccaacactgccccgctccagccagagcagctccaagtgtttgagactctggaagagatcacaggttacctatacatctcagcatggccggacagcctgcctgacctcagcgtcttccagaacctgcaagtaatccggggacgaattctgcacaatggcgcctactcgctgaccctgcaagggctgggcatcagctggctggggctgcgctcactgagggaactgggcagtggactggccctcatccaccataacacccacctctgcttcgtgcacacggtgccctgggaccagctctttcggaacccgcaccaagctctgctccacactgccaaccggccagaggacgagtgtgtgggcgagggcctggcctgccaccagctgtgcgcccgagggcactgctggggtccagggcccacccagtgtgtcaactgcagccagttccttcggggccaggagtgcgtggaggaatgccgagtactgcaggggctccccagggagtatgtgaatgccaggcactgtttgccgtgccaccctgagtgtcagccccagaatggctcagtgacctgttttggaccggaggctgaccagtgtgtggcctgtgcccactataaggaccctcccttctgcgtggcccgctgccccagcggtgtgaaacctgacctctcctacatgcccatctggaagtttccagatgaggagggcgcatgccagccttgccccatcaactgcacccactcctgtgtggacctggatgacaagggctgccccgccgagcagagagccagccctctgacgtccatcatctctgcggtggttggcattctgctggtcgtggtcttgggggtggtctttgggatcctcatcaagcgacggcagcagaagatccggaagtacacgatgcggagactgctgcaggaaacggagctggtggagccgctgacacctagcggagcgatgcccaaccaggcgcagatgcggatcctgaaagagacggagctgaggaaggtgaaggtgcttggatctggcgcttttggcacagtctacaagggcatctggatccctgatggggagaatgtgaaaattccagtggccatcaaagtgttgagggaaaacacatcccccaaagccaacaaagaaatcttagacgaagcatacgtgatggctggtgtgggctccccatatgtctcccgccttctgggcatctgcctgacatccacggtgcagctggtgacacagcttatgccctatggctgcctcttagaccatgtccgggaaaaccgcggacgcctgggctcccaggacctgctgaactggtgtatgcagattgccaaggggatgagctacctggaggatgtgcggctcgtacacagggacttggccgctcggaacgtgctggtcaagagtcccaaccatgtcaaaattacagacttcgggctggctcggctgctggacattgacgagacagagtaccatgcagatgggggcaaggtgcccatcaagtggatggcgctggagtccattctccgccggcggttcacccaccagagtgatgtgtggagttatggtgtgactgtgtgggagctgatgacttttggggccaaaccttacgatgggatcccagcccgggagatccctgacctgctggaaaagggggagcggctgccccagccccccatctgcaccattgatgtctacatgatcatggtcaaatgttggatgattgactctgaatgtcggccaagattccgggagttggtgtctgaattctcccgcatggccagggacccccagcgctttgtggtcatccagaatgaggacttgggcccagccagtcccttggacagcaccttctaccgctcactgctggaggacgatgacatgggggacctggtggatgctgaggagtatctggtaccccagcagggcttcttctgtccagaccctgccccgggcgctgggggcatggtccaccacaggcaccgcagctcatctaccaggagtggcggtggggacctgacactagggctggagccctctgaagaggaggcccccaggtctccactggcaccctccgaaggggctggctccgatgtatttgatggtgacctgggaatgggggcagccaaggggctgcaaagcctccccacacatgaccccagccctctacagcggtacagtgaggaccccacagtacccctgccctctgagactgatggctacgttgcccccctgacctgcagcccccagcctgaatatgtgaaccagccagatgttcggccccagcccccttcgccccgagagggccctctgcctgctgcccgacctgctggtgccactctggaaaggcccaagactctctccccagggaagaatggggtcgtcaaagacgtttttgcctttgggggtgccgtggagaaccccgagtacttgacaccccagggaggagctgcccctcagccccaccctcctcctgccttcagcccagccttcgacaacctctattactgggaccaggacccaccagagcggggggctccacccagcaccttcaaagggacacctacggcagagaacccagagtacctgggtctggacgtgccagtgtgaaccagaaggccaagtccgcagaagccctgatgtgtcctcagggagcagggaaggcctgacttctgctggcatcaagaggtgggagggccctccgaccacttccaggggaacctgccatgccaggaacctgtcctaaggaaccttccttcctgcttgagttcccagatggctggaaggggtccagcctcgttggaagaggaacagcactggggagtctttgtggattctgaggccctgcccaatgagactctagggtccagtggatgccacagcccagcttggccctttccttccagatcctgggtactgaaagccttagggaagctggcctgagaggggaagcggccctaagggagtgtctaagaacaaaagcgacccattcagagactgtccctgaaacctagtactgccccccatgaggaaggaacagcaatggtgtcagtatccaggctttgtacagagtgcttttctgtttagtttttactttttttgttttgtttttttaaagatgaaataaagacccagggggagaatgggtgttgtatggggaggcaagtgtggggggtccttctccacacccactttgtccatttgcaaatatattttggaaaacagcta

SEQ ID NO: 108531 - DNA, 1812 bp, Artificial Sequence
  derived and/or modified sequence
atgaagctgagactgcccgccagccccgagacccacctggacatgctgagacacctgtaccagggctgccaggtggtgcagggcaacctggagctgacctacctgcccaccaacgccagcctgagcttcctgcaggacatccaggaggtgcagggctacgtgctgatcgcccacaaccaggtgagacaggtgcccctgcagagactgagaatcgtgagaggcacccagctgttcgaggacaactacgccctggccgtgctggacaacggcgaccccctgaacaacaccacccccgtgaccggcgccagccccggcggcctgagagagctgcagctgagaagcctgaccgagatcctgaagggcggcgtgctgatccagagaaacccccagctgtgctaccaggacaccatcctgtggaaggacatcttccacaagaacaaccagctggccctgaccctgatcgacaccaacagaagcagagcctgccacccctgcagccccatgtgcaagggcagcagatgctggggcgagagcagcgaggactgccagagcctgaccagaaccgtgtgcgccggcggctgcgccagatgcaagggccccctgcccaccgactgctgccacgagcagtgcgccgccggctgcaccggccccaagcacagcgactgcctggcctgcctgcacttcaaccacagcggcatctgcgagctgcactgccccgccctggtgacctacaacaccgacaccttcgagagcatgcccaaccccgagggcagatacaccttcggcgccagctgcgtgaccgcctgcccctacaactacctgagcaccgacgtgggcagctgcaccctggtgtgccccctgcacaaccaggaggtgaccgccgaggacggcacccagagatgcgagaagtgcagcaagccctgcgccagagtgtgctacggcctgggcatggagcacctgagagaggtgagagccgtgaccagcgccaacatccaggagttcgccggctgcaagaagatcttcggcagcctggccttcctgcccgagagcttcgacggcgaccccgccagcaacaccgcccccctgcagcccgagcagctgcaggtgttcgagaccctggaggagatcaccggctacctgtacatcagcgcctggcccgacagcctgcccgacctgagcgtgttccagaacctgcaggtgatcagaggcagaatcctgcacaacggcgcctacagcctgaccctgcagggcctgggcatcagctggctgggcctgagaagcctgagagagctgggcagcggcctggccctgatccaccacaacacccacctgtgcttcgtgcacaccgtgccctgggaccagctgttcagaaacccccaccaggccctgctgcacaccgccaacagacccgaggacgagtgcgtgggcgagggcctggcctgccaccagctgtgcgccagaggccactgctggggccccggccccacccagtgcgtgaactgcagccagttcctgagaggccaggagtgcgtggaggagtgcagagtgctgcagggcctgcccagagagtacgtgaacgccagacactgcctgccctgccaccccgagtgccagccccagaacggcagcgtgacctgcttcggccccgaggccgaccagtgcgtggcctgcgcccactacaaggacccccccttctgcgtggccagatgccccagcggcgtgaagcccgacctgagctacatgcccatctggaagttccccgacgaggagggcgcctgccagccctgccccatcaactgcacccacagctag

SEQ ID NO: 108532 - DNA, 1812 bp, Artificial Sequence
  derived and/or modified sequence
atgaaactcagactgcctgcaagccccgagactcatttggatatgctgcgccacctgtaccaaggatgtcaggtggttcaggggaacctggagttgacctacttgcccaccaacgccagcctgagtttccttcaggacattcaggaagtccagggctatgtgcttatagcccacaaccaggtcagacaagtgcccttgcagcgactgaggattgtgaggggaacccagctctttgaggacaactacgcactggctgtccttgacaacggcgacccgctcaacaataccacccccgttaccggagcatcaccaggtggcctacgggagctccagctgcgcagcctgactgaaatcctcaaaggcggggttctgattcaacggaacccccagctgtgttatcaggatacgatactgtggaaggacatctttcataagaataaccaacttgcactgacattgattgatactaatcggtcaagggcctgtcatccttgctctccaatgtgcaagggctccaggtgctggggcgagtcctcagaagattgtcagtcactgacccggaccgtctgtgccggtggctgtgcccggtgcaagggcccactgcccacagattgctgccatgagcagtgcgcagctggttgtacggggccgaaacactctgactgtctcgcgtgcctgcatttcaaccatagcgggatatgtgagctacactgcccagctttggttacatataataccgacaccttcgagagcatgcccaacccagagggccggtataccttcggcgcaagttgtgtcacagcatgtccatacaattacctgtccacagacgtaggctcctgcaccttagtttgcccccttcacaatcaggaggttacggcggaagacggaactcagcggtgtgaaaagtgctccaaaccctgtgctagggtctgttatggactgggcatggagcacttacgggaggtacgggccgtcacaagcgcaaacattcaggaatttgcaggttgtaagaaaatcttcggatcccttgcatttttgcctgagtccttcgatggggaccctgctagtaatactgccccgctccaacctgaacaacttcaagtattcgaaaccctcgaggagattacaggctatctgtatatctctgcttggccagacagcttgcctgacctgagcgtgttccagaacttgcaggtaatccggggccgtatcctgcataatggcgcctattcgttgacactgcaagggctcggcatcagctggctgggcctgagaagcctcagagagctaggatccggcttggccctgattcatcataacactcacctgtgttttgtccataccgtgccatgggaccagctattccgaaatccgcatcaggcattgctccatacagcaaaccgacccgaagatgaatgcgttggcgagggcctggcttgtcaccaactctgtgctaggggtcactgttgggggcccggccctactcagtgtgtgaactgtagtcaatttctgaggggccaggaatgtgtagaggaatgcagagtgcttcagggactacctcgggaatatgtaaacgcccggcattgcctcccttgtcaccctgagtgccagcctcagaacgggtctgtgacatgtttcgggcctgaagcagatcagtgcgtagcttgtgctcactataaagaccctccattttgtgtggcaaggtgtcctagcggggtgaaacccgacctgagttatatgcccatctggaagtttccggatgaggaaggggcatgtcaaccctgtcctataaactgtactcactcttag

SEQ ID NO: 108533 - DNA, 1812 bp, Artificial Sequence
  derived and/or modified sequence
atgaagctgcggctgcctgccagccctgagacccacctggacatgctgcggcacctgtaccagggctgccaggtggtgcagggcaacctggagctgacctacctgcccaccaatgccagcctgtccttcctgcaggacatccaggaggtgcagggctacgtgctgattgcccacaaccaggtgcggcaggtgcccctgcagaggctgagaattgtgcggggcacccagctgtttgaggacaactatgccctggccgtgctggacaatggagaccccctgaacaacaccacccctgtgactggagccagccctgggggcctgcgggagctgcagctgcggagcctgacagagatcctgaagggcggcgtgctgatccagaggaacccccagctgtgctaccaggacaccatcctgtggaaggacatcttccacaagaacaaccagctggccctgaccctgattgacaccaacagaagccgggcctgccacccctgcagccccatgtgcaagggcagccgctgctggggcgagagcagcgaggactgccagagcctgaccaggacagtgtgtgccggcggctgtgcccgctgcaagggccccctgcccacagactgctgccacgagcagtgtgccgccggctgcaccggccccaagcacagcgactgcctggcctgcctgcacttcaaccacagcggcatctgtgagctgcactgcccagccctggtgacctacaacacagacacctttgagagcatgcccaaccctgagggccgctacacctttggagccagctgtgtgacagcctgcccctacaactacctgagcacagatgtgggcagctgcaccctggtgtgccccctgcacaaccaggaggtgacagcagaagatggcacccagagatgtgagaagtgcagcaagccctgtgcccgggtgtgctacggcctgggcatggagcacctgcgggaggtgcgggctgtgaccagcgccaacatccaggagtttgctggctgcaagaagatcttcggcagcctggccttcctgcctgagagctttgatggagaccctgccagcaacacagcccccctgcagcctgagcagctgcaggtgtttgagaccctggaggagatcaccggctacctgtacatcagcgcctggccagacagcctgcctgacctgtctgtgttccagaacctgcaggtgatccggggccgcatcctgcacaacggggcctacagcctgaccctgcagggcctgggcatctcctggctgggcctgcggagcctgcgggagctgggcagcggcctggccctgatccaccacaacacccacctgtgctttgtgcacacagtgccctgggaccagctgttcaggaacccccaccaggccctgctgcacacagccaacagaccagaagatgaatgtgtgggggagggcctggcctgccaccagctgtgtgcccggggccactgctggggccctggccccacccagtgtgtgaactgcagccagttcctgcggggccaggagtgtgtggaggagtgccgggtgctgcagggcctgccccgggagtatgtgaatgcccggcactgcctgccctgccaccctgagtgccagccccagaatggatctgtgacctgctttggacctgaggccgaccagtgtgtggcctgtgcccactacaaggacccccccttctgtgtggcccgctgccccagcggcgtgaagccagacctgagctacatgcccatctggaagttcccagatgaggagggcgcctgccagccctgccccatcaactgcacccacagctag

SEQ ID NO: 108534 - DNA, 1812 bp, Artificial Sequence
  derived and/or modified sequence
atgaagctgcggctgcccgccagccccgagacccacctggacatgctgaggcatttgtaccaaggttgtcaggttgtccagggcaaccttgaactgacctatctgcccactaatgccagcctttcgtttttacaagacatccaggaggtccagggatatgtgctgatcgcccataaccaggtgagacaagtccccctccagaggctgaggattgtcaggggtacccaactgtttgaggataattacgccctggctgtattggataatggcgaccctctcaacaatactacgccagtgaccggcgccagtccagggggcctaagagaattgcaactgaggtccctaaccgaaattctgaagggcggagttttaattcagcgcaatccccagctctgctatcaggataccatcctgtggaaggacatctttcataagaacaaccagctggccctgacactcatcgataccaatcgcagcagggcttgccatccgtgctccccaatgtgcaaaggtagtcggtgctggggggagagtagcgaggattgccaaagcctcacaaggactgtgtgtgctgggggatgtgcacgctgtaaaggtcctctgcccacagattgctgccacgaacaatgcgccgccggctgcactggaccaaagcactcagattgtcttgcttgtctccacttcaaccatagcggaatatgcgaattacactgtccagctctcgtcacgtataacacagacacctttgagtcaatgcctaaccctgaggggcgttacaccttcggtgcctcatgcgttaccgcttgtccatacaattacttatctacagatgtcggatcctgcacacttgtgtgccccttgcacaaccaggaagtgactgcagaggacggcacgcagaggtgcgagaagtgctccaagccatgcgccagagtgtgctacgggttgggaatggagcatctaagggaggttcgagctgtaacttcagccaacatccaggaattcgctggatgtaaaaaaatctttggctccctggcctttctgccagagagtttcgatggggaccctgccagcaacaccgccccactccagcccgaacaactgcaggtgttcgagactttggaagagatcacagggtacctgtatatctccgcatggcctgacagcttgccagatctgtcagtttttcaaaacctccaggtgattcggggaagaatcctccacaacggggcttactcccttactttgcagggactgggaatcagctggctggggctacgaagtctgcgggagctcggcagcggattagctttaattcaccataatacccacctttgtttcgtgcatacggtgccttgggatcagctgtttagaaacccccatcaggctcttctgcacaccgccaatcgccccgaggatgaatgcgtcggagagggtctggcctgccaccagttgtgtgcgcgagggcactgctgggggccggggcctacccagtgtgtgaactgttcccagtttctccgagggcaggagtgcgtagaggagtgtcgggttcttcaggggcttcctagagagtacgtaaacgctaggcattgtctgccatgccaccctgaatgtcaaccccagaacggttccgtaacctgcttcggtccagaagccgatcagtgtgtggcctgcgcccactacaaggacccccctttttgcgtggctcgctgtccttctggagtaaagcccgacttgtcctatatgccgatctggaagtttcccgacgaggagggcgcttgccagccttgtcccataaattgtactcacagttag

SEQ ID NO: 108535 - DNA, 1812 bp, Artificial Sequence
  derived and/or modified sequence
atgaaactgcgcctcccagcctcgccagaaacacatctcgacatgctgcggcacctgtatcagggttgtcaggtggtccagggaaatctcgagctgacctacctccctaccaacgcatccctatcctttctgcaggacattcaggaggtgcaggggtacgtattgatcgctcataatcaggtccgccaggtccccctccagagactccgcatcgtgagagggacacagctgttcgaagacaactacgccctcgccgtcctcgataatggggatcccctgaacaacacaactccagttactggggcatcgccagggggtttaagagagctccaactgagatctctcaccgagattcttaaagggggagtgctgatccaaaggaatccacagctgtgctatcaagatacaattctgtggaaggacatatttcacaaaaataaccagctagcactgaccttaatcgataccaatcgcagtagagcatgtcacccatgcagcccaatgtgtaaaggctctagatgctggggagaaagcagtgaggattgccagtcactcacacggacggtgtgtgcaggcggttgtgctcgttgcaaagggcctctgcccaccgattgttgtcatgaacaatgcgcggctggctgtaccggaccaaagcatagcgattgcctggcctgtttacacttcaatcacagtggcatctgtgagctgcactgcccagcattggtgacttataacactgacacattcgagtctatgccaaaccccgagggtcgttacacttttggagcatcctgtgtcacagcgtgcccttacaactatctgagcacagacgtgggctcctgcacacttgtatgccccttacataaccaggaagtgacagccgaagacgggacacaacgatgcgagaaatgcagtaaaccttgcgccagagtgtgttatggtcttggaatggagcatctgagggaggtgagggccgttacctccgccaatatacaggagtttgctggatgcaaaaagatattcggcagcctggcattcctgcctgaaagttttgacggcgatcccgcttcaaacaccgccccactgcaaccggagcagttgcaagtgttcgagacccttgaggaaatcacaggctacctgtacatctccgcctggcctgacagcctacctgatttgagcgttttccagaatctgcaggtgatacgaggtcggattctgcacaacggtgcttatagccttacactgcagggccttggtatatcttggctgggcctacggtccctgcgcgagcttggctccggccttgctttgattcaccacaacactcacctgtgcttcgtgcatacagtgccctgggaccagctgtttcgcaatccacaccaggccctccttcacacagcaaatcgccctgaggacgaatgcgtgggcgaaggcctcgcttgtcaccagctctgcgccagaggacactgctgggggcctggccctactcagtgcgtaaattgttcccagtttctgcggggtcaggaatgtgtggaagagtgccgggtcctgcaggggttaccccgtgaatatgtcaacgctaggcactgcctcccttgtcatccagagtgtcagcctcaaaacggttccgtcacctgctttgggccagaggccgatcagtgcgtcgcctgtgcccactacaaggacccaccgttctgtgttgccaggtgtcccagcggcgttaagccagaccttagctacatgccaatctggaagttccctgatgaggagggggcatgtcagccttgtccgatcaactgcacccattcatag

SEQ ID NO: 108536 - DNA, 2147 bp, Artificial Sequence
  derived and/or modified sequence
gaatgcacagggtgggcctagtcagaagaagcctttcccctgaaatccctctacttcccaagcacgcaagctttctcctgctgttaaacctgcagtgtgcaagggacatgggcggaggggtccttcagtcaggcttctccctgtctgagtgtgcaccggcacagacatgaagctgcggctccctgccagtcccgagacccacctggacatgctccgccacctctaccagggctgccaggtggtgcagggaaacctggaactcacctacctgcccaccaatgccagcctgtccttcctgcaggatatccaggaggtgcagggctacgtgctcatcgctcacaaccaagtgaggcaggtcccactgcagaggctgcggattgtgcgaggcacccagctctttgaggacaactatgccctggccgtgctagacaatggagacccgctgaacaataccacccctgtcacaggggcctccccaggaggcctgcgggagctgcagcttcgaagcctcacagagatcttgaaaggaggggtcttgatccagcggaacccccagctctgctaccaggacacgattttgtggaaggacatcttccacaagaacaaccagctggctctcacactgatagacaccaaccgctctcgggcctgccacccctgttctccgatgtgtaagggctcccgctgctggggagagagttctgaggattgtcagagcctgacgcgcactgtctgtgccggtggctgtgcccgctgcaaggggccactgcccactgactgctgccatgagcagtgtgctgccggctgcacgggccccaagcactctgactgcctggcctgcctccacttcaaccacagtggcatctgtgagctgcactgcccagccctggtcacctacaacacagacacgtttgagtccatgcccaatcccgagggccggtatacattcggcgccagctgtgtgactgcctgtccctacaactacctttctacggacgtgggatcctgcaccctcgtctgccccctgcacaaccaagaggtgacagcagaggatggaacacagcggtgtgagaagtgcagcaagccctgtgcccgagtgtgctatggtctgggcatggagcacttgcgagaggtgagggcagttaccagtgccaatatccaggagtttgctggctgcaagaagatctttgggagcctggcatttctgccggagagctttgatggggacccagcctccaacactgccccgctccagccagagcagctccaagtgtttgagactctggaagagatcacaggttacctatacatctcagcatggccggacagcctgcctgacctcagcgtcttccagaacctgcaagtaatccggggacgaattctgcacaatggcgcctactcgctgaccctgcaagggctgggcatcagctggctggggctgcgctcactgagggaactgggcagtggactggccctcatccaccataacacccacctctgcttcgtgcacacggtgccctgggaccagctctttcggaacccgcaccaagctctgctccacactgccaaccggccagaggacgagtgtgtgggcgagggcctggcctgccaccagctgtgcgcccgagggcactgctggggtccagggcccacccagtgtgtcaactgcagccagttccttcggggccaggagtgcgtggaggaatgccgagtactgcaggggctccccagggagtatgtgaatgccaggcactgtttgccgtgccaccctgagtgtcagccccagaatggctcagtgacctgttttggaccggaggctgaccagtgtgtggcctgtgcccactataaggaccctcccttctgcgtggcccgctgccccagcggtgtgaaacctgacctctcctacatgcccatctggaagtttccagatgaggagggcgcatgccagccttgccccatcaactgcacccactcgtgagtccaacggtcttttctgcagaaaggaggactttcctttcaggggtctttctggggctcttactataaaaggggaccaactctccctttgtcatatcttgtttctgatgacaaaaataacacattgttaaaattgtaaaattaaaacatgaaatataaattaatgccct

SEQ ID NO: 108537 - protein, 490 aa, Artificial Sequence
  derived and/or modified sequence
MTKSNGEEPKMGGRMERFQQGVRKRTLLAKKKVQNITKEDVKSYLFRNAFVLLTGMAALDSKASGKMGMRAVVYYMTTTIIAVVIGIIIVIIIHPGKGTKENMHREGKIVRVTAADAFLDLIRNMFPPNLVEACFKQFKTNYEKRSFKVPIQANETLVGAVINNVSEAMETLTRITEELVPVPGSVNGVNALGLVVFSMCFGFVIGNMKEQGQALREFFDSLNEAIMRLVAVIMWYAPVGILFLIAGKIVEMEDMGVIGGQLAMYTVTVIVGLLIHAVIVLPLLYFLVTRKNPWVFIGGLLQALITALGTSSSSATLPITFKCLEENNGVDKRVTRFVLPVGATINMDGTALYEALAAIFIAQVNNFELNFGQIITISITATAASIGAAGIPQAGLVTMVIVLTSVGLPTDDITLIIAVDWFLDRLRTTTNVLGDSLGAGIVEHLSRHELKNRDVEMGNSVIEENEMKKPYQLIAQDNETEKPIDSETKM

SEQ ID NO: 108538 - DNA, 1473 bp, Artificial Sequence
  derived and/or modified sequence
atgactaagagtaatggcgaggagcctaagatgggcgggcgcatggaacgattccaacagggtgtccggaaacgcaccttgctagcaaagaagaaggttcagaatataactaaagaagacgtgaagtcttatttgtttaggaacgcgttcgttctgctcacgggaatggctgctctggacagcaaggctagtggaaagatgggcatgagagctgtcgtctattatatgaccaccacgataatagctgtggtgatcggcatcattatagtgattatcattcaccccggaaaggggaccaaagaaaatatgcacagggaggggaagatagtcagggtgactgccgcagatgcgtttctggacctgatacgcaacatgtttccacccaacttggtcgaggcctgtttcaagcagttcaaaacaaactacgaaaaacgatcgttcaaagtgcccattcaggctaacgaaacgctggttggagcagtgatcaacaacgtttctgaggcaatggagaccctgaccagaatcacagaagagctggtgcccgtgccagggagtgtgaacggagtcaatgccctgggcctcgtcgtatttagcatgtgctttggcttcgtaattgggaatatgaaggaacagggacaggcacttcgcgaatttttcgatagtcttaatgaagctatcatgcggcttgtggccgtcattatgtggtacgcacccgtgggaatcctgtttctgatcgcagggaaaatcgtggaaatggaggacatgggcgtgatcggaggccagctcgccatgtacactgttaccgtgatcgttggacttttaatccatgcagtgatcgtgctcccccttctttacttcctcgtgactcggaaaaatccatgggtattcattggagggttgctgcaggccctcattactgcgcttggaaccagcagctcgagtgctacgctccccattacattcaagtgtcttgaggagaataacggcgtggacaagcgcgttaccagatttgttctgcccgttggcgctaccataaatatggatgggactgccctgtatgaagccctggcggccatatttatcgctcaggtcaataacttcgagctgaactttggccagatcatcacaatttctataaccgcaactgccgcctcaataggtgctgctggcatccctcaggccggcctggttactatggtcattgtgcttacctccgtcggcctccccacagacgatataactctcatcatcgctgtggactggttcctggatcggctgcgcactacaacaaatgtgctgggtgacagtcttggagcggggatcgtagagcacctgtctcgacacgagttgaagaacagagacgtagagatgggaaattcagtaatcgaggaaaatgagatgaagaagccttatcagctaattgcacaggataatgaaacggagaagccaattgattccgaaactaaaatgtag

SEQ ID NO: 108539 - DNA, 1473 bp, Artificial Sequence
  derived and/or modified sequence
atgaccaagagcaatggagaggagcccaagatgggcggccgcatggagcgcttccagcagggcgtgaggaagaggaccctgctggccaagaagaaggtgcagaacatcaccaaggaggatgtgaagagctacctgttcagaaatgcctttgtgctgctgaccggcatggccgccctggacagcaaggccagcggcaagatgggcatgagagctgtggtgtactacatgaccaccaccatcatcgctgtggtgattggcatcatcatcgtcatcatcatccaccctgggaagggcaccaaggagaacatgcaccgggagggcaagatcgtgcgggtgacagctgctgatgccttcctggacctgatccggaacatgtttcctcccaacctggtggaggcctgcttcaagcagttcaagaccaactatgagaagaggagcttcaaggtgcccatccaggccaatgagaccctggtgggcgccgtcatcaacaacgtgtctgaggccatggagaccctgacccgcatcacagaggagctggtgcctgtgcccggctctgtgaatggagtgaatgccctgggcctggtggtgttctccatgtgctttggatttgtgattggcaacatgaaggagcagggccaggccctgcgggagttctttgacagcctgaatgaggccatcatgaggctggtggccgtcatcatgtggtacgcccctgtgggcatcctcttcctgattgctgggaagatcgtggagatggaggacatgggcgtcatcggcggccagctggccatgtacacagtgaccgtcatcgtgggcctgctgattcatgctgtgattgtgctgcccctgctgtacttcctggtgaccaggaagaacccctgggtgttcatcggcggcctgctgcaggccctgatcacagccctgggcaccagcagcagcagcgccaccctgcccatcaccttcaagtgcctggaggagaacaacggggtggacaagagggtgaccaggtttgtgctgcctgtgggcgccaccatcaacatggatggaacagccctgtatgaggccctggccgccatcttcatcgcccaggtgaacaactttgagctgaactttggccagatcatcaccatcagcatcacagccacagctgccagcatcggggctgctggcatcccccaggccggcctggtgaccatggtgattgtgctgacctctgtgggcctgcccacagatgacatcaccctcatcatcgctgtggactggttcctggaccggctgcggaccaccaccaacgtgctgggggacagcctgggcgccggcatcgtggagcacctgagcagacatgagctgaagaacagagatgtggagatgggcaacagcgtcatcgaggagaatgagatgaagaagccctaccagctgattgcccaggacaatgaaacagagaagcccatcgacagcgagaccaagatgtag

SEQ ID NO: 108540 - DNA, 1473 bp, Artificial Sequence
  derived and/or modified sequence
atgaccaagagcaacggcgaggagcccaagatgggcggccggatggaacgttttcaacaaggcgtccgaaaaaggaccttactagccaagaagaaagttcagaacatcaccaaagaggacgtaaagtcctacttgtttcgcaacgccttcgtactgttgaccggaatggctgccctggactccaaagcttccgggaagatgggcatgcgtgcagtggtctattacatgaccaccactatcatagcagtggttatcggaattattattgtcatcataattcaccccggcaaggggactaaggaaaatatgcatcgtgaaggaaaaatagtgcgggttaccgctgccgacgcatttcttgacttaatccgcaatatgttcccaccaaatctggttgaagcctgtttcaaacagtttaagacaaattacgaaaagcggtccttcaaggtgccaatccaggcaaacgagaccttggttggggccgtgatcaataatgtgagcgaagccatggagactctgacaagaatcaccgaggagttggtacctgtgccaggcagcgttaatggggttaacgccttgggtctggtggttttttccatgtgtttcggatttgttataggcaacatgaaagaacagggccaggctttaagagaattctttgacagcctgaatgaggcaatcatgcgccttgttgccgtcattatgtggtacgccccggtaggtatcctgttcttaatcgctggaaaaatagtggagatggaggacatgggggtcattggtgggcagctcgccatgtacacggtgactgtcattgtgggtttgcttatacatgcggtgatcgtactgccccttctttattttttggtgaccaggaagaacccatgggtattcatcggcggtttactgcaggccctgattactgctttggggacatcttcgagctctgcaacactaccgattacctttaaatgtctggaggaaaacaacggcgttgacaaaagggtgactagatttgttctccctgtcggggccacaatcaacatggacggaaccgctctttatgaggctctcgccgcaatttttattgcccaggttaacaatttcgagcttaacttcgggcagataatcacaatatccattacagccaccgcggcctcaatcggcgccgctgggataccacaggcagggctggtcaccatggtgatcgtactaaccagcgtgggcctgccaacagatgatatcaccctgattatcgcagtggattggtttttggacaggctgcgcaccacgaccaacgtgctcggcgattcactgggcgcaggaatcgtggaacacctcagcagacatgagttaaagaaccgggatgtcgagatgggtaattctgtcattgaggaaaacgagatgaaaaagccttatcagcttatagcccaggataacgaaaccgaaaagcccatagattccgaaacgaaaatgtag

SEQ ID NO: 108541 - DNA, 1473 bp, Artificial Sequence
  derived and/or modified sequence
atgacaaaatctaatggagaagagccaaagatgggcggaaggatggaaaggtttcagcaaggggtgcggaagagaaccctactggcgaaaaagaaagttcagaacattaccaaggaagatgttaaatcataccttttcaggaatgcatttgtactcctcaccggcatggctgcattggattcaaaagctagtggcaaaatggggatgcgggcagttgtgtactatatgactaccacaattattgcagtcgtgatcgggatcatcatcgtgattatcatccacccaggaaaagggactaaggaaaacatgcatcgggaaggaaaaattgtcagggtgacagctgcagacgcgtttctggacctgatacggaacatgtttcctccgaacctggtggaggcctgcttcaaacagtttaaaaccaattacgaaaagcggtccttcaaggtgcccatccaggccaatgaaaccctcgtcggagctgtgatcaacaatgtcagcgaggctatggaaacgttgacgcgcatcacggaggagcttgtccccgtgcccggatccgttaacggtgtgaacgcactgggcctggtggtctttagcatgtgctttgggttcgtcattggcaacatgaaagaacagggccaagcgcttagagaattcttcgatagcctcaatgaagccattatgcgcttggtcgctgtaatcatgtggtacgcgcctgtgggcatcttatttttaattgcagggaagatcgtcgagatggaggacatgggcgtgattggaggacagctcgcaatgtatactgtcacggtcattgtaggactgcttatacacgctgttatagtgttgcctctcctctatttcctggttactcggaagaacccctgggtattcatcggtggcctactccaagcacttattacagcccttggtacctcgtcctcctcggctaccctgcctattactttcaaatgtttggaagagaacaacggcgtggacaagagggtgacacggttcgtgctgcccgtcggggcaacaattaacatggatggaaccgctttatacgaagcactggctgctatctttatcgcacaggtgaataatttcgaactcaacttcggtcagatcatcactatcagtattactgcaaccgcggcttcgatcggagccgctggcatccctcaggcgggtttggtgacaatggtgattgtgcttacctcagtgggtctacctactgatgacataaccctgatcatcgccgtcgactggttcctcgatagacttaggactaccacaaacgtgctaggcgatagcctgggtgcgggaatagtcgagcacctctcccgacatgagttgaaaaaccgggacgtggagatgggtaacagtgtaattgaggagaatgagatgaagaaaccctaccagctcattgcacaagataacgagacagagaagccgatcgatagcgaaacaaagatgtag

SEQ ID NO: 108542 - DNA, 1999 bp, Artificial Sequence
  derived and/or modified sequence
acatgcacactgtcagggctagcctgcctgcttacgcgcgctgcggattgttgctccgttgtacctgctggggaattcacctcgttactgcttgatatcttccaccccttacaaaatcagaaaagttgtgttttctaataccaaagaggaggtttggctttctgtgggtgattcccagacactgaagtgcaaagaagagaccctcctagaaaagtaaaatatgactaaaagcaatggagaagagcccaagatggggggcaggatggagagattccagcagggagtccgtaaacgcacacttttggccaagaagaaagtgcagaacattacaaaggaggatgttaaaagttacctgtttcggaatgcttttgtgctgctcacaggaatggcggcgctagatagtaaggcatcagggaagatgggaatgcgagctgtagtctattatatgactaccaccatcattgctgtggtgattggcataatcattgtcatcatcatccatcctgggaagggcacaaaggaaaacatgcacagagaaggcaaaattgtacgagtgacagctgcagatgccttcctggacttgatcaggaacatgttccctccaaatctggtagaagcctgctttaaacagtttaaaaccaactatgagaagagaagctttaaagtgcccatccaggccaacgaaacgcttgtgggtgctgtgataaacaatgtgtctgaggccatggagactcttacccgaatcacagaggagctggtcccagttccaggatctgtgaatggagtcaatgccctgggtctagttgtcttctccatgtgcttcggttttgtgattggaaacatgaaggaacaggggcaggccctgagagagttctttgattctcttaacgaagccatcatgagactggtagcagtaataatgtggtatgcccccgtgggtattctcttcctgattgctgggaagattgtggagatggaagacatgggtgtgattggggggcagcttgccatgtacaccgtgactgtcattgttggcttactcattcacgcagtcatcgtcttgccactcctctacttcttggtaacacggaaaaacccttgggtttttattggagggttgctgcaagcactcatcaccgctctggggacctcttcaagttctgccaccctacccatcaccttcaagtgcctggaagagaacaatggcgtggacaagcgcgtcaccagattcgtgctccccgtaggagccaccattaacatggatgggactgccctctatgaggctttggctgccattttcattgctcaagttaacaactttgaactgaacttcggacaaattattacaatcagcatcacagccacagctgccagtattggggcagctggaattcctcaggcgggcctggtcactatggtcattgtgctgacatctgtcggcctgcccactgacgacatcacgctcatcatcgcggtggactggttcctggatcgcctccggaccaccaccaacgtactgggagactccctgggagctgggattgtggagcacttgtcacgacatgaactgaagaacagagatgttgaaatgggtaactcagtgattgaagagaatgaaatgaagaaaccatatcaactgattgcacaggacaatgaaactgagaaacccatcgacagtgaaaccaagatgtagactaacataaagaaacactttcttgagcaccaggtgttaaaaaccattataaaatctttccatctcattacagctcattcgctccagcaagcccgtcatcttccctttcctcccttctgataagactggaaaatagtcctccaaaacacaagggaggattttgggtggccaaagtgtacaattttcatcccacaattgaaatttttaaatcatttcatgttagtcttaccgaataaggtaccaagatcacaaatagtgttgatcagatcttacaagtttatgtggcacacaatcctataaatgtga

SEQ ID NO: 108543 - DNA, 1473 bp, Artificial Sequence
  derived and/or modified sequence
atgaccaagagcaacggcgaggagcccaagatgggcggcagaatggagagattccagcagggcgtgagaaagagaaccctgctggccaagaagaaggtgcagaacatcaccaaggaggacgtgaagagctacctgttcagaaacgccttcgtgctgctgaccggcatggccgccctggacagcaaggccagcggcaagatgggcatgagagccgtggtgtactacatgaccaccaccatcatcgccgtggtgatcggcatcatcatcgtgatcatcatccaccccggcaagggcaccaaggagaacatgcacagagagggcaagatcgtgagagtgaccgccgccgacgccttcctggacctgatcagaaacatgttcccccccaacctggtggaggcctgcttcaagcagttcaagaccaactacgagaagagaagcttcaaggtgcccatccaggccaacgagaccctggtgggcgccgtgatcaacaacgtgagcgaggccatggagaccctgaccagaatcaccgaggagctggtgcccgtgcccggcagcgtgaacggcgtgaacgccctgggcctggtggtgttcagcatgtgcttcggcttcgtgatcggcaacatgaaggagcagggccaggccctgagagagttcttcgacagcctgaacgaggccatcatgagactggtggccgtgatcatgtggtacgcccccgtgggcatcctgttcctgatcgccggcaagatcgtggagatggaggacatgggcgtgatcggcggccagctggccatgtacaccgtgaccgtgatcgtgggcctgctgatccacgccgtgatcgtgctgcccctgctgtacttcctggtgaccagaaagaacccctgggtgttcatcggcggcctgctgcaggccctgatcaccgccctgggcaccagcagcagcagcgccaccctgcccatcaccttcaagtgcctggaggagaacaacggcgtggacaagagagtgaccagattcgtgctgcccgtgggcgccaccatcaacatggacggcaccgccctgtacgaggccctggccgccatcttcatcgcccaggtgaacaacttcgagctgaacttcggccagatcatcaccatcagcatcaccgccaccgccgccagcatcggcgccgccggcatcccccaggccggcctggtgaccatggtgatcgtgctgaccagcgtgggcctgcccaccgacgacatcaccctgatcatcgccgtggactggttcctggacagactgagaaccaccaccaacgtgctgggcgacagcctgggcgccggcatcgtggagcacctgagcagacacgagctgaagaacagagacgtggagatgggcaacagcgtgatcgaggagaacgagatgaagaagccctaccagctgatcgcccaggacaacgagaccgagaagcccatcgacagcgagaccaagatgtag

SEQ ID NO: 108544 - protein, 107 aa, Artificial Sequence
  derived and/or modified sequence
MTKSNGEEPKMGGRMERFQQGVRKRTLLAKKKVQNITKEDVKSYLFRNAFVLLTVTAVIVGTILGFTLRPYRMSYREVKYFSFPGELLMRMLQMLVLPLIISSLVTG

SEQ ID NO: 108545 - protein, 101 aa, Artificial Sequence
  derived and/or modified sequence
MTKSNGEEPKMGGRMERFQQGVRKRTLLAKKKVQNITKEDVKSYLFRNAFVLLTVTAVIVGTILGFTLRPYRMSYREVKYFSFPGELLMRMLQMLVLPLII

SEQ ID NO: 108546 - DNA, 324 bp, Artificial Sequence
  derived and/or modified sequence
atgacaaaatcgaacggagaagagccaaaaatgggtggcagaatggaaaggtttcagcagggggttagaaagagaaccctgctggctaaaaagaaagtgcagaacataactaaggaggacgtaaagtcctacctgttcagaaacgcctttgtactgctgaccgtcactgcagtcattgtaggaaccatcctgggattcaccttacgaccctaccggatgtcttacagggaagtgaagtacttcagctttccaggcgaacttctgatgagaatgctgcagatgcttgtcttacctttgatcatctctagtctagtcactgggtag

SEQ ID NO: 108547 - DNA, 324 bp, Artificial Sequence
  derived and/or modified sequence
atgacaaagagcaacggcgaggaacccaagatgggagggaggatggaacggtttcagcagggggtaagaaagcgcactctactggccaagaaaaaagtccagaacattaccaaggaggacgtaaaaagttatctgtttcggaatgcattcgtgctattgaccgtgaccgctgtgatcgtcggtacaatcctcggcttcaccctgcgtccttacagaatgtcctaccgcgaggtaaaatacttctcttttccaggtgagctgctgatgagaatgctccagatgctcgtactgcccctgatcattagcagccttgtaaccgggtag

SEQ ID NO: 108548 - DNA, 306 bp, Artificial Sequence
  derived and/or modified sequence
atgactaagagtaacggtgaggaaccaaagatgggggggagaatggaacggtttcagcagggcgtgcggaagcgtacacttcttgcaaaaaaaaaagtgcagaatattacgaaggaagatgtgaaatcttatttgtttaggaacgctttcgttctgctgactgtgaccgcggttatcgtggggacgattctgggattcactcttcggccctatagaatgtcttatagggaagtaaagtatttctcgttcccaggcgaactactgatgcgcatgctgcagatgctggttctgccgcttattatttag

SEQ ID NO: 108549 - DNA, 324 bp, Artificial Sequence
  derived and/or modified sequence
atgaccaagagcaatggagaggagcccaagatgggcggccgcatggagcgcttccagcagggcgtgaggaagaggaccctgctggccaagaagaaggtgcagaacatcaccaaggaggatgtgaagagctacctgttcagaaatgcctttgtgctgctgactgtgacagctgtgattgtgggcaccatcctgggcttcaccctgcggccctacaggatgagctaccgggaggtgaagtacttctccttccctggagagctgctgatgaggatgctgcagatgctggtgctgcccctcatcatcagcagcctggtgactggatag

SEQ ID NO: 108550 - DNA, 306 bp, Artificial Sequence
  derived and/or modified sequence
atgaccaagagcaatggagaggagcccaagatgggcggccgcatggagcgcttccagcagggcgtgaggaagaggaccctgctggccaagaagaaggtgcagaacatcaccaaggaggatgtgaagagctacctgttcagaaatgcctttgtgctgctgactgtgacagctgtgattgtgggcaccatcctgggcttcaccctgcggccctacaggatgagctaccgggaggtgaagtacttctccttccctggagagctgctgatgaggatgctgcagatgctggtgctgcccctcatcatctag

SEQ ID NO: 108551 - DNA, 324 bp, Artificial Sequence
  derived and/or modified sequence
atgaccaagagcaacggcgaggagcccaagatgggcggccggatggagcgcttccaacaaggggtgaggaaacgcacactgctggctaaaaaaaaagttcagaatataacgaaagaggacgtaaagtcctatctatttcggaacgcgtttgtcttgcttacagttaccgcagtgatcgtgggtaccattctgggtttcaccctaagaccttatcgcatgtcatatcgcgaagtgaagtacttcagctttcctggcgagttgcttatgaggatgctccagatgctggtgctccctctaattatttcaagccttgtgaccggatag

SEQ ID NO: 108552 - DNA, 324 bp, Artificial Sequence
  derived and/or modified sequence
atgaccaagagcaacggcgaggagcccaagatgggcggccggatggagcgttttcaacaaggcgtacggaagcgtaccttactcgccaagaaaaaggttcaaaatatcactaaagaagacgttaaaagttatctcttcaggaacgcctttgtgctgcttaccgtgactgccgtgatcgtgggaacgatcctgggttttacgttgagaccctaccgcatgagttatcgtgaggttaaatacttttccttccccggggagcttctcatgagaatgcttcagatgttagtgcttccactgattatatcaagtctcgtaacagggtag

SEQ ID NO: 108553 - DNA, 306 bp, Artificial Sequence
  derived and/or modified sequence
atgaccaagagcaacggcgaggagcccaagatgggcggccggatggagcggttccagcagggcgtgagaaagcggaccctcctggctaaaaagaaggttcagaatatcaccaaagaagatgtcaaatcgtatctgttcagaaacgcctttgtgctgcttaccgtgacagctgttatcgtgggaacaatactaggatttacgctccgcccttacaggatgtcataccgagaggtcaaatacttctcatttccaggagagctattaatgagaatgcttcaaatgttggtgctgccactcattatctag

SEQ ID NO: 108554 - DNA, 324 bp, Artificial Sequence
  derived and/or modified sequence
atgacaaagagcaacggggaagaacctaaaatggggggtcgaatggagcgctttcagcaaggagtgcgcaagaggaccctgcttgcaaagaagaaggtacagaacataacaaaggaagatgtgaagagctacttgttcagaaacgcctttgtgttactcaccgttacagccgtaatcgttggtactatcctgggattcaccctcagaccatacaggatgtcttaccgagaagtgaagtacttttcatttcccggtgagctgctaatgcgaatgctgcaaatgttagtattaccactaattatcagtagcttagtgaccggttag

SEQ ID NO: 108555 - DNA, 324 bp, Artificial Sequence
  derived and/or modified sequence
atgacaaagtctaatggagaagaacctaaaatggggggtaggatggagcgttttcagcagggagtaagaaagcggaccttgctggccaaaaagaaggtccagaatatcacaaaagaagacgtcaaaagttacttgtttaggaacgctttcgtacttctgacggtgacggcggtcattgtggggaccattcttgggtttactctgcgcccttacaggatgtcctacagagaggtcaaatacttctcattccccggagaattgttaatgaggatgctccaaatgctcgtgctgccattgatcatctctagtcttgtgacgggatag

SEQ ID NO: 108556 - DNA, 306 bp, Artificial Sequence
  derived and/or modified sequence
atgacgaagtccaacggagaagagccaaagatggggggaaggatggaaagattccagcaaggcgttaggaagcgcactctgctggctaagaaaaaagttcagaacatcactaaggaggatgtgaagtcgtatctgtttcgaaatgcttttgtactcctgacggtgaccgctgtgatagtcggcactattctgggattcacgctccgcccttatcgaatgagctatagggaggtaaaatacttttcttttcctggagagctgctgatgcgcatgctgcagatgcttgtgcttcctcttattatatag

SEQ ID NO: 108557 - DNA, 540 bp, Artificial Sequence
  derived and/or modified sequence
ggtgtctgtttatgccgggtccgctgttaattcggagttgagtcattcggggtggattgggggcagattgtggcgcgagatctagaaaaggatcaaggttgagcggatctgcttaaaagtgactgttgtgttttctaataccaaagaggaggtttggctttctgtgggtgattcccagacactgaagtgcaaagaagagaccctcctagaaaagtaaaatatgactaaaagcaatggagaagagcccaagatggggggcaggatggagagattccagcagggagtccgtaaacgcacacttttggccaagaagaaagtgcagaacattacaaaggaggatgttaaaagttacctgtttcggaatgcttttgtgctgctcacagtcaccgctgtcattgtgggtacaatccttggatttaccctccgaccatacagaatgagctaccgggaagtcaagtacttctcctttcctggggaacttctgatgaggatgttacagatgctggtcttaccacttatcatctccagtcttgtcacagg

SEQ ID NO: 108558 - DNA, 566 bp, Artificial Sequence
  derived and/or modified sequence
acactgcaaccttgaggtctggtattgtggctctccagtccttgattcctgctgagattatgcaatttgccaagagcttgcctggtgtggagcagcactgatttctcacccctggaggctataactcatgtctctttttctcccattctagttgtgttttctaataccaaagaggaggtttggctttctgtgggtgattcccagacactgaagtgcaaagaagagaccctcctagaaaagtaaaatatgactaaaagcaatggagaagagcccaagatggggggcaggatggagagattccagcagggagtccgtaaacgcacacttttggccaagaagaaagtgcagaacattacaaaggaggatgttaaaagttacctgtttcggaatgcttttgtgctgctcacagtcaccgctgtcattgtgggtacaatccttggatttaccctccgaccatacagaatgagctaccgggaagtcaagtacttctcctttcctggggaacttctgatgaggatgttacagatgctggtcttaccacttatcatctccagtcttgtcacagg

SEQ ID NO: 108559 - DNA, 784 bp, Artificial Sequence
  derived and/or modified sequence
aaaacaaagccagcaagcctgcttctggtgtgccaagattaatcaatattccagaaacctcggggtttccccctcctccctgtgcggtttccattccccactcctcctttcccgggcacagactcctccccttttcttaagttgccctgatagtaacttgcagtttcagagcacatgcacactgtcagggctagcctgcctgcttacgcgcgctgcggattgttgctccgttgtacctgctggggaattcacctcgttactgcttgatatcttccaccccttacaaaatcagaaaagtcatttgcgaggagtcctttggtttccagttacctcccccacaggcgcacacgctggctgcttgcgttggcagcgacacacatccatgttgtgttttctaataccaaagaggaggtttggctttctgtgggtgattcccagacactgaagtgcaaagaagagaccctcctagaaaagtaaaatatgactaaaagcaatggagaagagcccaagatggggggcaggatggagagattccagcagggagtccgtaaacgcacacttttggccaagaagaaagtgcagaacattacaaaggaggatgttaaaagttacctgtttcggaatgcttttgtgctgctcacagtcaccgctgtcattgtgggtacaatccttggatttaccctccgaccatacagaatgagctaccgggaagtcaagtacttctcctttcctggggaacttctgatgaggatgttacagatgctggtcttaccacttatcatct

SEQ ID NO: 108560 - DNA, 324 bp, Artificial Sequence
  derived and/or modified sequence
atgaccaagagcaacggcgaggagcccaagatgggcggcagaatggagagattccagcagggcgtgagaaagagaaccctgctggccaagaagaaggtgcagaacatcaccaaggaggacgtgaagagctacctgttcagaaacgccttcgtgctgctgaccgtgaccgccgtgatcgtgggcaccatcctgggcttcaccctgagaccctacagaatgagctacagagaggtgaagtacttcagcttccccggcgagctgctgatgagaatgctgcagatgctggtgctgcccctgatcatcagcagcctggtgaccggctag

SEQ ID NO: 108561 - DNA, 306 bp, Artificial Sequence
  derived and/or modified sequence
atgaccaagagcaacggcgaggagcccaagatgggcggcagaatggagagattccagcagggcgtgagaaagagaaccctgctggccaagaagaaggtgcagaacatcaccaaggaggacgtgaagagctacctgttcagaaacgccttcgtgctgctgaccgtgaccgccgtgatcgtgggcaccatcctgggcttcaccctgagaccctacagaatgagctacagagaggtgaagtacttcagcttccccggcgagctgctgatgagaatgctgcagatgctggtgctgcccctgatcatctag

SEQ ID NO: 108562 - protein, 496 aa, Artificial Sequence
  derived and/or modified sequence
MAAPEPARAAPPPPPPPPPPPGADRVVKAVPFPPTHRLTSEEVFDLDGIPRVDVLKNHLVKEGRVDEEIALRIINEGAAILRREKTMIEVEAPITVCGDIHGQFFDLMKLFEVGGSPANTRYLFLGDYVDRGYFSIECVLYLWVLKILYPSTLFLLRGNHECRHLTEYFTFKQECKIKYSERVYEACMEAFDSLPLAALLNQQFLCVHGGLSPEIHTLDDIRRLDRFKEPPAFGPMCDLLWSDPSEDFGNEKSQEHFSHNTVRGCSYFYNYPAVCEFLQNNNLLSIIRAHEAQDAGYRMYRKSQTTGFPSLITIFSAPNYLDVYNNKAAVLKYENNVMNIRQFNCSPHPYWLPNFMDVFTWSLPFVGEKVTEMLVNVLSICSDDELMTEGEDQFDGSAAARKEIIRNKIRAIGKMARVFSVLREESESVLTLKGLTPTGMLPSGVLAGGRQTLQSGNDVMQLAVPQMDWGTPHSFANNSHNACREFLLFFSSCLSS

SEQ ID NO: 108563 - protein, 514 aa, Artificial Sequence
  derived and/or modified sequence
MAAPEPARAAPPPPPPPPPPPGADRVVKAVPFPPTHRLTSEEVFDLDGIPRVDVLKNHLVKEGRVDEEIALRIINEGAAILRREKTMIEVEAPITVCGDIHGQFFDLMKLFEVGGSPANTRYLFLGDYVDRGYFSIEHVLGTEDISINPHNNINECVLYLWVLKILYPSTLFLLRGNHECRHLTEYFTFKQECKIKYSERVYEACMEAFDSLPLAALLNQQFLCVHGGLSPEIHTLDDIRRLDRFKEPPAFGPMCDLLWSDPSEDFGNEKSQEHFSHNTVRGCSYFYNYPAVCEFLQNNNLLSIIRAHEAQDAGYRMYRKSQTTGFPSLITIFSAPNYLDVYNNKAAVLKYENNVMNIRQFNCSPHPYWLPNFMDVFTWSLPFVGEKVTEMLVNVLSICSDDELMTEGEDQFDGSAAARKEIIRNKIRAIGKMARVFSVLREESESVLTLKGLTPTGMLPSGVLAGGRQTLQSGNDVMQLAVPQMDWGTPHSFANNSHNACREFLLFFSSCLSS

SEQ ID NO: 108564 - DNA, 1491 bp, Artificial Sequence
  derived and/or modified sequence
atggccgcccccgagcccgccagagccgcccccccccccccccccccccccccccccccccccggcgccgacagagtggtgaaggccgtgcccttcccccccacccacagactgaccagcgaggaggtgttcgacctggacggcatccccagagtggacgtgctgaagaaccacctggtgaaggagggcagagtggacgaggagatcgccctgagaatcatcaacgagggcgccgccatcctgagaagagagaagaccatgatcgaggtggaggcccccatcaccgtgtgcggcgacatccacggccagttcttcgacctgatgaagctgttcgaggtgggcggcagccccgccaacaccagatacctgttcctgggcgactacgtggacagaggctacttcagcatcgagtgcgtgctgtacctgtgggtgctgaagatcctgtaccccagcaccctgttcctgctgagaggcaaccacgagtgcagacacctgaccgagtacttcaccttcaagcaggagtgcaagatcaagtacagcgagagagtgtacgaggcctgcatggaggccttcgacagcctgcccctggccgccctgctgaaccagcagttcctgtgcgtgcacggcggcctgagccccgagatccacaccctggacgacatcagaagactggacagattcaaggagccccccgccttcggccccatgtgcgacctgctgtggagcgaccccagcgaggacttcggcaacgagaagagccaggagcacttcagccacaacaccgtgagaggctgcagctacttctacaactaccccgccgtgtgcgagttcctgcagaacaacaacctgctgagcatcatcagagcccacgaggcccaggacgccggctacagaatgtacagaaagagccagaccaccggcttccccagcctgatcaccatcttcagcgcccccaactacctggacgtgtacaacaacaaggccgccgtgctgaagtacgagaacaacgtgatgaacatcagacagttcaactgcagcccccacccctactggctgcccaacttcatggacgtgttcacctggagcctgcccttcgtgggcgagaaggtgaccgagatgctggtgaacgtgctgagcatctgcagcgacgacgagctgatgaccgagggcgaggaccagttcgacggcagcgccgccgccagaaaggagatcatcagaaacaagatcagagccatcggcaagatggccagagtgttcagcgtgctgagagaggagagcgagagcgtgctgaccctgaagggcctgacccccaccggcatgctgcccagcggcgtgctggccggcggcagacagaccctgcagagcggcaacgacgtgatgcagctggccgtgccccagatggactggggcaccccccacagcttcgccaacaacagccacaacgcctgcagagagttcctgctgttcttcagcagctgcctgagcagctag

SEQ ID NO: 108565 - DNA, 1545 bp, Artificial Sequence
  derived and/or modified sequence
atggccgcccccgagcccgccagagccgcccccccccccccccccccccccccccccccccccggcgccgacagagtggtgaaggccgtgcccttcccccccacccacagactgaccagcgaggaggtgttcgacctggacggcatccccagagtggacgtgctgaagaaccacctggtgaaggagggcagagtggacgaggagatcgccctgagaatcatcaacgagggcgccgccatcctgagaagagagaagaccatgatcgaggtggaggcccccatcaccgtgtgcggcgacatccacggccagttcttcgacctgatgaagctgttcgaggtgggcggcagccccgccaacaccagatacctgttcctgggcgactacgtggacagaggctacttcagcatcgagcacgtgctgggcaccgaggacatcagcatcaacccccacaacaacatcaacgagtgcgtgctgtacctgtgggtgctgaagatcctgtaccccagcaccctgttcctgctgagaggcaaccacgagtgcagacacctgaccgagtacttcaccttcaagcaggagtgcaagatcaagtacagcgagagagtgtacgaggcctgcatggaggccttcgacagcctgcccctggccgccctgctgaaccagcagttcctgtgcgtgcacggcggcctgagccccgagatccacaccctggacgacatcagaagactggacagattcaaggagccccccgccttcggccccatgtgcgacctgctgtggagcgaccccagcgaggacttcggcaacgagaagagccaggagcacttcagccacaacaccgtgagaggctgcagctacttctacaactaccccgccgtgtgcgagttcctgcagaacaacaacctgctgagcatcatcagagcccacgaggcccaggacgccggctacagaatgtacagaaagagccagaccaccggcttccccagcctgatcaccatcttcagcgcccccaactacctggacgtgtacaacaacaaggccgccgtgctgaagtacgagaacaacgtgatgaacatcagacagttcaactgcagcccccacccctactggctgcccaacttcatggacgtgttcacctggagcctgcccttcgtgggcgagaaggtgaccgagatgctggtgaacgtgctgagcatctgcagcgacgacgagctgatgaccgagggcgaggaccagttcgacggcagcgccgccgccagaaaggagatcatcagaaacaagatcagagccatcggcaagatggccagagtgttcagcgtgctgagagaggagagcgagagcgtgctgaccctgaagggcctgacccccaccggcatgctgcccagcggcgtgctggccggcggcagacagaccctgcagagcggcaacgacgtgatgcagctggccgtgccccagatggactggggcaccccccacagcttcgccaacaacagccacaacgcctgcagagagttcctgctgttcttcagcagctgcctgagcagctag

SEQ ID NO: 108566 - DNA, 1491 bp, Artificial Sequence
  derived and/or modified sequence
atggctgcacccgaacctgcacgagccgccccgcctccaccacccccacctcctccacctcccggtgccgatcgggtggtgaaggctgtcccgttcccacccactcatcgccttacctcagaggaagtgttcgacctcgacggcatcccacgcgtcgacgtgttgaaaaatcacctggtgaaggaggggcgggtcgacgaagagatcgctctgcgtatcataaatgagggagctgccattttgcgacgggaaaaaacaatgattgaggttgaagcacccatcacagtgtgtggagacatccatggacaattctttgatcttatgaaactcttcgaagttgggggcagtccggcgaacacccgctatctctttctgggcgactacgtggaccgaggctacttcagcatagaatgtgtgctgtacctgtgggtcttgaagatcctgtacccttctacactgtttcttttgcgggggaaccacgaatgccgccatctcaccgagtacttcacatttaagcaagagtgcaaaataaaatactcggagcgggtgtatgaggcttgcatggaagccttcgattccctgccgttggctgccctgctgaatcagcagtttctttgcgtccacggagggctgagtcctgaaatccacaccctggatgacatccgaagactcgacagattcaaagaaccccccgccttcgggcccatgtgtgaccttctgtggtccgacccatctgaagattttggcaacgagaaatcacaggagcatttctcccacaataccgttagaggatgttcttatttttataactaccctgccgtgtgcgagtttttacagaataacaacctgttgagtattattcgagcacacgaggctcaggacgccggctatcggatgtaccggaaaagtcagacaacagggtttccaagccttataactatcttctcggctcccaactacctagacgtgtataacaataaggccgccgtgctgaaatacgaaaacaatgttatgaatatccgccaattcaactgctcaccccacccttactggttaccgaattttatggatgtcttcacatggtcgctgcccttcgtgggcgagaaggtgaccgagatgctggtgaacgtgctgtccatctgctcagacgacgagctgatgaccgagggagaggatcagttcgatggcagtgccgccgcgcggaaagaaattatacgcaacaagatacgtgcaataggaaagatggcgagagtgttttcagtcctgagagaggagtctgagtcagtcttgactctgaaaggactgacacctactggaatgcttccaagtggagtccttgctggcgggcgccaaacactgcagagcggtaacgatgtgatgcaattggccgttccccaaatggactggggcacacctcattcctttgcaaataatagccataacgcttgtagagagtttctattgtttttcagctcgtgtctttcaagctag

SEQ ID NO: 108567 - DNA, 1545 bp, Artificial Sequence
  derived and/or modified sequence
atggccgctcccgaacctgcccgcgctgctccacccccacctcctcctcccccacctcctccaggcgccgaccgagtggttaaagccgttccgttcccccccacccaccggctgacctcagaggaagtgtttgatctcgacgggattccgcgggtggatgtcctgaaaaatcacctcgtcaaggagggtagagtcgacgaggagatagccttaaggatcatcaatgagggggctgctatccttaggagagagaagaccatgattgaagtggaggcgccgattactgtgtgcggtgatatccatgggcaattcttcgaccttatgaagctgttcgaagtcggcgggtccccagctaacaccagatatctctttctgggtgactatgttgaccgaggctatttctctattgagcatgtcctgggcacagaagacatttccattaatccccacaacaacattaacgagtgcgtgttgtacctgtgggtactgaaaattctgtatcctagcacattgttcctcctacgcggaaatcatgaatgccgccacctgactgaatacttcacttttaaacaggagtgcaaaatcaagtactccgagagggtctatgaggcatgcatggaagcctttgatagcttaccactggctgccctgttgaatcagcagtttctatgtgtacacgggggcctaagtcctgagatccacaccctggacgatatacgtaggctcgaccggtttaaggagcctcctgccttcggacccatgtgcgacttactgtggtctgatcctagcgaagacttcggcaacgagaaaagccaggaacactttagccacaacaccgtaagaggatgttcctatttttacaactatcccgcagtgtgcgagtttcttcagaataataacctcctcagtatcattcgcgcacatgaagcccaggatgcaggttatcgtatgtaccgcaagtcacagactaccggcttcccctcattgattactattttttcagcccccaattacctggatgtctacaacaacaaagcagcagtacttaagtatgaaaacaatgtaatgaacatcaggcagttcaactgttcaccacacccgtactggcttcctaatttcatggacgttttcacatggtcgttaccattcgtaggtgaaaaagtgaccgaaatgctcgtgaacgttctgagtatttgctccgacgacgagctaatgactgaaggagaggatcagttcgatggctctgcggctgctcgtaaagaaattattaggaataaaattcgggccatcggcaaaatggcacgcgtattctctgtcctgcgagaggaatccgagtcagtcctgaccctcaaaggcctgacacctaccggcatgctgccaagcggagttctagcgggaggtcggcagaccctccagtcgggcaacgacgtgatgcaattagccgttccacagatggactggggtaccccccacagcttcgctaacaattcccacaacgcttgtcgtgaatttcttctattctttagcagttgtttatcatcttag

SEQ ID NO: 108568 - DNA, 1491 bp, Artificial Sequence
  derived and/or modified sequence
atggccgcccctgagcccgcccgggccgcccctcctcctcctcctcctcctcctcctcctcctggagctgacagagtggtgaaggctgtgcccttcccccccacccaccggctgaccagcgaggaggtgtttgacctggatggcatcccccgggtggatgtgctgaagaaccacctggtgaaggagggccgggtggatgaggagatcgccctgcgcatcatcaatgaaggagctgccatcctgcggcgggagaagaccatgattgaggtggaggcccccatcaccgtgtgtggggacatccacggccagttctttgacctgatgaagctgtttgaggtgggcggcagccctgccaacacccgctacctgttcctgggggactatgtggaccggggctacttcagcattgaatgtgtgctgtacctgtgggtgctgaagatcctgtaccccagcaccctcttcctgctgcggggcaaccatgaatgtcgccacctgacagagtacttcaccttcaagcaggagtgcaagatcaagtacagcgagcgggtgtatgaggcctgcatggaggcctttgacagcctgcccctggccgccctgctgaaccagcagttcctgtgtgtgcacggcggcctgagccctgagatccacaccctggatgacatccggcggctggaccgcttcaaggagcccccagccttcggccccatgtgtgacctgctgtggagcgaccccagcgaggactttggaaatgagaagagccaggagcacttcagccacaacacagtgcggggctgcagctacttctacaactacccagctgtgtgtgagttcctgcagaacaacaacctgctgagcatcatccgggcccacgaggcccaggatgctggctacaggatgtacaggaagagccagaccaccggcttccccagcctcatcaccatcttcagcgcccccaactacctggatgtgtacaacaacaaggctgctgtgctgaagtatgagaacaacgtgatgaacatccggcagttcaactgcagcccccacccctactggctgcccaacttcatggatgtgttcacctggagcctgccctttgtgggggagaaggtgacagagatgctggtgaatgtgctgagcatctgcagtgatgatgagctgatgacagaaggagaggaccagtttgatggcagcgctgctgccaggaaggagatcatccggaacaagatccgggccatcggcaagatggcccgggtcttctctgtgctgcgggaggagagcgagagcgtgctgaccctgaagggcctgacccccaccggcatgctgcccagcggcgtgctggccggcggccggcagaccctgcagagcggaaatgatgtgatgcagctggccgtgccccagatggactggggcaccccccacagctttgccaacaacagccacaatgcctgccgggagttcctgctcttcttcagcagctgcctgagcagctag

SEQ ID NO: 108569 - DNA, 1545 bp, Artificial Sequence
  derived and/or modified sequence
atggccgcccctgagcccgcccgggccgcccctcctcctcctcctcctcctcctcctcctcctggagctgacagagtggtgaaggctgtgcccttcccccccacccaccggctgaccagcgaggaggtgtttgacctggatggcatcccccgggtggatgtgctgaagaaccacctggtgaaggagggccgggtggatgaggagatcgccctgcgcatcatcaatgaaggagctgccatcctgcggcgggagaagaccatgattgaggtggaggcccccatcaccgtgtgtggggacatccacggccagttctttgacctgatgaagctgtttgaggtgggcggcagccctgccaacacccgctacctgttcctgggggactatgtggaccggggctacttcagcattgagcacgtgctgggcacagaggacatcagcatcaacccccacaacaacatcaatgaatgtgtgctgtacctgtgggtgctgaagatcctgtaccccagcaccctcttcctgctgcggggcaaccatgaatgtcgccacctgacagagtacttcaccttcaagcaggagtgcaagatcaagtacagcgagcgggtgtatgaggcctgcatggaggcctttgacagcctgcccctggccgccctgctgaaccagcagttcctgtgtgtgcacggcggcctgagccctgagatccacaccctggatgacatccggcggctggaccgcttcaaggagcccccagccttcggccccatgtgtgacctgctgtggagcgaccccagcgaggactttggaaatgagaagagccaggagcacttcagccacaacacagtgcggggctgcagctacttctacaactacccagctgtgtgtgagttcctgcagaacaacaacctgctgagcatcatccgggcccacgaggcccaggatgctggctacaggatgtacaggaagagccagaccaccggcttccccagcctcatcaccatcttcagcgcccccaactacctggatgtgtacaacaacaaggctgctgtgctgaagtatgagaacaacgtgatgaacatccggcagttcaactgcagcccccacccctactggctgcccaacttcatggatgtgttcacctggagcctgccctttgtgggggagaaggtgacagagatgctggtgaatgtgctgagcatctgcagtgatgatgagctgatgacagaaggagaggaccagtttgatggcagcgctgctgccaggaaggagatcatccggaacaagatccgggccatcggcaagatggcccgggtcttctctgtgctgcgggaggagagcgagagcgtgctgaccctgaagggcctgacccccaccggcatgctgcccagcggcgtgctggccggcggccggcagaccctgcagagcggaaatgatgtgatgcagctggccgtgccccagatggactggggcaccccccacagctttgccaacaacagccacaatgcctgccgggagttcctgctcttcttcagcagctgcctgagcagctag

SEQ ID NO: 108570 - DNA, 1491 bp, Artificial Sequence
  derived and/or modified sequence
atggccgcccccgagcccgcccgggccgccccccccccccccccccctcctcccccacctcctggagccgatcgcgttgtgaaggcagttccattcccgccaacccatagactaacgtcagaggaggtattcgatctcgacgggatcccccgagtggacgtactgaaaaaccacctggtcaaggagggcagagtcgacgaggagattgccctcagaatcatcaatgagggagctgcaattctgcgacgggaaaaaaccatgatcgaggttgaagcacccataacagtatgtggggatattcacgggcaattctttgacctgatgaagctcttcgaggtcggtggcagccctgctaatactcgctacttatttcttggcgactatgtcgatcgtgggtacttctctattgaatgcgtgttgtatctctgggtgctgaagatcctatacccctcgaccctttttctcctgcgtgggaaccacgaatgtcgacacctaacagagtatttcacctttaagcaggaatgtaaaatcaagtactctgaacgagtatatgaagcttgcatggaggcatttgacagccttcccttagcagccctattgaaccagcagtttctatgtgtccacggaggattgtcaccagaaattcacactttagacgatatccgcaggctcgataggttcaaggaaccacctgcttttggtcctatgtgcgacctcctgtggtccgatcctagtgaggattttggcaacgaaaagtctcaagaacacttctctcacaatacagtccgaggatgctcctacttctacaactatcctgccgtgtgtgaatttcttcagaataacaatctgctgagtatcatacgggcgcatgaggcgcaggacgccgggtacagaatgtaccgtaagtctcagaccaccgggttcccctctctgattaccatttttagcgctccaaattacctggatgtatataataacaaggccgcggtcctgaagtacgaaaacaacgtgatgaatattcggcagtttaactgtagccctcacccgtactggttacctaactttatggatgtgtttacctggtctctcccctttgtgggcgaaaaggtgacggagatgctggttaatgtactctccatatgttccgatgacgaattaatgacggaaggcgaggatcagtttgacgggagcgccgccgcccgtaaagagatcatccgaaacaaaataagagcaataggtaaaatggctcgcgtgttcagtgtgctcagagaggaaagtgaaagcgtgcttactctcaagggcttaaccccaaccggcatgctgccgtccggcgtgctggccggaggacgccagacacttcagtcaggcaacgacgtaatgcagttggctgtgccccagatggactggggaactcctcactcattcgctaataattcccataacgcttgcagagagttcctcctttttttcagctcctgtctgtcctcatag

SEQ ID NO: 108571 - DNA, 1545 bp, Artificial Sequence
  derived and/or modified sequence
atggccgcccccgagcccgcccgggccgcccccccccccccccccccacctccgccccctcccggggccgacagggtggtgaaggccgttcccttcccacccacacatcggctgaccagtgaggaggtattcgatcttgatggtattccccgcgtagacgtcctaaagaatcacctagttaaggaaggaagggtcgacgaagaaatcgcactgagaattatcaatgagggtgctgcaattcttaggcgggagaagacaatgatcgaagtggaagcacccatcacagtgtgcggcgacatccacggacagttttttgacctgatgaaactgtttgaagtcgggggatctcctgccaataccagatacctatttcttggggactacgttgatcgtgggtatttttccatagaacatgttctaggaaccgaggatatctccattaatcctcataacaacataaacgagtgcgtgctgtatctgtgggttctcaagatcctgtatcccagcactctcttcttgctcaggggaaatcacgaatgtagacacctgactgagtacttcacctttaaacaagagtgtaaaatcaagtatagtgagcgcgtttacgaggcttgcatggaggctttcgactccctgccattggccgccctcctgaaccagcagttcttgtgtgtgcatgggggccttagccctgagattcatacgttagacgacatacggcggctcgatcggtttaaggagccacccgcctttggccctatgtgcgacttgctgtggagcgacccttctgaggacttcggtaacgagaagagtcaggagcacttctctcacaataccgtgcgaggttgttcttatttctacaactacccagccgtatgcgagttcttgcagaataataatctgctgagtatcatcagagctcatgaagctcaggacgctggctatagaatgtatagaaagtcacagaccaccgggttcccgtcgttaatcaccattttttctgctccaaactatctggacgtgtacaacaataaagcggccgtgctgaaatacgagaacaatgtcatgaatattaggcaatttaactgttccccccacccctactggctgcccaatttcatggacgtgtttacatggagcttaccattcgtgggggagaaggtgacagaaatgctggtgaatgtcttgtcaatctgcagcgatgatgaattaatgacagagggtgaagaccagttcgatgggagcgctgccgctcgaaaggaaatcattcgtaacaaaatcagagcaattggcaaaatggctcgagtatttagcgtgttgcgagaggaaagcgagtccgtactcacacttaaagggctgactcccaccggaatgctgccaagcggcgtcctggccggcggaaggcagactctccaatctgggaacgatgtgatgcagttggccgttccccaaatggattggggaacgcctcacagcttcgcaaataacagccataatgcctgccgtgaattcctcttatttttttcctcgtgtctctcctcctag

SEQ ID NO: 108572 - DNA, 1491 bp, Artificial Sequence
  derived and/or modified sequence
atggcagcacccgagcccgcaagggctgctccccctccccctcctccaccgcctccccctccaggagccgatagagtcgtgaaggccgtgccatttccccctacacacaggctaacatctgaggaggtgtttgacctagatgggatacccagggttgatgtcctcaaaaaccacctggtaaaagagggcagagttgatgaagagattgccctgcgaatcatcaatgagggggctgcaattctaaggagggagaaaacgatgattgaagttgaggccccaataaccgtctgcggtgatatccatggccagttcttcgacctaatgaagctcttcgaggtgggcggaagccctgccaatacgcgctacctctttcttggtgattatgttgacagaggctacttctcaattgagtgcgtcctttatttatgggtgctaaaaattctctatccctccacattgtttctgcttaggggcaatcacgagtgtcggcatctgacggaatacttcactttcaaacaggaatgtaaaatcaaatacagcgaacgagtctacgaggcctgcatggaggcttttgattccctccccctggctgctcttttaaaccaacagtttctctgcgtgcacggcggattgtcgcctgaaatccatactctcgatgatataaggcgtctcgacagattcaaagagcctccggctttcggacctatgtgtgatttgctgtggtctgacccaagtgaggacttcggtaacgagaagagccaggagcatttttctcacaatactgtcagggggtgttcctatttttataattatcccgcagtatgtgagttcctgcagaataacaacctgcttagcatcataagggcacacgaggctcaggacgcgggttaccgtatgtatcgtaaatcccagaccaccggctttcctagccttattactatattctcagcccctaattaccttgacgtttataataacaaggctgctgtgctgaaatacgaaaataacgttatgaatatccgacaatttaattgctccccccacccgtattggctcccgaactttatggacgtcttcacctggtctctgcccttcgttggggagaaagtgacagaaatgctggtgaacgtgcttagcatctgttctgacgatgagctaatgactgaaggagaggaccagtttgacggaagcgctgcagccaggaaggaaataatccggaataaaatccgagctattggaaagatggccagagttttttctgtgctgcgagaggagagcgagagcgtgctgacactgaaggggctcacacccacaggaatgcttcctagcggcgtgctcgccggtggccgacagaccctccagagcgggaatgatgtgatgcagctggcagttccgcagatggattggggtactccccattcctttgccaataattctcacaacgcttgcagagaattcctcctgtttttctcatcctgcttatcgtcatag

SEQ ID NO: 108573 - DNA, 1545 bp, Artificial Sequence
  derived and/or modified sequence
atggccgcacccgagcctgcacgtgccgcaccacccccaccccctcctcctcctcctcccccaggggcagatagggtggtgaaggcggtacccttcccccctacccacagactcaccagcgaagaggtttttgatttagacggcatcccccgtgtcgacgtgctcaaaaaccacttagtaaaagaagggagagttgatgaagagattgccctgagaattattaatgagggggcagctatccttcgcagggaaaagactatgatcgaagtggaggcccctatcactgtatgtggggacatccatgggcaattcttcgatctcatgaaactgttcgaggtggggggatcaccggctaatacccgttacctttttttaggagactacgttgacagaggatacttttcaatcgagcatgtgttggggacagaagatatctctatcaacccacataataacatcaacgagtgtgtgctctacctctgggtgctgaaaatcctttatcccagcaccttgttcctcctgcggggaaaccacgagtgccgtcacctgacagaatattttacctttaagcaagagtgtaaaattaagtacagcgaacgcgtgtatgaagcatgcatggaagcattcgactcacttccgttggcggctctgctgaatcaacagtttctgtgcgtgcacgggggactgagccctgagatacacactcttgacgatattagacgactcgaccgcttcaaggagccacccgcattcggtccaatgtgcgatctgctgtggtctgacccatctgaggactttggaaacgaaaaatcccaagagcatttcagtcacaacactgtccggggatgcagttatttctacaattaccctgctgtgtgtgagtttttgcaaaataacaacctgctctctatcatccgggcacatgaggcacaggacgccggatacaggatgtatcgtaagtcacagaccaccggatttccttcactcatcaccattttcagcgcccctaactacctggatgtgtataacaacaaagcagctgtgcttaaatatgagaacaacgtgatgaacattagacaattcaactgttctccacacccctactggctgccaaacttcatggacgtgtttacttggagcctgccatttgtcggagaaaaggtcaccgaaatgcttgtgaatgtccttagtatctgttctgatgacgaattaatgacagaaggtgaagaccagtttgatgggtctgcagccgcacgaaaagagattatcaggaataagatccgagctatcggtaagatggccagagtcttctctgtgttaagagaagaatctgagtcagttctcacgttgaagggactgactccaacaggcatgctgccaagcggagtgctcgcgggagggagacagacacttcagagcggcaacgacgttatgcagctcgccgttccacagatggactgggggactccccacagctttgccaataacagtcataatgcctgtcgtgaatttttgctctttttctcgtcttgcctgagttcatag

SEQ ID NO: 108574 - DNA, 2418 bp, Artificial Sequence
  derived and/or modified sequence
agagggtccgccatgttccccggcggcgccgccgcttggctctggtagccgccgcccccgcccccaaccccgcccggcccagagcctagccgagccccgggcccagcatggccgccccggagccggcccgggctgcaccgcccccacccccgcccccgccgccccctcccggggctgaccgcgtcgtcaaagctgtccctttccccccaacacatcgcttgacatctgaagaagtatttgatttggatgggatacccagggttgatgttctgaagaaccacttggtgaaagaaggtcgagtagatgaagaaattgcgcttagaattatcaatgagggtgctgccatccttcggagagagaaaaccatgatagaagtagaagctccaatcacagtgtgtggtgacatccatggccaattttttgatctgatgaaactttttgaagtaggaggatcacctgctaatacacgatacctttttcttggcgattatgtggacagaggttattttagtatagagtgtgtcttatatttatgggttctgaagattctatacccaagcacattatttcttctgagaggcaaccatgaatgcagacaccttactgaatattttacctttaagcaggaatgtaaaattaagtattcggaaagagtctatgaagcttgtatggaagcttttgatagtttgcctcttgctgcacttttaaaccaacagtttctttgtgttcatggtggactttcaccagaaatacacacactggatgatattaggagattagatagattcaaagagccacctgcatttggaccaatgtgtgacttgttatggtccgatccttctgaagattttggaaatgaaaaatcacaggaacattttagtcacaatacagttcgaggatgttcttatttttataactatccagcagtgtgtgaatttttgcaaaacaataatttgttatcgattattagagctcatgaagctcaagatgcaggctatagaatgtacagaaaaagtcaaactacagggttcccttcattaataacaattttttcggcacctaattacttagatgtctacaataataaagctgctgtattaaagtatgaaaataatgtgatgaatattcgacagtttaactgttctccacatccttactggttgcctaattttatggatgtcttcacgtggtctttaccgtttgttggagaaaaagtgacagaaatgttggtaaatgttctgagtatttgctctgatgatgaactaatgactgaaggtgaagaccagtttgatggttcagctgcagcccggaaagaaatcataagaaacaaaattcgagcaattggcaagatggcaagagtcttctctgttctcagggaggagagtgaaagtgtgctgacactcaagggcctgactcccacagggatgttgcctagtggagtgttagctggaggacggcagaccctgcaaagtggtaatgatgttatgcaacttgctgtgcctcagatggactggggcacacctcactcttttgctaacaattcacataatgcatgcagggaattccttctgttttttagttcctgtctcagcagctgacctagacagggtactgtattagctagtgtctcattaatacctgatcagggcagaaaactgatagaatgggtattcctttcaattgaaaataatggtcagttcctcagcttttcatgaaatgatatgggagcagctcatatcataatgtctgaaatatttatttattcatctgtctaattcacccttttcttttaaaagccccagtttcagaatgtgaatcagggatattcctgttactaaaatggaaatgtaattccaagtttcttttttaattttttaaatttatgtcattgtattggactatgcttatatttaaaactacttaatttagagttaactacctgcttaggccccagaacattacttatgcccttcagttaccaaaagatttgtgcaaggttttgtaccctggtaaatgatgccaaagtttgttttctgtggtgtttgtcaaatgttctatgtataattaactgtctgtaacatgctgtttccttcctctgcagatgtagctgctttcctaaatctgtctgtctttctttaggttagctgtatgtctgtaaaagtatgttcaattaaattactccatcagacacttgtctgtcttgcaatgtagaagcagctttgtagcaccttgttttgaggtttgctgcatttgttgctgcactttgtgcattctgaacatgaatgtaacattagatattaagtcattgttataaggggttgaatttaaatcctgtaagtcaaaattgaaagggtgttattaagtgtgcctttattttgcatgaaaataaaaagaattatacgtaaagcattcctgtaa

SEQ ID NO: 108575 - DNA, 1680 bp, Artificial Sequence
  derived and/or modified sequence
atgccggtcttagcccctctgtagggaaagagggtccgccatgttccccggcggcgccgccgcttggctctggtagccgccgcccccgcccccaaccccgcccggcccagagcctagccgagccccgggcccagcatggccgccccggagccggcccgggctgcaccgcccccacccccgcccccgccgccccctcccggggctgaccgcgtcgtcaaagctgtccctttccccccaacacatcgcttgacatctgaagaagtatttgatttggatgggatacccagggttgatgttctgaagaaccacttggtgaaagaaggtcgagtagatgaagaaattgcgcttagaattatcaatgagggtgctgccatccttcggagagagaaaaccatgatagaagtagaagctccaatcacagtgtgtggtgacatccatggccaattttttgatctgatgaaactttttgaagtaggaggatcacctgctaatacacgatacctttttcttggcgattatgtggacagaggttattttagtatagagcatgttctaggcactgaagacatatcgattaatcctcacaataatattaatgagtgtgtcttatatttatgggttctgaagattctatacccaagcacattatttcttctgagaggcaaccatgaatgcagacaccttactgaatattttacctttaagcaggaatgtaaaattaagtattcggaaagagtctatgaagcttgtatggaagcttttgatagtttgcctcttgctgcacttttaaaccaacagtttctttgtgttcatggtggactttcaccagaaatacacacactggatgatattaggagattagatagattcaaagagccacctgcatttggaccaatgtgtgacttgttatggtccgatccttctgaagattttggaaatgaaaaatcacaggaacattttagtcacaatacagttcgaggatgttcttatttttataactatccagcagtgtgtgaatttttgcaaaacaataatttgttatcgattattagagctcatgaagctcaagatgcaggctatagaatgtacagaaaaagtcaaactacagggttcccttcattaataacaattttttcggcacctaattacttagatgtctacaataataaagctgctgtattaaagtatgaaaataatgtgatgaatattcgacagtttaactgttctccacatccttactggttgcctaattttatggatgtcttcacgtggtctttaccgtttgttggagaaaaagtgacagaaatgttggtaaatgttctgagtatttgctctgatgatgaactaatgactgaaggtgaagaccagtttgatggttcagctgcagcccggaaagaaatcataagaaacaaaattcgagcaattggcaagatggcaagagtcttctctgttctcagggaggagagtgaaagtgtgctgacactcaagggcctgactcccacagggatgttgcctagtggagtgttagctggaggacggcagaccctgcaaagtggtaatgatgttatgcaacttgctgtgcctcagatggactggggcacacctcactcttttgctaacaattcacataatgcatgcagggaattccttctgttttttagttcctgtctcagcagctga

SEQ ID NO: 108576 - DNA, 2118 bp, Artificial Sequence
  derived and/or modified sequence
aaccccgcccggcccagagcctagccgagccccgggcccagcatggccgccccggagccggcccgggctgcaccgcccccacccccgcccccgccgccccctcccggggctgaccgcgtcgtcaaaggctggtctccaatttctggcctcaagtgatcctcctgccccagcctacgaagtagtcgtgattacagacatgcttcactactcccagcattaaattatatttattgtacttcatttaagctgtccctttccccccaacacatcgcttgacatctgaagaagtatttgatttggatgggatacccagggttgatgttctgaagaaccacttggtgaaagaaggtcgagtagatgaagaaattgcgcttagaattatcaatgagggtgctgccatccttcggagagagaaaaccatgatagaagtagaagctccaatcacagtgtgtggtgacatccatggccaattttttgatctgatgaaactttttgaagtaggaggatcacctgctaatacacgatacctttttcttggcgattatgtggacagaggttattttagtatagagtgtgtcttatatttatgggttctgaagattctatacccaagcacattatttcttctgagaggcaaccatgaatgcagacaccttactgaatattttacctttaagcaggaatgtaaaattaagtattcggaaagagtctatgaagcttgtatggaagcttttgatagtttgcctcttgctgcacttttaaaccaacagtttctttgtgttcatggtggactttcaccagaaatacacacactggatgatattaggagattagatagattcaaagagccacctgcatttggaccaatgtgtgacttgttatggtccgatccttctgaagattttggaaatgaaaaatcacaggaacattttagtcacaatacagttcgaggatgttcttatttttataactatccagcagtgtgtgaatttttgcaaaacaataatttgttatcgattattagagctcatgaagctcaagatgcaggctatagaatgtacagaaaaagtcaaactacagggttcccttcattaataacaattttttcggcacctaattacttagatgtctacaataataaagctgctgtattaaagtatgaaaataatgtgatgaatattcgacagtttaactgttctccacatccttactggttgcctaattttatggatgtcttcacgtggtctttaccgtttgttggagaaaaagtgacagaaatgttggtaaatgttctgagtatttgctctgatgatgaactaatgactgaaggtgaagaccagtttgatgtaggttcagctgcagcccggaaagaaatcataagaaacaaaattcgagcaattggcaagatggcaagagtcttctctgttctcagggaggagagtgaaagtgtgctgacactcaagggcctgactcccacagggatgttgcctagtggagtgttagctggaggacggcagaccctgcaaagtggtaatgatgttatgcaacttgctgtgcctcagatggactggggcacacctcactcttttgctaacaattcacataatgcatgcagggaattccttctgttttttagttcctgtctcagcagctgacctagacagggtactgtattagctagtgtctcattaatacctgatcagggcagaaaactgatagaatgggtattcctttcaattgaaaataatggtcagttcctcagcttttcatgaaatgatatgggagcagctcatatcataatgtctgaaatatttatttattcatctgtctaattcacccttttcttttaaaagccccagtttcagaatgtgaatcagggatattcctgttactaaaatggaaatgtaattccaagtttcttttttaattttttaaatttatgtcattgtattggactatgcttatatttaaaactacttaatttagagttaactacctgcttaggccccagaacattacttatgcccttcagttaccaaaagatttgtgcaaggttttgtaccctggtaaatgatgccaaagtttgttttctgtggtgtttgtcaaatgttctatgta

SEQ ID NO: 108577 - protein, 411 aa, Artificial Sequence [sequence omitted]

SEQ ID NO: 108578 - DNA, 1236 bp, Artificial Sequence
  derived and/or modified sequence
atgatcgaggtggaggcccccatcaccgtgtgcggcgacatccacggccagttcttcgacctgatgaagctgttcgaggtgggcggcagccccgccaacaccagatacctgttcctgggcgactacgtggacagaggctacttcagcatcgagtgcgtgctgtacctgtgggtgctgaagatcctgtaccccagcaccctgttcctgctgagaggcaaccacgagtgcagacacctgaccgagtacttcaccttcaagcaggagtgcaagatcaagtacagcgagagagtgtacgaggcctgcatggaggccttcgacagcctgcccctggccgccctgctgaaccagcagttcctgtgcgtgcacggcggcctgagccccgagatccacaccctggacgacatcagaagactggacagattcaaggagccccccgccttcggccccatgtgcgacctgctgtggagcgaccccagcgaggacttcggcaacgagaagagccaggagcacttcagccacaacaccgtgagaggctgcagctacttctacaactaccccgccgtgtgcgagttcctgcagaacaacaacctgctgagcatcatcagagcccacgaggcccaggacgccggctacagaatgtacagaaagagccagaccaccggcttccccagcctgatcaccatcttcagcgcccccaactacctggacgtgtacaacaacaaggccgccgtgctgaagtacgagaacaacgtgatgaacatcagacagttcaactgcagcccccacccctactggctgcccaacttcatggacgtgttcacctggagcctgcccttcgtgggcgagaaggtgaccgagatgctggtgaacgtgctgagcatctgcagcgacgacgagctgatgaccgagggcgaggaccagttcgacgtgggcagcgccgccgccagaaaggagatcatcagaaacaagatcagagccatcggcaagatggccagagtgttcagcgtgctgagagaggagagcgagagcgtgctgaccctgaagggcctgacccccaccggcatgctgcccagcggcgtgctggccggcggcagacagaccctgcagagcggcaacgacgtgatgcagctggccgtgccccagatggactggggcaccccccacagcttcgccaacaacagccacaacgcctgcagagagttcctgctgttcttcagcagctgcctgagcagctag

SEQ ID NO: 108579 - DNA, 1236 bp, Artificial Sequence
  derived and/or modified sequence
atgattgaggtggaggccccgatcacagtttgtggagatatacacgggcaattcttcgacctgatgaagttgttcgaggtagggggttcccctgcaaacacacgttacctttttcttggggattatgtggaccgcggctatttctcgatagagtgtgtcctctacctgtgggtgctgaagattctgtatccgagcaccttattcctcttgaggggtaaccacgaatgcaggcaccttacagaatatttcacatttaaacaggagtgtaagataaaatacagcgagcgagtgtacgaggcctgcatggaggcattcgattcactgcctcttgccgctctcttgaatcagcagttcctgtgtgtgcacgggggattgagccccgaaatccatacccttgatgacatccgcagacttgatcggtttaaagaaccacctgcttttgggcctatgtgcgatctgctgtggtccgacccttctgaggacttcgggaacgagaagtcgcaggagcatttcagccacaacactgtccggggatgttcctacttctacaattaccctgccgtctgtgagttcctccagaataataaccttctgagcatcattcgagctcatgaggcacaggacgccggctaccggatgtatcgcaaatcacagaccacaggttttccctcgttgatcacaatcttcagtgcccctaattacctggatgtgtataacaacaaggccgccgtgttgaagtacgaaaacaatgtcatgaacatcagacaatttaactgcagtccacatccctattggctacctaactttatggacgtttttacttggtcccttcccttcgttggggagaaagtgacagaaatgctggttaacgtgctgagtatctgttccgatgatgagctgatgactgagggagaggatcaattcgatgtcggctcagccgccgcccggaaagagatcatcaggaataagattagagcaatcgggaaaatggcgagagtcttctctgtgctgagggaggagtctgagagtgtgttgacacttaagggcctgactccaaccggcatgttgccttctggagtgctagctggggggaggcagaccctgcagtcaggcaatgacgtgatgcagctggctgtgccccagatggattggggaactccccatagctttgccaacaatagtcataatgcctgcagggaattcctcctcttcttcagttcgtgcctgagctcctag

SEQ ID NO: 108580 - DNA, 1236 bp, Artificial Sequence
  derived and/or modified sequence
atgattgaggtggaggcccccatcaccgtgtgtggggacatccacggccagttctttgacctgatgaagctgtttgaggtgggcggcagccctgccaacacccgctacctgttcctgggggactatgtggaccggggctacttcagcattgaatgtgtgctgtacctgtgggtgctgaagatcctgtaccccagcaccctcttcctgctgcggggcaaccatgaatgtcgccacctgacagagtacttcaccttcaagcaggagtgcaagatcaagtacagcgagcgggtgtatgaggcctgcatggaggcctttgacagcctgcccctggccgccctgctgaaccagcagttcctgtgtgtgcacggcggcctgagccctgagatccacaccctggatgacatccggcggctggaccgcttcaaggagcccccagccttcggccccatgtgtgacctgctgtggagcgaccccagcgaggactttggaaatgagaagagccaggagcacttcagccacaacacagtgcggggctgcagctacttctacaactacccagctgtgtgtgagttcctgcagaacaacaacctgctgagcatcatccgggcccacgaggcccaggatgctggctacaggatgtacaggaagagccagaccaccggcttccccagcctcatcaccatcttcagcgcccccaactacctggatgtgtacaacaacaaggctgctgtgctgaagtatgagaacaacgtgatgaacatccggcagttcaactgcagcccccacccctactggctgcccaacttcatggatgtgttcacctggagcctgccctttgtgggggagaaggtgacagagatgctggtgaatgtgctgagcatctgcagtgatgatgagctgatgacagaaggagaggaccagtttgatgtgggcagcgctgctgccaggaaggagatcatccggaacaagatccgggccatcggcaagatggcccgggtcttctctgtgctgcgggaggagagcgagagcgtgctgaccctgaagggcctgacccccaccggcatgctgcccagcggcgtgctggccggcggccggcagaccctgcagagcggaaatgatgtgatgcagctggccgtgccccagatggactggggcaccccccacagctttgccaacaacagccacaatgcctgccgggagttcctgctcttcttcagcagctgcctgagcagctag

SEQ ID NO: 108581 - DNA, 1236 bp, Artificial Sequence
  derived and/or modified sequence
atgatcgaggtggaggcccccatcaccgtgtgcggcgacatccacgggcagttcttcgacctcatgaagcttttcgaagtgggtggctcacctgccaacacgagatatctgttcttgggggattacgtagacagggggtacttctcgattgaatgtgtgctgtacctctgggttttgaagatcctttacccctcaacactcttcttgctccgggggaaccacgagtgtcgtcaccttaccgagtactttactttcaagcaagagtgcaaaatcaagtatagcgaaagggtatacgaggcatgtatggaggcttttgacagtctgccactggctgctttattgaaccaacaattcttatgcgtccacggtggcctcagcccggagatccacacactggacgatatcagacggttggaccggttcaaggagccacctgcattcggaccaatgtgcgatctcctgtggtctgacccgagcgaggactttggtaacgagaaatcccaggaacacttctcacataacaccgtgcgcggctgtagctacttctataactatcccgccgtttgtgaatttcttcagaataacaacctcctaagtatcatacgagcccatgaggcccaggacgccggctacaggatgtataggaaatcccagacgaccggctttccgtctcttattaccatattcagcgctccaaattatttagacgtttataataataaggccgcagtgcttaaatacgaaaataacgtcatgaatatccgccaatttaattgctcgccgcatccgtattggctgcccaactttatggacgtattcacctggagcctacccttcgtcggcgagaaggtgacagaaatgctggtgaatgtgttgtcaatttgctcggacgacgagctaatgacagagggcgaggaccagtttgatgtaggatcagcagcagcaaggaaagaaatcatccgtaacaaaattcgagcgatagggaaaatggccagggtgttttcagtcttgagggaagagagcgagtctgtcctgactttgaagggactcaccccgacaggcatgcttcccagtggcgtcctggccggcgggagacagactttgcaatccggcaacgacgtcatgcagctggctgtccctcagatggactggggtaccccccatagcttcgcgaacaactcacacaatgcctgccgggagtttttgctgttcttttcaagctgtctcagttcctag

SEQ ID NO: 108582 - DNA, 1236 bp, Artificial Sequence
  derived and/or modified sequence
atgatagaagtcgaagcgcctattacagtgtgtggtgacatacacggccagtttttcgacctgatgaagctgttcgaggtaggcggttcacccgctaataccaggtacttattcttgggggactacgtagaccggggatatttctccatcgagtgcgtgctctatctctgggtgctaaagattctctacccttccaccctgttcctgctccgtggaaaccatgagtgtcgccaccttacagagtatttcacttttaaacaagaatgcaaaattaaatatagcgaaagagtctacgaagcctgtatggaagcctttgacagtctccctctcgccgctctgctcaaccagcagtttttgtgcgtgcacggcggactcagtccagagattcatacattagatgacatccggaggctggatagatttaaagagcctcccgcattcggccctatgtgtgaccttctctggtcagaccccagtgaagattttggcaatgaaaaaagccaggagcatttttcccacaatacagtacgcggatgctcctatttttataattacccggctgtgtgtgagttcctccaaaacaataatttgctctcgattatccgggctcatgaggcccaggatgctggctaccggatgtaccggaagtcccaaaccacaggttttccaagcctgatcactatattttccgccccaaactatctggatgtctacaataataaggccgcagtgttaaagtatgaaaacaacgttatgaacattcgacagttcaactgctccccacatccctactggctgccaaatttcatggatgttttcacctggtctctgccctttgtcggggagaaagtgaccgaaatgctggtcaatgtgctttccatttgtagcgatgacgagctgatgacggagggtgaagaccagttcgatgttggctccgccgctgctagaaaggagatcatcaggaacaagattcgtgcaattggtaaaatggctagagtcttctccgtcctgcgggaggaaagcgagagcgttctcactctgaaaggtctcacacctaccgggatgctgcccagtggcgtgctcgccggaggacgccagaccctgcagtccgggaacgacgtgatgcagctggctgtcccccagatggattggggaacaccgcactcttttgcgaataattcccacaatgcttgccgagagttcttactttttttctcatcctgtctgagctcctag

SEQ ID NO: 108583 - protein, 156 aa, Artificial Sequence
  derived and/or modified sequence
MATQQVDSRRQVAAEQVAAQLLERRRGSHCDDEKQTLLALLILVLYLSTEIWGSSWEVSERIRECNYYQNLAVPQGLEYQTNEPSEEPIKTIRNWLKEKLHVFSEKLEEEVQQLEQLAWDLELWLDALLGEPHQEEHCSTYKSHLHLEHEVSIRDH

SEQ ID NO: 108584 - DNA, 468 bp, Artificial Sequence
  derived and/or modified sequence
atggcaacccagcaagtggacagcagaaggcaggtggcagcagagcaggtggcagcccagctgcttgaacggagaaggggcagccactgtgatgacgagaagcagacgctgttggcattgctgatcttggtgctgtacttgagcacagagatatggggaagcagttgggaggtgtcagaaaggatcagagaatgtaactactaccagaatcttgcagttccccaggggcttgaatatcagaccaacgagccctcagaagaaccgataaagaccatcaggaactggctgaaggagaagttgcatgtcttctcggagaagttagaggaagaggtgcagcagctggagcagctagcgtgggacctggaactgtggctggatgctcttctgggagagccacaccaggaggagcactgctccacatataaaagtcacttgcacctggagcatgaggtcagcatcagagatcat

SEQ ID NO: 108585 - DNA, 471 bp, Artificial Sequence
  derived and/or modified sequence
atggccacccagcaggtggacagcagaagacaggtggccgccgagcaggtggccgcccagctgctggagagaagaagaggcagccactgcgacgacgagaagcagaccctgctggccctgctgatcctggtgctgtacctgagcaccgagatctggggcagcagctgggaggtgagcgagagaatcagagagtgcaactactaccagaacctggccgtgccccagggcctggagtaccagaccaacgagcccagcgaggagcccatcaagaccatcagaaactggctgaaggagaagctgcacgtgttcagcgagaagctggaggaggaggtgcagcagctggagcagctggcctgggacctggagctgtggctggacgccctgctgggcgagccccaccaggaggagcactgcagcacctacaagagccacctgcacctggagcacgaggtgagcatcagagaccactag

SEQ ID NO: 108586 - DNA, 471 bp, Artificial Sequence
  derived and/or modified sequence
atggccacccagcaagtggactcacggcggcaagtcgccgcagagcaggtggctgcccagctgctcgaacgtcgaagaggctctcattgcgatgacgagaaacagaccctcttggcactgctgattttggttctctatctgagcacagaaatttgggggagcagctgggaggtgtctgagaggattagagaatgcaattattatcagaatctggctgttccccagggtctggagtatcaaaccaacgagccatctgaggagccaattaaaactattcgcaattggcttaaggagaagctccatgtattttccgagaagcttgaggaggaagtccagcaactggaacagctggcttgggacttggagctctggctggatgctctattaggagagccacaccaggaggagcactgctcaacctataagtctcacctgcatctggagcacgaggtcagcataagggatcattag

SEQ ID NO: 108587 - DNA, 471 bp, Artificial Sequence
  derived and/or modified sequence
atggccacccagcaggtggacagccggcggcaggtggccgctgagcaggtggccgcccagctgctggagaggagaagaggcagccactgtgatgatgagaagcagaccctgctggccctgctgatcctggtgctgtacctgagcacagagatctggggcagctcctgggaggtgtctgagcgcatccgggagtgcaactactaccagaacctggccgtgccccagggcctggagtaccagaccaatgagcccagcgaggagcccatcaagaccatccggaactggctgaaggagaagctgcacgtgttcagcgagaagctggaggaggaggtgcagcagctggagcagctggcctgggacctggagctgtggctggatgccctgctgggggagccccaccaggaggagcactgcagcacctacaagagccacctgcacctggagcacgaggtgtccatccgggaccactag

SEQ ID NO: 108588 - DNA, 471 bp, Artificial Sequence
  derived and/or modified sequence
atggccacccagcaggtggacagccggcggcaggtggccgccgagcaggtggcagcccaactgcttgagagacgccggggatcccattgtgacgatgagaaacagacccttctggcactcctcattctcgtcctctatctttctaccgagatctggggcagttcatgggaggtctctgagcgaataagggaatgtaactattatcaaaatttggcagttccacagggcctagaataccagaccaacgaaccttccgaagagccaataaaaacaatccgtaattggctgaaggagaaactgcacgtgttctcagagaaactggaggaggaagtgcagcaactggaacagctagcttgggatctggagctgtggttagatgcccttctcggggagccccatcaggaggaacattgcagcacctataaaagtcacctacatctagaacacgaggtgtccatacgcgatcactag

SEQ ID NO: 108589 - DNA, 471 bp, Artificial Sequence
  derived and/or modified sequence
atggctacacagcaggtcgattcacggcgacaggtggccgcagagcaggtcgccgcacagctgctggaaaggagacgcggttcacactgtgatgacgagaagcaaacgctgctggccctcctgatccttgtgctctatttgagcaccgaaatctggggcagttcttgggaagtgagcgagcggatcagagaatgcaactactaccaaaacctggcagtgccccaggggttggagtaccagaccaacgaaccgagcgaagaacctatcaaaactataaggaactggctgaaagagaagcttcacgtgttctctgagaagttagaggaggaggtgcagcaactggagcagcttgcctgggatctggaactctggttagatgctctcttaggcgagccacaccaagaggaacactgtagcacctacaagtcccatctgcatcttgagcatgaagtgagcatccgagaccactag

SEQ ID NO: 108590 - protein, 2134 aa, Artificial Sequence
  derived and/or modified sequence
MESGERLPSSAASSTTPTSSSTPSVASVVSKGGLSTGVASLSSTINPCGHLFRTAGDQPFNLSTVSSAFPMVSHPVFGLHSASSGHSEFGGLGTLGTPTALAAHPQLASFPGAEWWRTTDAHTRTGATFFPPLLGIPPLFAPPAQNHDSSSFHSRTSGKSNRNGPEKGVNGSINGSNTSSVIGINTSVLSTTASSSMGQTKSTSSGGGNRKCNQEQSKNQPLDARVDKIKDKKPRKKAMESSSNSDSDSGTSSDTSSEGISSSDSDDLEEDEEEEDQSIEESEDDDSDSESEAQHKSNNQVLLHGISDPKADGQKATEKAQEKRIHQPLPLASESQTHSFQSQQKQPQVLSQQLPFIFQSSQAKEESVNKHTSVIQSTGLVSNVKPLSLVNQAKKETYMKLIVPSPDVLKAGNKNTSEESSLLTSELRSKREQYKQAFPSQLKKQESSKSLKKVIAALSNPKATSSSPAHPKQTLENNHPNPFLTNALLGNHQPNGVIQSVIQEAPLALTTKTKMQSKINENIAAASSTPFSSPVNLSTSGRRTPGNQTPVMPSASPILHSQGKEKAVSNNVNPVKTQHHSHPAKSLVEQFRGTDSDIPSSKDSEDSNEDEEEDDEEEDEEDDEDDESDDSQSESDSNSESDTEGSEEEDDDDKDQDESDSDTEGEKTSMKLNKTTSSVKSPSMSLTGHSTPRNLHIAKAPGSAPAALCSESQSPAFLGTSSSTLTSSPHSGTSKRRRVTDERELRIPLEYGWQRETRIRNFGGRLQGEVAYYAPCGKKLRQYPEVIKGMQWCLLKEEDVIPRIRAMEGRRGRPPNPDRQRAREESRMRRRKGRPPNVGNAEFLDNADAKLLRKLQAQEIARQAAQIKLLRKLQKQEQARVAKEAKKQQAIMAAEEKRKQKEQIKIMKQQEKIKRIQQIRMEKELRAQQILEAKKKKKEEAANAKLLEAEKRIKEKEMRRQQAVLLKHQERERRRQHMMLMKAMEARKKAEEKERLKQEKRDEKRLNKERKLEQRRLELEMAKELKKPNEDMCLADQKPLPELPRIPGLVLSGSTFSDCLMVVQFLRNFGKVLGFDVNIDVPNLSVLQEGLLNIGDSMGEVQDLLVRLLSAAVCDPGLITGYKAKTALGEHLLNVGVNRDNVSEILQIFMEAHCGQTELTESLKTKAFQAHTPAQKASVLAFLINELACSKSVVSEIDKNIDYMSNLRRDKWVVEGKLRKLRIIHAKKTGKRDTSGGIDLGEEQHPLGTPTPGRKRRRKGGDSDYDDDDDDDSDDQGDEDDEDEEDKEDKKGKKTDICEDEDEGDQAASVEELEKQIEKLSKQQSQYRRKLFDASHSLRSVMFGQDRYRRRYWILPQCGGIFVEGMESGEGLEEIAKEREKLKKAESVQIKEEMFETSGDSLNCSNTDHCEQKEDLKEKDNTNLFLQKPGSFSKLSKLLEVAKMPPESEVMTPKPNAGANGCTLSYQNSGKHSLGSVQSTATQSNVEKADSNNLFNTGSSGPGKFYSPLPNDQLLKTLTEKNRQWFSLLPRTPCDDTSLTHADMSTASLVTPQSQPPSKSPSPTPAPLGSSAQNPVGLNPFALSPLQVKGGVSMMGLQFCGWPTGVVTSNIPFTSSVPSLGSGLGLSEGNGNSFLTSNVASSKSESPVPQNEKATSAQPAAVEVAKPVDFPSPKPIPEEMQFGWWRIIDPEDLKALLKVLHLRGIREKALQKQIQKHLDYITQACLKNKDVAIIELNENEENQVTRDIVENWSVEEQAMEMDLSVLQQVEDLERRVASASLQVKGWMCPEPASEREDLVYFEHKSFTKLCKEHDGEFTGEDESSAHALERKSDNPLDIAVTRLADLERNIERRIEEDIAPGLRVWRRALSEARSAAQVALCIQQLQKSIAWEKSIMKVYCQICRKGDNEELLLLCDGCDKGCHTYCHRPKITTIPDGDWFCPACIAKASGQTLKIKKLHVKGKKTNESKKGKKVTLTGDTEDEDSASTSSSLKRGNKDLKKRKMEENTSINLSKQESFTSVKKPKRDDSKDLALCSMILTEMETHEDAWPFLLPVNLKLVPGYKKVIKKPMDFSTIREKLSSGQYPNLETFALDVRLVFDNCETFNEDDSDIGRAGHNMRKYFEKKWTDTFKVS

SEQ ID NO: 108591 - protein, 2132 aa, Artificial Sequence
  derived and/or modified sequence
MESGERLPSSAASSTTPTSSSTPSVASVVSKGGLSTGVASLSSTINPCGHLFRTAGDQPFNLSTVSSAFPMVSHPVFGLHSASSGHSEFGGLGTLGTPTALAAHPQLASFPEWWRTTDAHTRTGATFFPPLLGIPPLFAPPAQNHDSSSFHSRTSGKSNRNGPEKGVNGSINGSNTSSVIGINTSVLSTTASSSMGQTKSTSSGGGNRKCNQEQSKNQPLDARVDKIKDKKPRKKAMESSSNSDSDSGTSSDTSSEGISSSDSDDLEEDEEEEDQSIEESEDDDSDSESEAQHKSNNQVLLHGISDPKADGQKATEKAQEKRIHQPLPLASESQTHSFQSQQKQPQVLSQQLPFIFQSSQAKEESVNKHTSVIQSTGLVSNVKPLSLVNQAKKETYMKLIVPSPDVLKAGNKNTSEESSLLTSELRSKREQYKQAFPSQLKKQESSKSLKKVIAALSNPKATSSSPAHPKQTLENNHPNPFLTNALLGNHQPNGVIQSVIQEAPLALTTKTKMQSKINENIAAASSTPFSSPVNLSTSGRRTPGNQTPVMPSASPILHSQGKEKAVSNNVNPVKTQHHSHPAKSLVEQFRGTDSDIPSSKDSEDSNEDEEEDDEEEDEEDDEDDESDDSQSESDSNSESDTEGSEEEDDDDKDQDESDSDTEGEKTSMKLNKTTSSVKSPSMSLTGHSTPRNLHIAKAPGSAPAALCSESQSPAFLGTSSSTLTSSPHSGTSKRRRVTDERELRIPLEYGWQRETRIRNFGGRLQGEVAYYAPCGKKLRQYPEVIKGMQWCLLKEEDVIPRIRAMEGRRGRPPNPDRQRAREESRMRRRKGRPPNVGNAEFLDNADAKLLRKLQAQEIARQAAQIKLLRKLQKQEQARVAKEAKKQQAIMAAEEKRKQKEQIKIMKQQEKIKRIQQIRMEKELRAQQILEAKKKKKEEAANAKLLEAEKRIKEKEMRRQQAVLLKHQERERRRQHMMLMKAMEARKKAEEKERLKQEKRDEKRLNKERKLEQRRLELEMAKELKKPNEDMCLADQKPLPELPRIPGLVLSGSTFSDCLMVVQFLRNFGKVLGFDVNIDVPNLSVLQEGLLNIGDSMGEVQDLLVRLLSAAVCDPGLITGYKAKTALGEHLLNVGVNRDNVSEILQIFMEAHCGQTELTESLKTKAFQAHTPAQKASVLAFLINELACSKSVVSEIDKNIDYMSNLRRDKWVVEGKLRKLRIIHAKKTGKRDTSGGIDLGEEQHPLGTPTPGRKRRRKGGDSDYDDDDDDDSDDQGDEDDEDEEDKEDKKGKKTDICEDEDEGDQAASVEELEKQIEKLSKQQSQYRRKLFDASHSLRSVMFGQDRYRRRYWILPQCGGIFVEGMESGEGLEEIAKEREKLKKAESVQIKEEMFETSGDSLNCSNTDHCEQKEDLKEKDNTNLFLQKPGSFSKLSKLLEVAKMPPESEVMTPKPNAGANGCTLSYQNSGKHSLGSVQSTATQSNVEKADSNNLFNTGSSGPGKFYSPLPNDQLLKTLTEKNRQWFSLLPRTPCDDTSLTHADMSTASLVTPQSQPPSKSPSPTPAPLGSSAQNPVGLNPFALSPLQVKGGVSMMGLQFCGWPTGVVTSNIPFTSSVPSLGSGLGLSEGNGNSFLTSNVASSKSESPVPQNEKATSAQPAAVEVAKPVDFPSPKPIPEEMQFGWWRIIDPEDLKALLKVLHLRGIREKALQKQIQKHLDYITQACLKNKDVAIIELNENEENQVTRDIVENWSVEEQAMEMDLSVLQQVEDLERRVASASLQVKGWMCPEPASEREDLVYFEHKSFTKLCKEHDGEFTGEDESSAHALERKSDNPLDIAVTRLADLERNIERRIEEDIAPGLRVWRRALSEARSAAQVALCIQQLQKSIAWEKSIMKVYCQICRKGDNEELLLLCDGCDKGCHTYCHRPKITTIPDGDWFCPACIAKASGQTLKIKKLHVKGKKTNESKKGKKVTLTGDTEDEDSASTSSSLKRGNKDLKKRKMEENTSINLSKQESFTSVKKPKRDDSKDLALCSMILTEMETHEDAWPFLLPVNLKLVPGYKKVIKKPMDFSTIREKLSSGQYPNLETFALDVRLVFDNCETFNEDDSDIGRAGHNMRKYFEKKWTDTFKVS

SEQ ID NO: 108592 - DNA, 6405 bp, Artificial Sequence
  derived and/or modified sequence
atggagtctggtgagcggctgccgtcctctgctgcaagttcaacaactccaacgtcttcaagcaccccttccgtcgcttctgtggttagcaaaggagggctgagtacaggggtggctagcttgagctctacaatcaatccttgtggccacctgtttagaaccgccggcgatcagccttttaatctgagcaccgtgtctagcgctttcccaatggtgagccaccccgtgtttggtctgcattcagcaagctccgggcactccgagttcggcgggttagggaccctcggtactcctactgcccttgccgcacatcctcaactggcctcatttcctggcgccgaatggtggcggactactgatgcacatactcgcacaggggcgacatttttcccccctctgctggggatccccccgctgtttgccccacctgcgcaaaatcatgatagttcaagctttcactctaggacatctggcaagtccaacaggaatgggcctgaaaagggcgtgaacggaagcataaacggttctaatactagtagtgtcattggaattaatactagcgtgctgagtaccacagccagcagcagtatgggacagactaagagcacaagttccggaggagggaacagaaagtgtaaccaggagcagagcaagaaccaacccttggacgcaagagttgataaaataaaagataaaaagccacgtaagaaggctatggaatcaagttccaatagcgactctgatagcggaacctcttcggacacatccagtgaagggatctctagtagtgatagcgacgatttggaggaggacgaagaggaggaagatcagtctatcgaggagagcgaggatgacgacagtgacagtgagtctgaagcacagcataagagtaataatcaggtgctgctacatggaattagcgatcccaaggccgacggacagaaggccacagagaaggcgcaggagaaacgaattcatcagcccctacctttggcaagcgagtcccagacccatagcttccagagtcaacagaaacagccccaagtcctgagccagcagttgccgttcatattccagtcaagtcaagcaaaagaggaatccgttaacaagcacacttcagtaattcagtctacaggtttagtgagtaatgttaaacccctgagcctggtgaatcaggcaaaaaaagagacctatatgaagctaatcgtacccagccccgacgtgctgaaggccggaaacaaaaacacctctgaagagtcatccctgcttacaagcgagctgaggagtaaacgggagcagtacaagcaggcctttcccagccaactgaagaaacaggagagttccaagtccctgaagaaggtcatagccgcactgtccaatcccaaagccacatcatctagtccggcccaccctaagcagaccttagagaacaatcaccctaaccctttccttacaaatgcactgctgggaaatcatcagcccaacggcgtcatccagtctgtgattcaggaagctcccctggcgctaaccactaaaacaaagatgcagagcaagataaacgagaatattgccgctgctagcagcacacccttttctagtcccgtgaatctgagcacgagcgggagaagaacaccgggaaatcaaacaccagtgatgcctagcgcgtctcccatcctgcactcccaaggaaaagagaaggccgtttccaacaacgtcaatcccgtgaaaacccagcatcatagtcatcccgcaaagtccctggttgagcagtttaggggaacagactctgacattccttcttccaaggacagtgaagacagcaacgaggacgaggaggaggacgacgaggaagaagatgaggaggacgacgaagacgacgaaagtgacgactcccagtccgagtctgattccaatagcgagtccgacaccgaggggagtgaagaagaagacgacgacgataaggaccaggacgaatctgactccgacaccgagggtgaaaagacgtcaatgaagctcaacaagaccaccagttctgtcaaatcgccttccatgagtctcactgggcattctacaccaaggaatttgcacatcgccaaggcacccggctccgcccccgccgccctctgttccgagagccagtcccctgcttttctgggcacaagttcaagtacccttacctcaagcccccactctggcacttccaaacgccgtagggtgaccgatgaaagggaactacgcataccacttgagtacggatggcagagggaaactaggatccgaaatttcggcgggaggctgcagggcgaagttgcctattacgccccctgcggcaagaaacttcgccaatatccagaggtgattaaaggaatgcaatggtgcttactgaaagaagaggatgtcatcccccgcataagggctatggagggccgaagggggaggccacctaaccctgaccggcagcgcgcacgcgaggagagcaggatgaggcgacgcaaaggcagaccccctaacgtggggaatgcagagttcctggataatgcggatgcaaagctgttaagaaagctgcaggcacaggagattgccaggcaggctgctcaaataaagctactgcggaagctgcagaaacaggaacaggcccgagtcgcaaaagaagcgaaaaaacagcaagctataatggctgcggaagagaagcgaaagcagaaggaacaaatcaagattatgaagcagcaggagaagatcaaacggattcaacagatcagaatggaaaaggagttgcgcgctcagcaaatcctggaggcaaagaagaagaaaaaagaggaggccgctaatgccaagcttctcgaggccgagaagcgtataaaggaaaaggagatgaggagacagcaggcagtcctgctcaaacaccaggagcgggaacgtaggaggcagcacatgatgttgatgaaggccatggaggccagaaagaaagccgaggagaaggagaggctcaagcaggagaagagagacgagaaacgcctaaacaaggagcggaagctcgaacaaaggcggcttgagctcgagatggctaaggagctgaagaaaccaaacgaggatatgtgcctggccgaccaaaagcccctccccgaacttccaaggatcccggggcttgttttgtctgggagcacattcagtgattgtctcatggttgtacaatttttgcgcaactttggcaaggtacttggcttcgatgtcaatattgacgtgcccaacctgagcgtcctacaggagggactactgaacatcggcgattccatgggtgaggtccaggacctcctggttagactgttaagcgcagccgtgtgcgatccaggcctgattacaggctataaagctaaaactgcactcggagagcacctgctgaacgttggagttaatcgtgataacgtgagcgaaattttgcaaatcttcatggaggcacactgcgggcagactgagctaaccgaaagtctgaagacaaaagcttttcaggcccatacccctgcccagaaggctagcgtgcttgcttttttaatcaatgagttagcctgtagtaaatccgtggtgagcgaaatagacaaaaacattgattatatgtctaatttgcgacgggacaagtgggtcgtcgaaggaaaattacggaaactgcgaataatacatgctaagaaaaccgggaaaagagacaccagcggtggaattgatctgggagaggagcagcaccccctgggcactccgactccaggacggaagagacgacggaaaggtggtgacagtgattacgacgatgacgatgacgatgactcagatgaccaaggagacgaagatgacgaggacgaggaagataaggaggacaagaagggcaagaagaccgatatttgcgaagatgaggatgaaggcgatcaagctgcatccgtagaggaactagaaaaacagatcgagaaactgtccaagcaacaaagtcaatacaggcggaaactgttcgacgcctctcacagcttgaggtcggtgatgttcggccaagatcgctaccgccgtaggtattggatcctaccccagtgtggaggcatcttcgtagagggcatggaatccggcgaaggactcgaggaaattgccaaggaaagagagaagctgaaaaaagctgagtccgtccaaatcaaggaggaaatgtttgaaacatccggagattctctgaactgctctaatactgaccactgcgagcaaaaagaggatcttaaagagaaagataacactaacctgtttcttcagaaacccggcagcttcagtaagttgtctaagctcttagaggtggccaaaatgccacctgagagtgaagtgatgactcccaagcctaatgctggagccaacggttgcaccctctcgtatcagaacagcggcaagcattcattggggagcgtacaaagcacggccacccaatccaacgtggaaaaggctgacagcaacaacttgttcaataccggatcaagcggcccaggaaagttttacagcccgctgcctaatgatcagctcttaaaaactttgactgaaaaaaaccgccagtggttctctctgctgccgcggaccccgtgcgatgatacaagcttaacacatgccgacatgagcactgcttccctggtgactccacagagccaaccaccatccaaatcccctagtcccacgcccgccccgctcggatcttccgcccagaacccagtcggcctgaacccgttcgctctgtcacccctgcaagtcaaggggggagtgtcgatgatgggcttacagttctgtggctggcccacaggagtcgtgaccagcaacatcccttttaccagtagtgtacctagtctgggatccgggctggggctcagcgagggcaacggcaactccttcctgacctcaaatgtcgccagtagcaaatctgaatcaccggtgcctcagaacgaaaaggctacatccgcgcagcctgccgcggttgaagtggccaagcctgtcgatttcccttcaccaaagcccatccccgaagagatgcagttcggatggtggcggattatcgatccggaagacctcaaggcattgttgaaagttcttcacctgcgagggatcagagagaaagccctgcaaaaacaaattcagaagcatctcgactacatcacccaagcctgcctgaaaaacaaagatgtcgccataatcgagctcaatgagaatgaggagaaccaggtcactagagatattgtggaaaactggtccgtcgaggagcaggcaatggaaatggatctaagcgtgctccagcaggtggaggatcttgaaagacgggtggcctctgcatctctgcaggtgaaaggatggatgtgccctgagccagcgtccgagcgcgaagacctagtttacttcgaacacaaatccttcaccaagttatgcaaggagcatgacggcgaattcaccggcgaggatgagagctcagctcacgcactggaacggaagagcgacaatccactcgacatcgccgtgacaagactggccgatctcgaaaggaatatagaacgtcggatcgaggaggacatcgcccctggtctgcgtgtttggaggagggccctgagcgaggcccggtctgccgctcaggtcgctctgtgtattcagcagctgcaaaaatccattgcatgggaaaaaagtataatgaaagtgtattgccagatttgtagaaagggtgataatgaagaactgctccttctgtgtgacgggtgcgataaaggctgccatacctactgtcatagaccaaaaattacgacgataccggacggagattggttctgccctgcttgtatagccaaagcctccggacaaacattgaagatcaagaagttgcacgtgaaaggtaagaagacaaacgaaagtaaaaagggaaaaaaagtcactctaactggagacacagaagacgaggattcagcgtccacttcctcctccctcaaacgcggcaataaggatttaaaaaagcgaaagatggaagagaatacctcaattaacctttcaaagcaagagtcatttacttctgttaagaagcctaagagagatgacagcaaagatttggcgctttgttcgatgattcttacagaaatggagacccacgaagatgcttggccctttctgttgccagttaatctgaaactcgtcccaggatataagaaagttatcaaaaagcccatggactttagcaccattagagaaaagctgtcaagcgggcagtacccaaacctggaaactttcgcgctcgacgttagattggtgttcgacaactgtgaaacttttaacgaggatgatagcgacataggccgggccggccacaatatgaggaaatatttcgagaagaagtggaccgatacatttaaggtctcgtag

SEQ ID NO: 108593 - DNA, 6399 bp, Artificial Sequence
  derived and/or modified sequence
atggaatcaggcgaacgtttgccttcctccgccgcgtccagtaccactcccactagcagttctactccatctgtcgctagcgtggtttcgaagggtggtctctccacaggggtggcgagtctgtctagcaccatcaacccatgcggtcatctttttcgaacagcgggggaccagccgttcaatcttagcacagtcagtagtgcatttcccatggtgtctcacccagtgttcgggctgcacagcgcctcctcaggtcactctgaattcggcggcttgggcacactcggaacccccacagccctagccgctcatcctcagttggctagctttccagaatggtggcggacgacggacgctcatacgcgcactggagctacgtttttcccacctctactcggcatcccccccctttttgccccacccgcacagaaccatgactcctcttccttccacagccgcacaagcggtaagagtaaccgcaacggtcccgagaaaggtgtgaacggctccatcaacggctccaacacctcctcagtcatcggcatcaacacctccgtgctctcaaccactgcaagtagtagtatgggtcagacaaagtctacctcttctggcggaggcaaccgtaagtgtaatcaggaacagagtaaaaaccaaccactggacgcacgggtcgacaagattaaagacaagaaacccagaaagaaagctatggagtcaagttccaacagtgattcagactcaggcacctctagcgatactagtagcgaggggatcagctcctctgattcggatgatcttgaagaggatgaggaggaggaggaccaaagtattgaagagtctgaggacgacgacagtgactctgaaagtgaagcacaacataaatctaacaaccaggtgctgctgcatggtataagtgatccaaaggccgacggacaaaaggcgacagaaaaggcccaagaaaagagaatccaccagccattacccctcgctagcgagagccaaacacatagtttccagagccagcaaaaacagccgcaggtgctcagccagcaattgccatttattttccagtcttcccaggctaaggaggagtccgtcaacaagcacaccagcgtgatccagtctacagggctggtgagcaacgtaaaacccctttccttggtaaaccaggctaagaaagagacatatatgaagctgatcgtcccctcaccagacgtcttaaaggctgggaacaagaacactagcgaggagtcgtcacttttgacctctgagctcaggagtaaaagagagcagtacaagcaggcgtttccatctcagctaaagaagcaggagagctcaaagtccctgaaaaaggtgattgcagcccttagcaatcccaaagctaccagcagctcgcccgcacatccaaagcagaccctagagaacaaccatccaaacccttttctcactaatgcccttttaggcaaccaccagcctaatggcgtgattcagtccgtaatccaggaggcacctctggcccttacaaccaaaaccaaaatgcagtccaagatcaacgagaatatcgccgctgcctcgtctacgcccttcagctcaccagtaaatttgagcacctcaggacgccgaacccccggcaatcagacacccgttatgccttctgcaagtccgatcctgcacagccaaggcaaggagaaggccgtgtccaataacgtcaatcccgtaaagacccagcatcacagtcatccagctaagagtcttgtggaacagttccgaggcaccgacagcgacatcccatcaagtaaggactccgaggacagtaacgaagacgaggaagaggacgatgaggaggaggatgaagaggatgacgaggatgacgagagcgatgatagtcagagcgaatccgactctaattccgagagcgacactgaggggtccgaagaagaggatgacgatgacaaggatcaggatgagagtgattccgacactgagggagagaagacaagcatgaaactgaataagaccacatccagtgttaagtccccgtcaatgtcgttaactggccattctacccccaggaacctgcatattgcaaaagcccccggcagtgcccccgccgccttatgcagcgagagccagtctcctgccttccttggcacctccagttctacactgacctcgtcgccccactcagggactagcaaacgacggagagtcactgatgagagggagttgagaatacctctcgagtatggttggcagcgtgagacccgcatacgaaactttggtggccgcttgcagggggaggtagcctattacgcaccttgcggcaagaagctgcgccagtatcccgaagtcatcaagggaatgcagtggtgcctgttaaaagaggaagatgtcataccaaggattcgggccatggagggacgccgcgggcgcccacccaatccggatcgccaaagggcacgtgaagagtcccgcatgaggcgtcggaaggggcgtccaccaaatgtgggaaatgcagagtttctcgacaatgccgatgctaaactgctgcggaagctccaagcccaggagattgccaggcaggccgcgcaaatcaagctgctccgcaaactacaaaaacaggaacaggcacgcgttgcaaaagaggcgaaaaagcaacaagccataatggcagccgaggagaagcggaagcagaaagaacagattaaaatcatgaagcaacaagagaaaattaaacgtatacagcagatcagaatggaaaaggagctaagagcccagcaaattctagaagccaagaaaaaaaaaaaggaggaggccgctaacgccaagctgcttgaagctgaaaaaagaattaaagaaaaggagatgcgaagacagcaggccgtgttgcttaaacatcaggagcgtgagcggcgtcgccagcacatgatgctgatgaaggcaatggaggcgaggaagaaggcagaagaaaaagagcgactgaagcaggaaaaaagagacgagaagagactgaacaaggagcggaaattagagcagaggcgtctggaactggaaatggcaaaggagctgaagaagcctaacgaggacatgtgtctcgcggatcaaaaacctctccctgaattgcctagaatccctggcctcgtcttgagtgggtcaacattttccgactgtcttatggtggtacaattcctgcgtaatttcgggaaagtacttggcttcgacgtgaacattgacgttccaaacctttcagtcttacaggagggcttgttgaacatcggggatagtatgggagaggttcaggacctgctggtgcggttgctgagcgctgctgtatgtgatccaggactaattacaggctataaagccaagacagccctgggcgagcaccttcttaatgtgggggtgaatcgggacaatgtgagcgaaatcctgcagatatttatggaagcccattgcgggcaaactgaactgactgagtctcttaagaccaaggcgttccaggcccacacaccggcccaaaaggcatccgttctggctttcctgatcaacgaactggcttgttccaaatcggtggtgtcagagatcgacaagaacatcgattacatgtcaaatctgcgaagggataaatgggtggtggagggcaagctcaggaaactgcggattattcacgcaaagaaaaccgggaagagagacacatcgggcggcatcgacctgggcgaagagcagcacccactgggcacgccgactcctggccggaaaaggagaaggaagggtggtgattccgattatgatgacgatgatgacgatgattccgatgatcagggtgatgaagatgatgaagacgaggaggacaaggaggacaaaaaaggaaagaaaaccgatatctgtgaggacgaggatgagggcgaccaggcggctagcgtagaggaactggagaaacaaatcgagaagctgagcaagcagcagtcccagtaccgcagaaagctattcgatgctagccacagtctgcggtctgtgatgttcggacaggaccgctatcgtcgtcggtactggatcttgccgcaatgtggagggatcttcgtagaaggcatggagagcggggagggcttggaggagatcgctaaagagagggagaaattaaaaaaggccgagagcgtgcaaataaaggaagaaatgttcgagactagcggcgattcactcaattgtagcaataccgatcactgcgagcagaaagaagacttgaaagagaaggacaatactaacctctttcttcagaagcctggcagttttagcaaactgtcaaagcttctcgaggtggcaaagatgccacccgagagtgaggtcatgacccctaaaccgaacgctggcgccaacggatgtacactatcttaccagaacagcggcaaacattccctggggtcggtccagagcacagccacacaatctaatgtggaaaaagctgactctaataatctgttcaacaccggcagctccggccccggcaagttttactctcctctgcccaatgaccagctgcttaagacattgaccgagaagaaccgacagtggttctccctgttgccaagaaccccatgcgatgatacgtcactcacgcatgccgatatgtctaccgcgagtctagttaccccccagtcacagcccccatccaagagcccttcacctacaccggctcccctgggatcatctgctcagaacccagtcgggctgaatccgttcgccctgtctcccctccaggtgaagggcggcgttagcatgatggggctacagttctgcggctggcctacgggtgtggttacatcaaacatacctttcaccagctctgtgccatcactgggctctggactgggactgagcgaaggaaacggcaacagctttctgacttcaaatgtggcctcttcaaagtcggaatctcccgtgccacaaaatgagaaggccacttccgcacagccagctgcagtcgaggttgctaaacctgtcgactttccctctcctaagcccattccagaagagatgcagttcgggtggtggaggattattgatcctgaagatctgaaggcgctcctgaaagttttacacctgaggggcattcgagagaaagcgctgcagaagcaaattcagaagcacctggactacattactcaggcatgcctgaagaataaagacgtcgcgatcatagagcttaatgaaaacgaggaaaatcaggtgacccgcgacatcgtcgagaactggagtgtggaggagcaggccatggagatggatctgtctgtcctccagcaagtggaggacctggagaggcgcgttgcctctgccagtcttcaggttaaaggttggatgtgccctgagccagctagtgagcgtgaagacctagtgtatttcgagcataaatccttcaccaaattgtgcaaagagcatgatggcgagttcacgggagaggatgagtcctcagctcacgctctggagcgcaagagcgacaaccccttggacatcgccgtaacccgcctggcggatctagaacggaatatcgagagaaggattgaggaagatatcgctcccggcttgagggtttggcgaagggccctgtctgaggcaagatccgccgcccaagtggccctgtgcatacagcagctccaaaagagtatcgcatgggagaagtccatcatgaaggtgtactgtcagatctgccgaaaaggggataatgaggagctccttctgttgtgcgacgggtgcgacaagggttgccacacttactgtcatagacctaaaatcaccaccatcccagatggggattggttctgtcccgcttgcatcgccaaggctagtggccagaccttgaaaatcaaaaaactgcacgttaagggtaagaaaaccaacgagtcaaagaagggcaagaaggtgacgctgaccggagataccgaagatgaggattctgcttcaacctcatcctcactgaaacgggggaacaaggatctgaaaaagaggaagatggaagagaatactagtatcaatctctccaagcaggagtcctttacgagtgtgaagaaacccaagcgagacgactcaaaagatctggccctctgcagcatgattcttacagagatggagacccatgaggatgcctggcctttcctcctgccagtgaacctgaagctcgtgcccggttacaaaaaggtcatcaagaagccaatggacttctctaccatcagggagaaactgtcttccggacaataccctaatcttgagacattcgcgttggatgttaggctggtctttgacaattgcgagacctttaacgaagatgacagcgacatcggccgggcgggacataacatgagaaaatactttgagaaaaaatggaccgacacttttaaggtcagttag

SEQ ID NO: 108594 - DNA, 6405 bp, Artificial Sequence
  derived and/or modified sequence
atggagagcggggagcggctgcccagcagcgctgccagcagcaccacccccaccagcagcagcacccccagcgtggcctctgtggtgtccaaaggaggcctgagcactggagtggccagcctgagcagcaccatcaacccctgtggccacctgttcagaacagctggggaccagcccttcaacctgagcacagtgtcctctgccttccccatggtgagccaccctgtgtttggcctgcacagcgccagcagcggccacagcgagtttggaggcctgggcaccctgggcacccccacagccctggccgcccacccccagctggccagcttccctggagctgagtggtggaggaccacagatgcccacaccaggactggagccaccttcttcccccccctgctgggcatcccccccctgtttgcccccccagcccagaaccacgacagcagcagcttccacagcaggaccagcggcaagagcaacagaaatggacctgagaagggcgtgaatggcagcatcaatggcagcaacaccagcagcgtcatcggcatcaacacctctgtgctgagcaccacagccagcagctccatgggccagaccaagagcaccagcagcggcggcggcaacaggaagtgcaaccaggagcagagcaagaaccagcccctggatgcccgggtggacaagatcaaggacaagaagcccaggaagaaggccatggagagcagcagcaacagcgacagcgacagcggcaccagcagtgacaccagcagcgagggcatcagcagcagtgacagtgatgacctggaggaggatgaggaggaggaggaccagagcattgaggagagtgaagatgatgacagcgacagcgagagcgaggcccagcacaagagcaacaaccaggtgctgctgcacggcatcagtgaccccaaggcagatggccagaaggccacagagaaggcccaggagaagaggatccaccagcccctgcccctggccagcgagagccagacccacagcttccagagccagcagaagcagccccaggtgctgagccagcagctgcccttcatcttccagagcagccaggccaaggaggagagcgtgaacaagcacaccagcgtcatccagagcacaggcctggtgtccaatgtgaagcccctgagcctggtgaaccaggccaagaaggagacctacatgaagctgattgtgcccagcccagatgtgctgaaggccggcaacaagaacaccagcgaggagagcagcctgctgaccagcgagctgcggagcaagcgggagcagtacaagcaggccttccccagccagctgaagaagcaggagagcagcaagagcctgaagaaggtgattgctgccctgagcaaccccaaggccaccagcagcagccctgcccaccccaagcagaccctggagaacaaccaccccaaccccttcctgaccaatgccctgctgggcaaccaccagcccaatggagtcatccagagcgtcatccaggaggcccccctggccctgaccaccaagaccaagatgcagagcaagatcaatgaaaatattgctgctgccagcagcacccccttcagcagccctgtgaacctgagcaccagcggccgccgcaccccaggcaaccagacccctgtgatgcccagcgccagccccatcctgcacagccagggcaaggagaaggctgtgagcaacaacgtgaaccctgtgaagacccagcaccacagccacccagccaagagcctggtggagcagttccggggcacagacagcgacatccccagcagcaaggacagcgaggacagcaatgaagatgaggaggaggatgatgaggaggaggatgaagaagatgatgaagatgatgaaagtgatgacagccagagcgagagtgacagcaacagcgagagtgacacagagggcagcgaggaggaggatgatgatgacaaggaccaggatgaaagtgacagcgacacagaaggagagaagacctccatgaagctgaacaagaccaccagctctgtgaagagccccagcatgagcctgaccggccacagcaccccaagaaacctgcacatcgccaaggcccctggcagcgccccagctgccctgtgcagcgagagccagagccctgccttcctgggcaccagcagcagcaccctgaccagcagcccccacagcggcaccagcaagagaagaagagtgacagatgagcgggagctgcgcatccccctggagtatggctggcagcgggagacccgcatccggaactttggaggccgcctgcagggcgaggtggcctactatgccccctgtgggaagaagctgcggcagtacccagaggtgatcaagggcatgcagtggtgcctgctgaaggaggaggatgtgatcccccgcatccgggccatggagggccggcggggccggccccccaacccagaccggcagagggcccgggaggagagcaggatgagaagaaggaagggccggcccccaaatgtgggcaatgctgagttcctggacaatgctgatgccaagctgctgaggaagctgcaggcccaggagatcgcccggcaggccgcccagatcaagctgctgaggaagctgcagaagcaggagcaggcccgggtggccaaggaggccaagaagcagcaggccatcatggctgctgaggagaagaggaagcagaaggagcagatcaagatcatgaagcagcaggagaagatcaagaggatccagcagatccgcatggagaaggagctgcgggcccagcagatcctggaggccaagaagaagaagaaggaggaggccgccaatgccaagctgctggaggccgagaagaggatcaaggagaaggagatgaggcggcagcaggccgtgctgctgaagcaccaggagcgggagcggcggcggcagcacatgatgctgatgaaggccatggaggccaggaagaaggccgaggagaaggagcggctgaagcaggagaagagagatgagaagaggctgaacaaggagaggaagctggagcagaggcggctggagctggagatggccaaggagctgaagaagcccaatgaagacatgtgcctggccgaccagaagcccctgcctgagctgccccgcatccctggcctggtgctgagcggcagcaccttcagtgactgcctgatggtggtgcagttcctgaggaactttgggaaggtgctgggctttgatgtgaacattgatgtgcccaacctgtctgtgctgcaggagggcctgctgaacatcggggacagcatgggagaggtgcaggacctgctggtgcggctgctgtctgctgctgtgtgtgaccccggcctcatcaccggctacaaggccaagacagccctgggggagcacctgctgaatgtgggcgtgaacagagacaacgtgtctgagatcctgcagatcttcatggaggcccactgcggccagacagagctgacagagagcctgaagaccaaggccttccaggcccacaccccagcccagaaggcctctgtgctggccttcctgatcaatgagctggcctgcagcaagtctgtggtgtctgaaattgacaagaacatcgactacatgagcaacctgcggcgggacaagtgggtggtggagggcaagctgaggaagctgcgcatcatccacgccaagaagacaggcaagagggacaccagcggcggcatcgacctgggggaggagcagcaccccctgggcacccccaccccaggcaggaagagaagaagaaaaggaggagacagcgactatgatgatgatgatgatgatgacagtgatgaccagggagatgaagatgatgaagatgaggaggacaaggaggacaagaagggcaagaagacagacatctgtgaagatgaagatgaaggagaccaggccgcctctgtggaggagctggagaagcagatcgagaagctgagcaagcagcagagccagtacagaaggaagctgtttgatgccagccacagcctgcggtctgtgatgtttggccaggaccgctacagaagacgctactggatcctgccccagtgtggcggcatctttgtggagggcatggagagcggggagggcctggaggagatcgccaaggagcgggagaagctgaagaaggccgagagcgtgcagatcaaggaggagatgtttgagaccagcggggacagcctgaactgcagcaacacagaccactgtgagcagaaggaggacctgaaggagaaggacaacaccaacctcttcctgcagaagccaggcagcttcagcaagctgagcaagctgctggaggtggccaagatgcctcctgagagcgaggtgatgacccccaagcccaatgctggggccaacggctgcaccctgagctaccagaacagcggcaagcacagcctgggctctgtgcagagcacagccacccagagcaatgtggagaaggctgacagcaacaacctcttcaacacaggcagcagcggccctgggaagttctacagccccctgcccaatgaccagctgctgaagaccctgacagagaagaaccggcagtggttcagcctgctgcccaggaccccctgtgatgacaccagcctgacccacgccgacatgagcacagccagcctggtgaccccccagagccagccccccagcaagagccccagccccaccccagcccccctgggcagcagcgcccagaaccctgtgggcctgaacccctttgccctgagccccctgcaggtgaagggcggcgtgtccatgatgggcctgcagttctgtggctggcccaccggggtggtgaccagcaacatccccttcaccagctctgtgcccagcctgggcagcggcctgggcctgtctgagggcaatggaaacagcttcctgaccagcaatgtggccagcagcaagtctgagagccctgtgccccagaatgagaaggccaccagcgcccagcctgctgctgtggaggtggccaagcctgtggacttccccagccccaagcccatccctgaggagatgcagtttggctggtggaggatcatcgaccctgaggacctgaaggccctgctgaaggtgctgcacctgcggggcatccgggagaaggccctgcagaagcagatccagaagcacctggactacatcacccaggcctgcctgaagaacaaggatgtggccatcatcgagctgaatgaaaatgaggagaaccaggtgacccgggacatcgtggagaactggagcgtggaggagcaggccatggagatggacctgtctgtgctgcagcaggtggaggacctggagcggcgggtggccagcgccagcctgcaggtgaagggctggatgtgcccagagcccgccagcgagcgggaggacctggtgtactttgagcacaagagcttcaccaagctgtgcaaggagcatgatggagagttcaccggggaggatgagagcagcgcccacgccctggagaggaagagtgacaaccccctggacattgctgtgacccggctggccgacctggagaggaacatcgagcggcgcatcgaggaggacatcgcccctggcctgcgggtgtggaggcgggccctgtctgaggcccggtctgctgcccaggtggccctgtgcatccagcagctgcagaagagcatcgcctgggagaagagcatcatgaaggtgtactgccagatctgcaggaaaggagacaatgaggagctgctgctgctgtgtgatggctgtgacaagggctgccacacctactgccaccggcccaagatcaccaccatcccagatggagactggttctgcccagcctgcatcgccaaggccagcggccagaccctgaagatcaagaagctgcacgtgaagggcaagaagaccaatgaaagcaagaagggcaagaaggtgaccctgactggagacacagaagatgaagattctgccagcaccagcagcagcctgaagaggggcaacaaggacctgaagaagaggaagatggaggagaacaccagcatcaacctgagcaagcaggagagcttcacctctgtgaagaagcccaagagagatgacagcaaggacctggccctgtgcagcatgatcctgacagagatggagacccatgaagatgcctggcccttcctgctgcctgtgaacctgaagctggtgcccggctacaagaaggtgatcaagaagcccatggacttcagcaccatccgggagaagctgagcagcggccagtaccccaacctggagacctttgccctggatgtgcggctggtgtttgacaactgtgagaccttcaatgaagatgacagcgacatcggccgggccggccacaacatgaggaagtactttgagaagaagtggacagacaccttcaaggtgtcctag

SEQ ID NO: 108595 - DNA, 6399 bp, Artificial Sequence
  derived and/or modified sequence
atggagagcggggagcggctgcccagcagcgctgccagcagcaccacccccaccagcagcagcacccccagcgtggcctctgtggtgtccaaaggaggcctgagcactggagtggccagcctgagcagcaccatcaacccctgtggccacctgttcagaacagctggggaccagcccttcaacctgagcacagtgtcctctgccttccccatggtgagccaccctgtgtttggcctgcacagcgccagcagcggccacagcgagtttggaggcctgggcaccctgggcacccccacagccctggccgcccacccccagctggccagcttccctgagtggtggaggaccacagatgcccacaccaggactggagccaccttcttcccccccctgctgggcatcccccccctgtttgcccccccagcccagaaccacgacagcagcagcttccacagcaggaccagcggcaagagcaacagaaatggacctgagaagggcgtgaatggcagcatcaatggcagcaacaccagcagcgtcatcggcatcaacacctctgtgctgagcaccacagccagcagctccatgggccagaccaagagcaccagcagcggcggcggcaacaggaagtgcaaccaggagcagagcaagaaccagcccctggatgcccgggtggacaagatcaaggacaagaagcccaggaagaaggccatggagagcagcagcaacagcgacagcgacagcggcaccagcagtgacaccagcagcgagggcatcagcagcagtgacagtgatgacctggaggaggatgaggaggaggaggaccagagcattgaggagagtgaagatgatgacagcgacagcgagagcgaggcccagcacaagagcaacaaccaggtgctgctgcacggcatcagtgaccccaaggcagatggccagaaggccacagagaaggcccaggagaagaggatccaccagcccctgcccctggccagcgagagccagacccacagcttccagagccagcagaagcagccccaggtgctgagccagcagctgcccttcatcttccagagcagccaggccaaggaggagagcgtgaacaagcacaccagcgtcatccagagcacaggcctggtgtccaatgtgaagcccctgagcctggtgaaccaggccaagaaggagacctacatgaagctgattgtgcccagcccagatgtgctgaaggccggcaacaagaacaccagcgaggagagcagcctgctgaccagcgagctgcggagcaagcgggagcagtacaagcaggccttccccagccagctgaagaagcaggagagcagcaagagcctgaagaaggtgattgctgccctgagcaaccccaaggccaccagcagcagccctgcccaccccaagcagaccctggagaacaaccaccccaaccccttcctgaccaatgccctgctgggcaaccaccagcccaatggagtcatccagagcgtcatccaggaggcccccctggccctgaccaccaagaccaagatgcagagcaagatcaatgaaaatattgctgctgccagcagcacccccttcagcagccctgtgaacctgagcaccagcggccgccgcaccccaggcaaccagacccctgtgatgcccagcgccagccccatcctgcacagccagggcaaggagaaggctgtgagcaacaacgtgaaccctgtgaagacccagcaccacagccacccagccaagagcctggtggagcagttccggggcacagacagcgacatccccagcagcaaggacagcgaggacagcaatgaagatgaggaggaggatgatgaggaggaggatgaagaagatgatgaagatgatgaaagtgatgacagccagagcgagagtgacagcaacagcgagagtgacacagagggcagcgaggaggaggatgatgatgacaaggaccaggatgaaagtgacagcgacacagaaggagagaagacctccatgaagctgaacaagaccaccagctctgtgaagagccccagcatgagcctgaccggccacagcaccccaagaaacctgcacatcgccaaggcccctggcagcgccccagctgccctgtgcagcgagagccagagccctgccttcctgggcaccagcagcagcaccctgaccagcagcccccacagcggcaccagcaagagaagaagagtgacagatgagcgggagctgcgcatccccctggagtatggctggcagcgggagacccgcatccggaactttggaggccgcctgcagggcgaggtggcctactatgccccctgtgggaagaagctgcggcagtacccagaggtgatcaagggcatgcagtggtgcctgctgaaggaggaggatgtgatcccccgcatccgggccatggagggccggcggggccggccccccaacccagaccggcagagggcccgggaggagagcaggatgagaagaaggaagggccggcccccaaatgtgggcaatgctgagttcctggacaatgctgatgccaagctgctgaggaagctgcaggcccaggagatcgcccggcaggccgcccagatcaagctgctgaggaagctgcagaagcaggagcaggcccgggtggccaaggaggccaagaagcagcaggccatcatggctgctgaggagaagaggaagcagaaggagcagatcaagatcatgaagcagcaggagaagatcaagaggatccagcagatccgcatggagaaggagctgcgggcccagcagatcctggaggccaagaagaagaagaaggaggaggccgccaatgccaagctgctggaggccgagaagaggatcaaggagaaggagatgaggcggcagcaggccgtgctgctgaagcaccaggagcgggagcggcggcggcagcacatgatgctgatgaaggccatggaggccaggaagaaggccgaggagaaggagcggctgaagcaggagaagagagatgagaagaggctgaacaaggagaggaagctggagcagaggcggctggagctggagatggccaaggagctgaagaagcccaatgaagacatgtgcctggccgaccagaagcccctgcctgagctgccccgcatccctggcctggtgctgagcggcagcaccttcagtgactgcctgatggtggtgcagttcctgaggaactttgggaaggtgctgggctttgatgtgaacattgatgtgcccaacctgtctgtgctgcaggagggcctgctgaacatcggggacagcatgggagaggtgcaggacctgctggtgcggctgctgtctgctgctgtgtgtgaccccggcctcatcaccggctacaaggccaagacagccctgggggagcacctgctgaatgtgggcgtgaacagagacaacgtgtctgagatcctgcagatcttcatggaggcccactgcggccagacagagctgacagagagcctgaagaccaaggccttccaggcccacaccccagcccagaaggcctctgtgctggccttcctgatcaatgagctggcctgcagcaagtctgtggtgtctgaaattgacaagaacatcgactacatgagcaacctgcggcgggacaagtgggtggtggagggcaagctgaggaagctgcgcatcatccacgccaagaagacaggcaagagggacaccagcggcggcatcgacctgggggaggagcagcaccccctgggcacccccaccccaggcaggaagagaagaagaaaaggaggagacagcgactatgatgatgatgatgatgatgacagtgatgaccagggagatgaagatgatgaagatgaggaggacaaggaggacaagaagggcaagaagacagacatctgtgaagatgaagatgaaggagaccaggccgcctctgtggaggagctggagaagcagatcgagaagctgagcaagcagcagagccagtacagaaggaagctgtttgatgccagccacagcctgcggtctgtgatgtttggccaggaccgctacagaagacgctactggatcctgccccagtgtggcggcatctttgtggagggcatggagagcggggagggcctggaggagatcgccaaggagcgggagaagctgaagaaggccgagagcgtgcagatcaaggaggagatgtttgagaccagcggggacagcctgaactgcagcaacacagaccactgtgagcagaaggaggacctgaaggagaaggacaacaccaacctcttcctgcagaagccaggcagcttcagcaagctgagcaagctgctggaggtggccaagatgcctcctgagagcgaggtgatgacccccaagcccaatgctggggccaacggctgcaccctgagctaccagaacagcggcaagcacagcctgggctctgtgcagagcacagccacccagagcaatgtggagaaggctgacagcaacaacctcttcaacacaggcagcagcggccctgggaagttctacagccccctgcccaatgaccagctgctgaagaccctgacagagaagaaccggcagtggttcagcctgctgcccaggaccccctgtgatgacaccagcctgacccacgccgacatgagcacagccagcctggtgaccccccagagccagccccccagcaagagccccagccccaccccagcccccctgggcagcagcgcccagaaccctgtgggcctgaacccctttgccctgagccccctgcaggtgaagggcggcgtgtccatgatgggcctgcagttctgtggctggcccaccggggtggtgaccagcaacatccccttcaccagctctgtgcccagcctgggcagcggcctgggcctgtctgagggcaatggaaacagcttcctgaccagcaatgtggccagcagcaagtctgagagccctgtgccccagaatgagaaggccaccagcgcccagcctgctgctgtggaggtggccaagcctgtggacttccccagccccaagcccatccctgaggagatgcagtttggctggtggaggatcatcgaccctgaggacctgaaggccctgctgaaggtgctgcacctgcggggcatccgggagaaggccctgcagaagcagatccagaagcacctggactacatcacccaggcctgcctgaagaacaaggatgtggccatcatcgagctgaatgaaaatgaggagaaccaggtgacccgggacatcgtggagaactggagcgtggaggagcaggccatggagatggacctgtctgtgctgcagcaggtggaggacctggagcggcgggtggccagcgccagcctgcaggtgaagggctggatgtgcccagagcccgccagcgagcgggaggacctggtgtactttgagcacaagagcttcaccaagctgtgcaaggagcatgatggagagttcaccggggaggatgagagcagcgcccacgccctggagaggaagagtgacaaccccctggacattgctgtgacccggctggccgacctggagaggaacatcgagcggcgcatcgaggaggacatcgcccctggcctgcgggtgtggaggcgggccctgtctgaggcccggtctgctgcccaggtggccctgtgcatccagcagctgcagaagagcatcgcctgggagaagagcatcatgaaggtgtactgccagatctgcaggaaaggagacaatgaggagctgctgctgctgtgtgatggctgtgacaagggctgccacacctactgccaccggcccaagatcaccaccatcccagatggagactggttctgcccagcctgcatcgccaaggccagcggccagaccctgaagatcaagaagctgcacgtgaagggcaagaagaccaatgaaagcaagaagggcaagaaggtgaccctgactggagacacagaagatgaagattctgccagcaccagcagcagcctgaagaggggcaacaaggacctgaagaagaggaagatggaggagaacaccagcatcaacctgagcaagcaggagagcttcacctctgtgaagaagcccaagagagatgacagcaaggacctggccctgtgcagcatgatcctgacagagatggagacccatgaagatgcctggcccttcctgctgcctgtgaacctgaagctggtgcccggctacaagaaggtgatcaagaagcccatggacttcagcaccatccgggagaagctgagcagcggccagtaccccaacctggagacctttgccctggatgtgcggctggtgtttgacaactgtgagaccttcaatgaagatgacagcgacatcggccgggccggccacaacatgaggaagtactttgagaagaagtggacagacaccttcaaggtgtcctag

SEQ ID NO: 108596 - DNA, 6405 bp, Artificial Sequence
  derived and/or modified sequence
atggagagcggcgagcggctgcccagcagcgccgccagcagcaccacacctacttcaagctcaactccatctgtcgcctctgtcgtctctaaagggggattaagtactggcgttgcttctttgtcgagtacaatcaacccatgcggacacctgttcagaacggctggagatcaaccatttaacctcagcacagtctcctctgctttcccaatggtgagtcatcccgtatttggtttacatagcgcaagctctggacatagcgagttcggaggcctcggcaccctcggcacccctaccgctctggcagcccatccccagcttgccagcttcccaggcgccgaatggtggaggaccaccgacgcccataccaggaccggagccaccttttttccaccgttgctcggcatccccccgctatttgccccacctgcacaaaatcatgactcttccagcttccacagcagaacctccgggaagagcaatcggaacgggccggagaaaggcgtcaacggctcaatcaacggcagcaatacttctagcgtgatcgggataaacacctccgttctgtctaccactgccagcagctctatgggtcagacaaaaagtaccagctctggcggcgggaatcggaaatgcaatcaggagcagagtaagaaccagccactcgacgccagagtggacaagattaaggataaaaaaccccgcaagaaggcaatggaaagctcttctaattccgactccgactctggcacctctagtgacacaagtagcgaggggatctcctctagcgactccgacgacctggaggaggatgaggaggaagaggaccagtctatagaggagtctgaggatgacgactctgattccgaatccgaggcccagcacaagagcaacaatcaggtgcttcttcacggaattagtgatccaaaggccgacggacagaaagccacggaaaaggcccaagagaagcgcattcatcagcctctgccgctggcgtccgagagccaaacacattctttccagagccagcagaagcagcctcaagtcctgtcccaacagctaccgttcatctttcagagttctcaggctaaggaggaatcggtcaacaaacacacctctgtgattcagagtactggcctagtgagtaacgtcaaacctcttagcctggtaaaccaggctaaaaaagaaacctacatgaagttgatcgtgccctcacccgacgttcttaaagcaggcaataaaaatacgtccgaagagagctcactcctaacctccgagctccgatctaagcgagagcaatacaaacaggctttcccaagtcagctgaagaaacaagagtcgagcaaatcgcttaaaaaagtgatagccgccctctctaacccgaaggccacttcatctagtccagcgcaccccaagcagacgctggagaacaaccatccaaatcccttcctcacaaacgccctcctgggcaaccaccaaccaaacggtgtaatccagagcgtcattcaggaggcacctcttgcactgactacgaaaacgaagatgcaatctaagattaatgagaacatagcggccgcctcatctactcccttttcctctcctgtaaatctgtctacaagcggacgaagaaccccagggaaccagacaccggtcatgccttctgcttctccaatcctccacagccagggtaaagagaaggcggtaagcaataatgttaaccctgtcaagacccagcaccattcccaccctgctaagtcccttgtcgagcagttcaggggaaccgacagcgacattccatcatccaaagactctgaggattccaacgaggacgaagaggaggatgacgaggaggaagacgaggaggatgacgaagacgacgaaagcgacgattctcaatctgagtccgatagcaactccgagtcagacacagagggctccgaagaggaggatgatgatgataaggatcaggatgaaagcgactcagacactgaaggggaaaagaccagtatgaagctcaacaagaccacttcttccgtgaaaagtccttccatgtccctaacggggcatagcacgcccaggaatctccacattgcaaaggcccctggcagcgcacccgcagccctttgcagcgaatcccagtcccccgcttttcttgggacctctagcagcaccctgactagcagcccacattctgggacctccaagcgcaggcgggttacggacgagagagagttgaggatccccttagaatacggctggcagagagagacaagaattaggaactttggcggtcgactgcaaggggaagttgcttattatgcaccttgcgggaagaaattaagacagtatcccgaagtgattaagggaatgcaatggtgcctcctgaaggaagaggatgtgatccccagaatacgcgccatggaggggcgacggggacgcccaccaaatccggaccgacagcgggcccgggaagagtcccgcatgcgaagacgcaaggggagaccaccaaatgtcggcaatgctgagtttttggataacgccgacgcaaaactcctccggaagctccaggcccaggagattgcccgccaggcggctcaaattaagctgctaagaaaattacagaagcaggagcaggctcgggtggcgaaggaggcaaagaaacaacaagcaataatggccgccgaagaaaagagaaagcagaaagagcagataaagatcatgaagcaacaggagaagatcaagagaattcagcagataagaatggagaaggagctgagggcccagcaaatattggaagctaaaaaaaagaagaaagaagaggcggcaaatgccaagttgctggaggccgaaaagcggatcaaggagaaagagatgagacgacaacaggccgtgttactcaaacatcaggaacgggagcgacgcagacagcatatgatgctgatgaaggccatggaagccaggaagaaagctgaggagaaggagcgactcaagcaggaaaaacgcgacgaaaaaaggctgaataaggagagaaagttagagcagcgacggctggagctggaaatggcaaaagagctgaagaaacccaatgaagacatgtgtctggcagatcagaaaccattaccagagctgcccagaattcccggcctggtcttatcggggtcaacctttagtgactgtcttatggtcgttcagtttctccgaaactttggtaaggtgctcgggtttgatgtaaacatagacgtgcctaatttaagcgtgctgcaggagggactgctgaatattggagatagcatgggtgaagtgcaggacctgctggttcggctcctttccgctgccgtgtgcgacccgggattaatcactgggtataaggccaagaccgctcttggtgaacacctcttgaatgtcggagtgaatcgcgataatgtttcagaaatcctccaaattttcatggaggcccattgcggccagaccgagttgacagaaagtttgaagacgaaggccttccaggcacacacccctgcgcaaaaggccagcgtcctcgccttccttatcaacgagctggcttgcagcaagagcgtggtctctgaaatcgataaaaatatagactacatgtctaacttaaggcgcgataaatgggttgttgagggcaaactcagaaaactgcggatcattcatgccaagaaaactggaaaacgtgataccagcggagggatcgatctaggcgaggagcagcacccactggggacgcccacgccgggtaggaagcggaggagaaaggggggggacagtgactatgacgatgacgacgacgatgactccgacgaccagggcgatgaggatgatgaggacgaagaagacaaagaggacaaaaagggcaaaaagactgatatttgcgaggatgaagatgagggtgaccaggccgcaagcgttgaggagctggagaaacagatcgaaaagttgtccaagcagcagagtcagtaccgtcgcaagctgtttgacgcttctcatagtctgaggagcgtcatgtttggacaagatcgttaccgccgacgctactggattttacctcaatgcggcggcatcttcgttgaggggatggaaagcggcgagggcctcgaagaaattgctaaagaacgcgagaagctcaagaaggccgagtctgtacaaataaaggaggaaatgttcgagaccagcggggactcactcaactgttctaacacagaccattgcgaacagaaagaagacttgaaggagaaggacaacaccaacctgtttctccagaagcctgggtctttttcaaaactcagcaagctgttggaggtagcaaagatgccgcccgagagtgaggtcatgactcccaaaccaaatgccggagcaaatgggtgtactctttcctatcagaacagcggcaagcactcactggggagcgtgcaatctacagctacccaaagtaatgtggagaaagctgatagtaacaatctgttcaacactggctcaagtggaccgggaaagttctactctcccctgcccaacgatcagcttcttaagactctgactgaaaagaataggcagtggttttccctcttaccgcgaaccccttgtgacgacacttcactgacacacgctgatatgtccactgcaagtctggtcaccccacagagccagccacctagcaagtcccccagccctacacccgcccctctcggctccagtgcccagaaccccgttggactcaacccattcgccttatctcccctccaggtgaagggcggcgtatctatgatgggtctccagttctgtggctggcctacaggcgtggtgacatccaacatcccctttacaagttccgtaccctccctgggctctggcttgggcctttcggaaggtaatggaaacagttttctcacatcgaacgtggctagtagcaagagtgaaagccctgtgccgcagaacgagaaggccacgtccgcccagccagctgcagtggaagtagcaaaacccgttgattttcctagtcccaagcccatcccagaagaaatgcaattcggatggtggcgcatcatagatccagaagatctgaaagcactgctgaaagttctgcacctgcggggcatccgggagaaggctctgcaaaaacagatccagaaacatcttgattacatcacacaggcctgtctcaagaataaggacgtcgccatcatcgaattgaatgagaacgaggagaaccaggtgacacgggatatcgtagaaaactggtctgtagaagagcaggccatggaaatggacctctcagtactgcagcaagtagaggatctggagcggcgagtggcatccgcttcgctccaggtgaagggatggatgtgtcctgagcccgcttccgaaagggaagatttagtgtactttgaacataaaagtttcaccaaactttgcaaagaacatgacggagaattcactggcgaggatgaatcttctgctcacgctctggagcgaaagagcgacaatcccctggatattgcagtcacgcggctcgctgatctggagagaaacattgagcgccgaattgaagaagacattgcgcccggcctgcgagtttggcgccgagctcttagtgaggctcgatccgctgcccaggtcgctttgtgtatccaacaactgcagaaatcaatcgcatgggaaaaatcaatcatgaaagtctattgtcagatttgcaggaaaggagataacgaggagctgctgctcttatgcgatggttgtgataaagggtgtcacacctattgtcatcggccgaaaattactaccatacccgatggagactggttctgtccagcatgcattgcgaaagcttctggccagacactaaaaataaagaagctacatgtgaaaggaaagaagaccaatgagtcaaagaaagggaagaaagtcacactgacaggggatacggaagacgaggactccgcctctacatcttctagcctgaaacgcggcaataaggacctgaaaaaaagaaagatggaggaaaatacttctattaacttaagcaagcaggaatccttcaccagcgtgaagaagcccaaacgtgatgactcaaaggaccttgcgctgtgctctatgattttgacggagatggaaactcatgaggatgcctggccattcttgcttccggtgaaccttaaattggtgccgggatataaaaaggtcatcaaaaaaccaatggatttctctactatcagagagaagctgagctcaggacagtacccaaacctggagacattcgcactggacgtaagactcgtatttgataattgcgaaacgttcaatgaggacgattctgacattggcagggctggccataacatgcgcaagtatttcgagaagaagtggactgacacctttaaggtttcttag

SEQ ID NO: 108597 - DNA, 6399 bp, Artificial Sequence
  derived and/or modified sequence
atggagagcggcgagcggctgcccagcagcgccgccagcagcaccaccccaacttcttcatccacacccagcgtggcttcagtcgtttcaaaaggtggcctgtctacgggggttgcctcactgtccagtacaatcaacccatgcggccacctcttccgcactgccggtgaccaaccctttaacttatccacagtctcctcggcctttcctatggtctcccatccagtttttggattgcactccgcgtctagtggccactctgaattcggagggttgggaaccttggggactcccactgctctggccgcccacccgcagctcgctagcttcccagagtggtggaggaccacagacgcccacacacgaaccggggccaccttcttccccccactgctggggataccacctttattcgccccgccagcacagaatcatgactcctcaagtttccattctaggacgagtggcaagtccaaccgcaacggccccgagaagggcgtcaatggctcaattaacgggtcaaatacgagttcagtgatagggatcaacacctccgtacttagtaccactgccagcagcagtatggggcagaccaaaagtacttccagtggcgggggcaatcgaaagtgcaaccaggagcagtcaaaaaaccaacctttggatgccagagtggataagattaaggacaaaaagcctagaaaaaaagctatggaaagctcctcaaatagcgactccgattccgggacatcgagcgatacttctagcgaagggatcagctccagcgatagcgatgacctagaggaagacgaagaggaggaggaccagagtattgaagaatctgaagacgacgactccgactcagagagcgaggcccagcacaagtcgaacaaccaagtgctgctgcacggcatctccgaccctaaggccgatggccagaaggccacggaaaaagcgcaagagaagcgcatacaccaacccctcccactggctagcgagtcccagacccactcctttcagagtcagcaaaagcaacctcaagtgttatcccagcagctgccttttatcttccagagctctcaagcaaaagaggaaagcgtgaataaacatacgtccgtcatccagagtaccgggctggtctctaacgtcaagcctctcagtctcgtgaaccaagcgaaaaaggagacttacatgaagcttattgtccccagcccagatgttctgaaagcgggcaataagaatactagtgaggagtcctccctgctgacgagcgagctcaggtccaagcgcgagcaatataaacaggcgttcccctctcagctgaagaagcaggagtcctccaagtctctgaagaaggttattgcagccctgtcaaacccgaaagctaccagctcgagccctgcccatcctaagcaaacattggagaacaatcatccaaatccgttcctcacaaatgccctgctgggcaaccatcaaccgaacggagtgatccagtccgtgattcaagaggcaccccttgccctcaccacaaaaactaagatgcagtccaaaattaacgagaatattgcagccgccagctctaccccattctcttcaccagtgaatcttagcacctccgggcggagaacccctggaaatcaaacccctgtcatgccatcggcctcccctatactgcatagccaaggaaaagagaaagccgtcagcaacaacgtgaacccggtgaaaacccagcaccattcccaccccgccaagtcactcgtcgaacaatttcgcggcactgatagcgacatcccaagttccaaggactcagaggactcaaacgaggatgaggaagaagatgatgaagaggaggatgaggaagatgacgaggatgacgaatccgatgattctcagagtgagagcgactcaaattctgagtcagacaccgagggaagcgaagaagaagacgatgacgataaagaccaggacgaatctgatagtgatactgagggagaaaagacatctatgaagctcaataagacgaccagctccgtcaaatcaccgtctatgtctctcaccgggcatagtacgccgagaaacctgcacatcgcaaaggcacctggttctgcacccgccgccttatgttctgagagccaatctccagccttcctgggaacttcttcctcaactctgacatcatccccccactccggaactagtaaacggcggcgagttactgacgaaagggaactgcgaattcctctagaatacggttggcagagagaaactcggatccggaacttcggagggaggctgcaaggagaggtggcctactacgctccatgcggcaagaagctgcggcagtatccagaagtcataaagggcatgcaatggtgtcttttaaaagaggaggacgtgatcccccggatccgagcgatggaggggcgccgcggccgccctcccaaccccgatcgccagcgggcccgcgaggagtctagaatgaggcggcgcaaggggagacccccaaacgtaggaaacgccgaatttctggacaacgcagacgccaaactgctccggaagctgcaggcgcaggagattgcaagacaggcagcccagatcaagctcctacgtaaattacagaagcaggagcaagctcgggtggcaaaggaagctaagaaacagcaggcaatcatggcagctgaggagaagcggaagcaaaaagagcagatcaagataatgaaacagcaggaaaaaatcaagcgtatccaacaaatcaggatggagaaggaattgagggctcagcaaatccttgaggctaaaaagaagaaaaaggaggaagctgctaacgccaagttgttagaggcggagaaacgtataaaggaaaaagagatgcggagacagcaggcagtgctgcttaagcatcaggagagagagagacgtcgacagcacatgatgctgatgaaagccatggaagccaggaaaaaggcggaagaaaaggagcggcttaagcaggagaagagggacgaaaaaagattgaacaaagagaggaagcttgagcaacgaagacttgagctcgagatggctaaagagcttaaaaagccaaatgaggacatgtgcctggcagaccagaagcccctcccagagcttcccaggatacccggtttagtgctgagtggctccacattcagcgactgtcttatggtggttcagtttctgcgcaattttggtaaggtcttaggtttcgatgttaacatagatgtgcccaacctttctgttctgcaggagggacttctcaatattggcgactctatgggcgaggtccaggacttgctggtccgcctgctgtcggcagcagtatgcgacccaggtctcattaccggctataaggcaaagaccgcacttggggaacacctgttgaatgtcggggtcaatcgagacaatgtgtccgagatcttgcagatattcatggaggctcactgcgggcagaccgaattaacagaatctctgaagacaaaagccttccaggctcacacacctgcgcagaaagcaagtgtgctggcctttctgattaacgagctcgcttgctcaaaatctgtcgtgtcagaaattgataaaaatatcgactatatgtctaatttaaggcgtgataagtgggtagttgagggcaagctgcgcaaactgagaatcattcacgccaagaaaacaggaaagcgcgacacatccggaggaatagacctgggtgaggagcaacacccactggggacgcccacaccaggccgaaaacgcaggaggaagggcggtgattccgattatgatgacgatgacgacgatgattctgacgatcagggggatgaagacgacgaagacgaggaagacaaggaggataaaaagggaaaaaagacagacatatgtgaggacgaggatgagggagatcaagccgcaagcgtcgaggagctggaaaagcagatcgaaaaactgagcaagcaacaaagtcagtacagaagaaaactgtttgatgctagtcactcactgagaagcgtgatgtttgggcaggaccgttaccgtagaaggtactggattttaccccaatgtggggggatctttgtcgagggaatggaatcaggagaaggcctcgaggaaatagcaaaggaaagagagaaactaaaaaaggcagagagtgtacaaattaaagaagaaatgtttgagactagcggggactccctcaactgttcaaataccgatcattgcgaacagaaagaggacctgaaagaaaaggataacacaaatctatttctgcagaagccagggtcattttctaaactgtcgaaacttcttgaagtggccaagatgccacccgagtcagaagtgatgacccccaaaccaaatgctggggctaatgggtgcacacttagctaccaaaactccggaaaacattctctcggttccgttcaatcaaccgcgacccagtccaatgttgagaaggcagacagcaataatctgttcaacaccggatcttctggccctggtaagttctatagcccactgcctaacgatcagcttctcaagaccttaaccgaaaaaaatagacagtggttctcactcctcccgcgaactccgtgcgatgacaccagtttgacacatgcggacatgtctacagcgagcctagtaactccacagtctcagcctcctagcaaaagtccctccccaacaccagcccccctcggatcttcagctcagaaccccgtggggctaaatccttttgcactgtcacccctccaggtgaaggggggcgtctcgatgatggggctgcagttttgcggatggccaacaggggtggtgacttccaatattcctttcacatcgtctgtcccgtcactgggaagtggactaggtctatcagagggcaatggtaattcatttctaacttctaacgttgccagctcaaagagcgaatccccggtaccccagaatgagaaggcgacttcagcccaaccagcggctgtcgaagtagcaaaacccgtggacttcccatctccaaaacccatcccggaagagatgcagtttggatggtggcggataatcgatccagaagacctcaaagccctcctgaaggtgttgcacctccgaggaattagggagaaagccctgcagaaacagatccagaagcaccttgactacatcacgcaggcatgcctgaagaacaaggatgtggctattattgaactgaatgagaacgaggaaaaccaggttacacgagacatcgtcgaaaattggtccgtggaagagcaggccatggagatggatctaagtgttttgcaacaggtagaagaccttgagcgacgcgtggcctccgcttccttacaggtaaagggatggatgtgccccgagccagcatccgaaagagaggacctcgtgtattttgagcacaagagcttcacgaagctgtgcaaagagcacgacggagagtttacaggtgaggacgaatcttccgcacacgctctcgagaggaaatcagacaacccattggatattgccgttactagactggcggacttggaacgcaacatcgaacggcgaatcgaagaagatatcgccccaggattgagagtgtggcgtcgagccctttccgaggcacggtccgccgcacaggtggcactgtgcatccagcagctgcaaaaatccatcgcctgggagaagagcatcatgaaagtctattgtcagatctgccgaaaaggagacaacgaagagctgctcctactttgcgacggatgcgacaagggctgccatacgtactgccacagacctaagattaccactatcccagatggagactggttttgccctgcttgcatcgcgaaagccagtggtcagacactaaaaattaagaaactgcacgtgaaaggcaaaaaaaccaacgaaagcaagaagggtaagaaggtcacacttaccggagacacagaggacgaagatagtgcctctacaagttcctctttgaagaggggcaacaaagatctgaagaaacgcaagatggaggaaaacacatccattaacctgtctaagcaggaatcttttacatcagtcaaaaaacctaagagagatgactcaaaggatcttgccctgtgtagcatgatcctgacagagatggaaacccacgaggatgcttggcccttcctgctccctgtgaatctgaagttggtgcccggctataagaaagttataaagaagccaatggatttcagcacaataagggagaaactttcctcaggccaataccccaacctggaaaccttcgctctggacgttcgcctcgttttcgataactgcgaaacatttaacgaggatgactcagatattggccgcgcaggacacaatatgagaaaatattttgaaaagaaatggactgatacatttaaagtctcctag

SEQ ID NO: 108598 - DNA, 6404 bp, Artificial Sequence
  derived and/or modified sequence
atggagtcgggagagcgcctgccttccagtgcagccagttcgaccactccgacatcttcctcaaccccctccgttgcgagcgttgtgtcaaagggaggtttatccaccggtgtcgcctccctgagtagcacaatcaacccttgtggccacctcttccggactgcaggggaccagccttttaacttgtctacggtatcatctgcattcccaatggtctctcaccctgtttttggtcttcattcggcaagtagcgggcactctgagttcggcggtctaggcactctagggactccaactgcactggccgcacacccccagctggccagcttccctggagctgaatggtggaggacgacagacgcacatacccgcaccggcgcaactttcttccctcccctgcttggcatccccccactgtttgcaccacctgcccagaatcacgacagctcttccttccactcccgcacatcaggaaaatccaatagaaatggcccagaaaagggcgtaaacggatccatcaacggatctaatactagttcagtgatcggaatcaatacatctgttctcagcacaactgcaagttcttcaatggggcaaacgaagtccacaagttctggtggcggaaatcgaaaatgtaatcaagagcagtctaagaaccagccactggacgcacgagtagacaaaatcaaggataagaagcctcgaaagaaggctatggagagctcgtccaatagcgatagtgactcaggtacaagtagcgatacgtccagcgagggaattagctctagtgattctgatgacctggaagaagatgaggaggaagaggatcagagcattgaagagagcgaggacgacgattccgacagtgaatcagaggcccagcacaagtctaataatcaggttttacttcatggcataagcgacccgaaggcagacggccagaaagcaacagagaaagctcaggagaaacgaattcaccagccgctgccgctggcgtctgagagccagactcattctttccagagccaacaaaagcagccacaggtcctgagccagcaactcccatttatttttcagagttctcaggctaaggaagaaagtgtgaacaaacatactagcgtgattcaatcaaccgggttggtttcgaacgtaaagcccttgtccctagtgaaccaagcaaaaaaagaaacatacatgaagctgatagttccatcccccgacgtgctaaaggccggtaacaagaatactagtgaagaaagctcattgctgacctcagagctgcgtagtaagagggaacagtacaagcaagcttttcctagccagctaaagaaacaggagagctccaagtccctcaaaaaagtaattgccgctctgtcaaatcctaaggcaactagctccagtcctgcgcaccctaagcagacactggaaaacaaccacccaaatccattcctgacaaacgctttgttggggaaccaccaacccaatggcgtgatacagtctgtgatccaagaggcccctctggcccttaccaccaagactaaaatgcagtcaaaaataaatgaaaacatcgcagcagcgtcaagcacgcctttttccagcccggttaacttgagcacctccggacggcgtacccccggaaatcaaaccccagtgatgccatctgcttccccaatcctccacagtcagggtaaggagaaggccgtctcaaataacgtaaatccagtcaaaacccaacatcactcacaccctgctaaatctcttgtcgaacagtttagaggcaccgattcagacattccctcatcaaaggactccgaagactcgaatgaagacgaggaagaagacgacgaagaagaagatgaggaagacgacgaggacgacgaatccgacgattctcaaagtgagtccgactcaaattcagaatccgacaccgagggctctgaagaggaggacgatgacgacaaagatcaggacgagagtgactccgacacagagggggagaagacttctatgaaactgaataagactacgagttctgtcaagagcccttctatgagtctgaccgggcatagcacccctaggaatctccatatcgccaaagccccaggctcagccccagcagccctgtgttcggaaagccagtctccggctttcctcgggacctcctcaagcacattaacgtcatcccctcatagcgggacaagcaagaggcggagagtgacagacgagagggagcttaggattccattggagtacggatggcagcgagaaacacgcatccggaacttcggaggcaggctgcaaggggaggttgcttattacgccccttgtggaaagaagctcaggcagtaccccgaggtgattaagggaatgcagtggtgtctgctgaaggaggaggacgtgatcccgagaattcgcgctatggagggtcggaggggcaggccaccaaatcctgataggcagagggcccgagaagaatcgcgcatgaggcgacgtaaaggcaggcctccaaatgtcggcaacgccgaatttctagataacgccgacgccaaactgctgcgaaagttacaggcccaggagattgcccgacaggccgcacagatcaagcttttgaggaaactccaaaaacaggaacaggcaagggttgccaaagaggccaagaaacagcaggccataatggctgccgaggaaaagagaaagcagaaggaacagatcaagatcatgaagcagcaggaaaaaattaaacggattcagcagatccggatggagaaagagctgcgggctcaacagatcttggaagcaaagaagaaaaagaaagaggaggccgctaacgccaagctgcttgaagccgaaaaaaggatcaaggaaaaggaaatgaggcggcaacaggcagtcctactgaagcatcaggagcgagaacgtaggcgccaacacatgatgttaatgaaggcaatggaagccagaaagaaggctgaagagaaagaacgcttgaaacaggagaaaagggacgagaagcggctcaacaaggaaagaaaactggagcaaagaaggctggaactggagatggctaaggaactcaagaagccgaacgaggacatgtgtcttgccgatcagaagcccctgcccgaactccccaggattcccggattagtgttgtccggctctacgtttagcgactgcttaatggttgtacagtttctgcgtaacttcggcaaggttttgggtttcgatgtaaacatagatgtgccaaatctctctgtgctgcaggaggggctgctgaacataggtgactctatgggagaggttcaagatttgttggtgaggctactgagcgcagctgtatgtgatccaggccttattacaggctataaggccaaaactgcattgggtgagcacttgctgaatgtgggcgtcaatcgggataacgtaagtgaaatcctgcagatcttcatggaggcacactgcggtcagacagagcttactgaaagtctgaagacaaaagccttccaggcacacacaccagcccagaaggcaagcgtgttagcatttctcattaatgagctggcctgcagcaagagtgtggtgtctgagatagataaaaacatcgactatatgagtaatctgcggagggataagtgggtggtcgagggaaagctccgaaaactcaggataattcacgccaagaagacgggcaagcgcgatacctcaggaggcatcgacctgggggaggagcagcatccattgggtacccccactcccggaagaaaaagacgtcgcaagggcggagattcggactatgatgatgacgatgatgatgactcggacgatcagggggatgaagacgacgaagacgaggaagataaggaggacaaaaaaggtaagaaaacagatatctgtgaggacgaggacgaaggcgaccaagccgcttcagtcgaagagctggagaagcaaatagagaaattgtcaaagcaacagagccagtataggagaaaactttttgacgcatctcactctctgagatcagtgatgtttggccaagaccgatacaggagacggtactggattctgccacaatgcggcggtatcttcgtcgaaggcatggaaagtggggagggccttgaagagatcgccaaagagagggagaagctgaagaaggcagagtccgtgcaaataaaggaagagatgttcgaaacctctggagattccctgaactgttctaacaccgatcactgtgagcagaaagaggatcttaaggagaaagataacactaacctgttcctgcagaagcccggaagcttttcaaagttgtcgaagctgctggaggttgccaaaatgcccccagaatccgaagtgatgacacccaaaccaaatgctggcgctaatgggtgcaccctgtcctaccaaaattctggaaaacatagtctgggctccgtgcagtctactgccactcaaagcaatgtggaaaaggccgattcaaacaatctttttaacactggaagcagtggtcccggtaagttctacagcccactgcctaatgatcagctgttgaagaccctcaccgaaaagaacaggcagtggttttccttgctgcctcgcaccccatgtgacgatacctccctgacacacgcggatatgagtactgcttccctggttactcctcagagccaacccccttctaagtctccaagccctaccccagctcctttaggatccagcgcccagaacccggtgggtctgaacccattcgctttgagccccttgcaggtcaaaggaggagtatctatgatggggctgcagttctgtggctggcccaccggggtggttacaagtaacattccatttacctcaagcgtgccctccttgggcagtggcctgggattgagcgaaggcaacggaaacagctttctgacttcaaacgtagcctcgtccaaatccgaatcgcccgtcccccaaaacgaaaaagcaacgagcgcccagccggctgccgtagaggtagctaaaccagtagacttcccctcccccaaacccatcccggaggagatgcagtttggctggtggcgaatcatcgacccggaggatctgaaagcccttcttaaggttctgcacctaagaggcataagggaaaaggccctgcagaaacagattcaaaaacacctggattacatcactcaggcatgcctgaaaaacaaggatgtcgccattattgaacttaacgagaatgaagagaaccaggtgacacgtgacatagtcgagaattggagcgtcgaagaacaggctatggaaatggacctcagtgttctgcagcaggtagaagaccttgaacgtcgtgtcgcttctgcctcactgcaagtgaaagggtggatgtgtccagagcccgcatccgagcgggaggatcttgtctattttgagcataagtccttcactaagttgtgcaaagagcacgatggagagttcacaggcgaagacgaatccagcgctcacgcactggagaggaaatcagataatcctcttgacatcgctgtgacgaggctggctgacctggagcgcaatatcgaaaggagaattgaagaagatattgccccaggcctgagggtgtggagacgggcactgtctgaggccagaagtgcagcacaagtggcactgtgcatccaacagctgcagaagagcatcgcctgggagaagtctattatgaaggtgtattgtcaaatctgtagaaagggcgataacgaggagctcctcctgttgtgtgacggctgcgacaaaggttgtcacacgtattgccaccgccctaaaattaccaccattcctgacggcgactggttctgccctgcttgcattgccaaagcatccgggcagaccctgaaaatcaagaaactgcacgtgaagggcaagaagaccaatgagtcaaagaaggggaagaaagtcacacttaccggagatactgaagatgaggacagtgcctccacaagttcctcccttaagcgtggaaataaagacctaaagaagcgaaaaatggaggagaatacctccattaatctctctaagcaggaaagtttcacttccgttaaaaagcccaagagagacgatagtaaggaccttgcattatgttcaatgattctcacggaaatggagactcatgaggacgcgtggccatttttgttgccggtaaacctcaaactggttccaggctataaaaaagtaattaagaagcccatggactttagtacaatacgcgagaagttaagttcaggtcaatatcctaacctggaaacttttgccctcgatgtgagactggtgtttgacaactgtgagacctttaacgaagacgactcggacatcggacgtgcaggccataacatgcggaaatactttgaaaaaaagtggaccgacacctttaaagtctccta

SEQ ID NO: 108599 - DNA, 6398 bp, Artificial Sequence
  derived and/or modified sequence
atggaaagtggtgaaagacttccctcctctgcagcctccagtaccacccccacaagtagcagcacaccatcagttgcgtctgtggtgtccaaagggggattgtccactggggttgcatccctgagtagtacaattaacccttgcgggcatctttttcgcaccgccggagatcagccattcaacctgtcaaccgtatcttcagctttcccaatggtctctcacccagtttttgggctgcacagcgcctcctcgggtcacagtgaatttgggggactgggtacgctgggcacccccactgccctcgctgcccatccccagctggcttcctttcccgagtggtggcggactacagatgctcacaccaggaccggcgcaacttttttcccgccactgctcggcattcccccactgttcgcccctcctgcccagaatcatgattcttcctcctttcactctcgaaccagtggaaaatctaatcgcaatgggcctgaaaagggagtcaatggtagtatcaacggcagtaatacatctagtgttatcggaataaacacgtcagtgttgtctaccaccgcctcctctagcatggggcagaccaagtctacctcatcaggagggggaaatcggaaatgtaatcaggaacagtcaaaaaaccagcctcttgacgctagggtggataagattaaggacaaaaagcctaggaagaaggctatggagagctctagcaactcagactcagattccggcaccagttccgataccagcagcgaaggaatctcatcaagcgactccgacgatctagaggaggatgaggaagaggaggatcaaagcattgaggagtctgaagatgatgactccgactccgagagtgaggcgcaacataaaagtaataaccaagtgcttttgcacggcatctccgacccaaaggcggacgggcaaaaggccaccgagaaagcccaggagaaaaggatacatcagccccttcccctcgcctccgagtcccagacgcattcgtttcagagtcagcagaagcagcctcaggtgttgtcccaacagcttcctttcatctttcaaagtagtcaagccaaggaggaatcagtgaataaacataccagcgtgatacaaagcacaggcctcgtcagcaatgtaaaacccttgtcactggttaatcaggccaagaaggaaacctacatgaagcttattgtgccttcccccgatgttctgaaggcaggcaataagaatacctccgaggaatcctctttgctgacttcagagctgcgcagcaaaagggaacaatataagcaggccttcccctcacagctgaagaagcaggaaagctcaaagagtcttaagaaagtgattgctgcgctgtctaaccccaaggccacttcatcttcacctgcccacccaaagcaaaccctggagaataatcatcccaatccgtttttaaccaacgcccttctcggcaaccaccagccaaatggtgtaattcagtccgtgattcaggaggcccctctggccctgacgacgaagacaaagatgcagagcaaaatcaacgagaacattgctgcagcctcttcaacacccttcagctctcctgttaatctgtcgacatccggacggagaactccgggaaatcagacacctgttatgccatcggcttcccccatcttacatagtcagggaaaggaaaaggccgtttccaataacgttaacccagttaagacacagcaccattcgcaccccgcaaagtctctggttgagcagtttcggggtacagattcagacattccctcttcgaaagacagtgaggacagcaatgaggatgaggaagaagacgacgaagaagaagacgaagaagatgacgaggacgacgagagcgatgattcccagagcgagtccgactctaactcagagtccgacacagaggggagtgaagaagaagacgacgatgacaaagatcaggatgagtcagacagcgatactgagggcgaaaaaacctcaatgaaactaaataagactacctcttcagtgaagtccccttcaatgtcactgaccggccacagcacacccagaaatttgcacatcgccaaggcaccaggctccgctccagcggctctctgcagcgagagtcaaagtccagcatttctagggacatcttcttcaactcttacatcttcaccacactccggcacctctaagcgccgtcgcgtgactgatgaacgcgagttacggattcccttggagtatggttggcaaagggaaacaaggatacgtaatttcggcggacgactgcagggagaggtggcctactacgccccatgcggtaagaaactgagacagtatccagaagttataaagggtatgcagtggtgcctcctgaaggaggaggacgtcatacccaggattagagctatggagggtagacggggaaggcccccaaaccccgataggcagagagcaagggaagagtcccggatgcgcaggagaaagggcaggccccctaatgtggggaacgccgaattcctggataacgctgacgcaaaactactccgaaaactacaggcgcaggagattgctcggcaggcagcccaaattaagctcttgcgaaaattacaaaagcaggagcaggctagggttgcaaaggaggcaaaaaagcagcaggccattatggctgccgaagagaagcggaagcaaaaggagcagatcaaaataatgaagcagcaagagaagattaaacgcatacagcagatccgtatggagaaagagctgcgcgctcagcagattttagaagcaaaaaagaagaagaaggaggaagcagcgaatgccaaactgcttgaagcagaaaaacggatcaaggaaaaggagatgcgcaggcagcaggccgtcctgctgaagcaccaggagcgcgaacgccgtcgccagcatatgatgttaatgaaggctatggaagcgcgtaaaaaggcggaagagaaagaacgcctgaaacaggagaaacgggatgaaaagcgtttaaacaaggagcggaaacttgagcaacggagactggagctggaaatggccaaagagctgaaaaagccgaatgaagatatgtgtctcgccgatcagaagccgctccccgaactaccgaggattccaggcctggtgctttctgggtcaactttctccgattgcctgatggtggttcagttcctgaggaactttggaaaggtcctgggctttgatgtcaacatcgatgtgcccaaccttagtgttctgcaggaaggtctcctgaatatcggagattctatgggcgaggtgcaagacctcctggtccgcttactgtcagctgcggtgtgcgatcccggattgatcaccggatacaaggccaaaaccgcactgggcgaacacctgcttaacgttggggtgaatcgagataatgtcagtgagatccttcagatcttcatggaagcccattgtggccagactgaactgaccgaaagcctgaaaacaaaggcctttcaggcacacacccccgctcagaaggctagcgttctggcctttcttatcaatgagctagcgtgcagtaaatccgtcgtctccgagatcgataagaacattgactacatgagcaacttgagacgggataaatgggtcgtggagggcaaactgcgtaaactgagaattatccacgctaagaagacaggaaaaagggatacctctgggggtattgatcttggggaagagcagcacccacttgggacaccaacacccggacgcaagaggcgcaggaagggcggtgactcagactacgatgatgacgacgatgacgatagcgatgaccagggagacgaagacgatgaagacgaggaagataaggaagataagaaaggtaagaaaactgatatttgtgaagacgaagatgagggtgatcaggccgctagtgttgaggagttagaaaagcagatcgaaaagctgagcaagcagcaaagtcagtacaggcgtaagctgttcgatgctagccattccctgaggagcgtcatgttcggtcaagacagatatagaaggcgatactggatcctgccacagtgtggcggaatttttgttgagggaatggaatccggagagggactcgaagagatcgcaaaagagcgcgaaaagttgaaaaaagccgagagtgtgcaaatcaaggaagaaatgttcgagacctcaggtgatagtctgaactgctcaaacactgaccactgtgaacagaaagaagatctgaaagaaaaagacaacacaaacctttttcttcagaagcctgggtccttctcaaagctctctaaactgctcgaggtggctaaaatgccaccagagagtgaagtgatgaccccaaagccaaacgctggagccaatggatgcaccctgtcctaccagaattctggaaagcactccctcggctctgtgcagtcgacagccactcagtcaaacgttgagaaggcagattccaataacctctttaacaccggctctagcggcccagggaaattctactcacccttaccaaacgatcagctgcttaagacccttacagagaagaaccggcagtggttcagcctgttgcccagaacaccatgcgatgataccagtctgactcacgcggatatgagtacagcgagcctggtgacacctcagtcccagccaccatcaaaaagcccctcgccgaccccagcccctctggggtccagcgcccagaatccagtgggtcttaaccccttcgccctctctcccctccaggtgaagggaggtgttagcatgatgggattacaattttgcgggtggcctacaggggttgtcacttcaaatatcccatttacctcaagtgttccgagcctgggttcaggcttgggtctcagtgagggaaacggtaattctttcctgacctcaaatgtggcaagctccaagtctgaatccccagtgccccaaaacgaaaaggccacatccgcacagcccgctgccgttgaggtggccaagccagtcgatttcccaagccctaaaccaattccagaggagatgcagtttggatggtggcgaattatcgacccagaggacctgaaggccctgctgaaagtcctacacctgcgcggtatccgagagaaggccctgcagaaacaaattcagaaacacctggactatatcactcaggcctgccttaagaacaaagatgtagcgataatcgaattgaatgaaaacgaagaaaatcaagtgactagggacattgtggagaactggtctgtggaggaacaggcaatggagatggacctttctgttctccaacaggtggaagatcttgagcgtcgggtggctagcgccagcctccaagtgaaggggtggatgtgccctgagcctgcttcagaacgcgaggatctggtgtatttcgagcacaaatcttttacgaaactgtgcaaagaacatgacggagaatttactggggaggacgagagttccgctcacgccctcgagaggaaatccgataacccactggacatagctgtgaccagactcgcagatctggagcggaacatcgaaaggagaatagaggaggatatcgctcccggactgcgggtttggagaagagcattgagtgaggcacgttctgcagctcaggttgctctgtgcattcagcagctgcagaagtccatcgcgtgggaaaagagcatcatgaaagtctactgccagatctgtagaaaaggcgataacgaagagctgctcctgttgtgtgacggttgtgataaggggtgccacacctactgccatcgacctaagatcacgacgatccctgatggcgactggttttgccctgcctgtatcgctaaagccagcggccagacactcaagataaagaagctgcacgtcaaaggcaagaaaacaaacgaatctaaaaagggaaaaaaagtgacactgactggcgataccgaagacgaggacagtgcaagtacctccagctcgctcaaacgcggaaataaagatctcaagaagcgtaaaatggaggaaaatacctcgatcaatctcagtaagcaagaatcatttacctctgtaaagaaacccaagcgcgacgatagcaaggatctggccctgtgttccatgatcctaactgagatggagacacacgaggacgcttggccatttcttctgcctgtaaaccttaagttagttccagggtataagaaggtgattaaaaaacccatggattttagtactattcgcgagaagctgtcatccggtcagtaccccaatctcgagacattcgcactagatgtgcggttggttttcgataattgcgaaactttcaatgaggatgatagtgatatcggtagagccggtcataatatgagaaaatactttgagaaaaaatggaccgacactttcaaggtgtccta

SEQ ID NO: 108600 - DNA, 8043 bp, Artificial Sequence
  derived and/or modified sequence
acttggttcatgaagccttcgcctagaagtgaagctgctgaacaaaccttgagaagaatcatctcctgcttcaatctgctgctggataggaactaatcagagagagagaggcggaagacggagaaggagggagtcgaaggctttcccgatcacaaatctcacctccactacaactctctttatacttttcttgcagaaataataatagaaataaggaggtggtggggtttccaaaaatcttaaccttcaaccatctggggaaaaggcaaaaatcccatctaccgcaactctcagttcgagagtaaaggtttcccaacagtgatgtcacaagattgaccacattgatcacaatatggagtctggagaacggttaccatcctcagcagcctcctctactacaccaacttcatcttcgacaccttctgtggcttcagtagtttcaaaaggtggcctttccactggagttgcttcacttagctctacaatcaacccatgtggacatttattcagaacagctggggatcaaccgtttaacctgtccacagtgtcgagtgccttcccaatggtcagccacccagtctttggtctacattcagccagctcagggcattcagaatttggtggtttggggacacttggtacacccacagccttagccgcacatccccaactagcatcttttccaggtgcagaatggtggcgaacaactgatgctcatactcgtacaggagcaaccttctttccaccattactgggaattccaccactatttgctcccccagcccagaatcatgattcttcttcattccattcaaggacttcgggaaaaagtaatcgaaatggtcccgaaaaaggtgtaaatgggtcaataaatggaagtaatacatcatctgtaattggtatcaacacatctgtactatccactactgcttcaagttccatgggacaaactaaaagtacaagctcaggtggaggaaatcgaaaatgtaatcaggaacaaagcaaaaaccagcctttggatgctagagttgacaaaatcaaagataagaaaccaaggaagaaagcaatggaaagttctagcaacagtgatagtgattcaggcacatcatcagacacctcaagtgaaggcattagtagcagtgattcagatgatctagaagaagatgaagaagaagaagatcaaagtattgaagaaagtgaagatgatgattctgattcagagagtgaagcacaacataaaagtaacaaccaggtgctattacatggtatttcagacccaaaagcagatggacagaaagcaactgaaaaagcccaggaaaaaagaatacaccagccattacctcttgcgtctgaatcccagactcactcattccaatcccagcagaagcagcctcaggttttgtcacagcagcttccatttattttccaaagctctcaggcaaaggaggaatctgtgaacaaacacaccagtgtaatacagtctacgggattggtgtccaatgtgaaacctttatctttggtaaatcaagccaaaaaggaaacttacatgaaactcatagttccttctcctgatgttcttaaagcagggaataaaaatacctctgaagaatctagtttattgaccagtgaattgagatccaaacgggaacaatataaacaggcattcccatcacagttaaagaaacaagagtcatcgaagagcctgaagaaggttattgcagctttgtcaaatccaaaagcaacctctagttcaccagcacatccaaaacaaacattagaaaacaaccacccaaatccattcttgacaaatgcacttttaggtaatcaccaaccaaatggagttattcaaagtgtcattcaagaagctcctctagcacttactaccaaaactaaaatgcagagcaagattaatgaaaacattgctgctgcaagtagcacccctttttcctcacctgtaaatctgagtacaagtgggagaagaacccctggcaatcagacacctgtaatgccctctgcctctcccatcctgcatagtcaagggaaggaaaaagcagttagcaataatgtaaacccagtaaaaacacagcatcactcccatcctgcaaaatctttagtggaacaattcagaggaacagattcagacattcccagtagtaaagattctgaagattcaaatgaggatgaagaggaagatgatgaagaagaagatgaggaagatgatgaagatgatgaatctgatgacagccaatcagaatcagatagtaattcagaatcagatacagaaggatcagaagaagaagatgatgatgataaagaccaagatgaatcagatagtgatactgaaggagagaaaacttcaatgaaactgaataaaacaacttcctctgtcaaaagcccttccatgagtctcacaggtcactcaacacctcgtaacctccacatagcaaaagccccaggctctgctcctgctgccttatgttctgaatcccagtcacctgcttttcttggtacatcttcttccacacttacttcaagcccacactctggcacttccaaaagaagaagagtaacagatgaacgtgaactgcgtattccattggaatatggctggcagagagagacaagaataagaaactttggagggcgccttcaaggagaagtagcatattatgctccatgtggaaagaaacttaggcagtaccctgaagtaataaagggaatgcagtggtgtcttttgaaagaagaggatgtcattcctcgtatcagggcaatggaaggtcgtagaggaagaccaccaaatccagatagacaacgagcaagagaggaatccaggatgagacgtcggaaaggtcgacctccaaatgttggcaatgctgaattcctagataacgcagatgcaaagttgctaagaaaactgcaagctcaagaaatagccaggcaagcagcacaaataaagcttttgagaaaacttcaaaagcaggaacaggctcgggttgctaaagaagccaaaaaacaacaagcaataatggctgctgaggagaagcggaagcaaaaagaacagataaagattatgaaacagcaggaaaaaattaagagaatacagcaaatcagaatggaaaaagaacttcgagctcagcaaattctagaggctaaaaagaaaaagaaggaagaagcggcaaatgccaaattattggaggccgagaaacgaataaaggaaaaagaaatgagaagacaacaagctgttcttctgaaacatcaggaacgagagcgaaggcgacaacacatgatgcttatgaaagctatggaagctcgtaaaaaagcagaagaaaaagagcggttgaaacaagaaaaacgtgatgagaaaagattaaataaagagcgtaaactagagcagcgaagattagaattagaaatggcaaaggaactaaagaagcctaatgaagacatgtgcttagcagaccaaaagcctttgccagagttgcctcgtattccaggacttgttctctctggaagtacattttcagactgtctcatggtggtgcagttcttacgaaactttggtaaagttttgggctttgatgtgaatattgatgttccaaacctgagtgttcttcaagagggattgctaaatataggggacagcatgggtgaagtacaagacttgcttgtgaggctcctctcagctgctgtatgtgatccaggtctaataacaggatacaaggctaaaacagctcttggagaacatttgctgaatgttggtgtgaatcgagacaatgtttccgagattttacagatatttatggaagcccactgtggacaaactgagcttactgaaagtctgaagaccaaagcttttcaggctcacactccagcacagaaagcttcagtcctggctttcctgatcaatgaactggcatgcagcaagagtgtggtcagtgaaatcgacaagaacattgattatatgtcaaacttgaggagagataaatgggtggtagaaggtaaactccgcaagctcagaatcattcatgctaagaaaacaggcaaaagagacacttcaggtggcattgatctgggagaagagcagcatcccttgggcacacccactccaggacgcaagcgaagaaggaagggaggagacagtgattatgacgatgatgatgacgatgacagtgatgaccaaggggatgaagatgatgaggatgaagaagataaagaagacaaaaaaggaaaaaagactgatatctgtgaagatgaggatgaaggtgaccaagcagcaagtgttgaagagctggaaaaacagattgaaaaactgagtaaacaacagagtcagtacagaaggaagctctttgatgcgtctcactcattgcgttcagtgatgtttggccaagatcgttacagacgccggtactggattcttccccaatgtggggggatttttgtagaaggcatggagagtggtgaaggactagaagaaattgcaaaagaaagagaaaaactgaaaaaggcagaaagtgtccagatcaaagaagaaatgtttgagacttctggggacagtttaaattgttcaaatacagatcactgtgaacaaaaggaagatcttaaagaaaaagataacacaaatctattccttcagaaacctggctctttttccaaattaagcaagcttttggaagtagctaagatgcctcctgagtcagaggttatgacccccaaaccaaatgctggtgcaaatgggtgcacgttgtcttatcagaacagtggaaaacattcactgggcagcgttcagtcaacagcaacgcaaagcaatgtggaaaaggcagactctaataatctgtttaatactggttcaagtggtccagggaagttctacagtcctctccccaatgaccagttactaaaaacgctgactgaaaagaatagacaatggtttagtcttttgccacgaacaccctgtgatgacacttcacttactcatgccgatatgtcaactgcttctttggtgactcctcagtctcagccaccatctaagtcaccttcacctaccccagctcctcttggatcttctgctcagaatcctgttggcttaaatccatttgctttatcacctcttcaggtgaaaggtggagtatctatgatgggacttcagttttgtggatggcccactggtgtggttacttctaatattccatttacatcatctgtacctagtctaggatcggggttagggttatcagaaggaaatggtaattcattcttgacttccaatgttgcttcaagtaaaagtgaatctccagtaccacagaatgaaaaggccacttcagctcaacctgcagctgttgaagtagcaaaaccagtagattttcctagtccaaaacctattccagaagaaatgcagtttggttggtggagaattattgacccagaggacctaaaagctttgctcaaagtgctgcatctcagaggaataagagaaaaggcattacaaaaacaaattcagaaacatttggattatattactcaagcctgcctcaagaataaggatgttgctattattgaactgaatgaaaatgaagaaaaccaagtaactcgagatattgtggagaactggtcagtagaagaacaagcaatggaaatggatttgagtgtccttcaacaggtagaagatctagaaaggagagttgcatcagcaagtttgcaagtgaagggttggatgtgtccagagcctgcatcagaaagggaggacttggtatattttgaacataaatcatttactaaattgtgcaaggagcatgatggagaatttactggcgaagacgaaagcagtgcacatgcactagaacggaagagtgacaaccccctagatatagctgtaaccaggctggctgatttggagcggaacattgaaagaagaattgaagaggatattgctccagggctcagggtatggagaagggcattatcagaagctcgcagtgctgcacaggtagctctgtgcattcagcaattacagaaatcaatagcatgggaaaaatcaattatgaaagtttactgccaaatctgtcgaaagggagataatgaagaactgcttcttctttgtgatggctgtgacaaaggctgtcatacctactgccatagacccaagattacaacaatcccagatggagactggttttgtccagcttgcattgctaaggcaagtggtcaaactctaaaaatcaaaaaacttcatgtcaaaggaaaaaagactaatgagtcaaagaaaggcaagaaggtaactttaacaggagatactgaagatgaagactctgcatctacaagtagttcactaaaaagaggaaacaaagacctcaagaaaagaaaaatggaggaaaacacttctattaacttgtcaaaacaagaaagttttacttcagttaagaaacctaaaagagatgactccaaggacctagctctttgcagtatgattctgactgaaatggaaactcatgaggatgcatggccttttctacttcctgtaaacttgaaacttgttcctggttataagaaagttattaagaagcctatggatttttccacaattagagagaaactaagtagtggacagtatccaaaccttgaaacctttgctctagatgtcaggcttgtttttgacaactgtgaaacatttaatgaagatgattctgatataggcagagctggccacaatatgaggaagtattttgaaaaaaagtggacagatactttcaaagtgagctgaagttataataatctctttatttttttccttctaaacaaggacaaatgagaccagcaatgtgaactgtatttacataaacgtgcaaggcacatacataatgactttctttttccttaagtataaaaaaaaagtatcagaagaatgataccatttttaaaggcttcattcctacaacaaccaaggccctcggttattggtttgtgtgatttatcagctaatttaggtagaacagggaagcacacccaaagaattttcaaaggaaagggtgttatagtgcaatagcaattaaaatatatcaaatcgcactgaatactcaacaccagagctctaatgtgggaaatggttctcctttccctctcaataaatatctatttttcatttttttactttgtagtttattttttagtgaatgtatttaattttatgaattatttatgattaaaccacatccagaatcttcgttttctgtgaaaaggaagaactagaaaattgctttaaatcttgaaaatacaaggaatgttttaaaatataaaacaaagccaagttaaactgtttacactgatgtgctataaaagcaccaaaaagaaactttactgtagagttacaagtacatttatatatatatgttgctgcatcacttgtgtagttaaattgtatttcaaaacagtgaaaaaattgacatgtatatactgttcattcttgtttatattaagtcttgttttaaatatgtattatgtgtatatattgtttgcagacattattgttcatgccttagaggattgtagcattttattttcgtctgaaggtaatgatagctatacagtctgtacagtaattatcctctaccaacactgtggcgtctccttaatcttggtagtgcctgcctttgaaacagggtgtaggggatattagttttccatttttctattttgttatataattttaagccaccagggcctaaattaaagtataatcatttgtatccatgtggaataaaattgtgacaatttcctacgcacacagtattttttcatagaaacatttccctcccatttgccttgcctcagaaataaatttaaaagacgtttgtaaccactgtgttttatctactgtgtgttgtggtggcctgttggaggcaaatagatcagattttttttgtacctacgtaagagtacttgaagttttatttaaaataaaatgttgtggaaaaggtagcattctttttttaggagtgttatttttcactatgtgtggcacggatacaataaaagacttttacaaactaa

SEQ ID NO: 108601 - DNA, 8058 bp, Artificial Sequence
  derived and/or modified sequence
gaagccttgttggttgacgtcacttggttcatgaagccttcgcctagaagtgaagctgctgaacaaaccttgagaagaatcatctcctgcttcaatctgctgctggataggaactaatcagagagagagaggcggaagacggagaaggagggagtcgaaggctttcccgatcacaaatctcacctccactacaactctctttatacttttcttgcagaaataataatagaaataaggaggtggtggggtttccaaaaatcttaaccttcaaccatctggggaaaaggcaaaaatcccatctaccgcaactctcagttcgagagtaaaggtttcccaacagtgatgtcacaagattgaccacattgatcacaatatggagtctggagaacggttaccatcctcagcagcctcctctactacaccaacttcatcttcgacaccttctgtggcttcagtagtttcaaaaggtggcctttccactggagttgcttcacttagctctacaatcaacccatgtggacatttattcagaacagctggggatcaaccgtttaacctgtccacagtgtcgagtgccttcccaatggtcagccacccagtctttggtctacattcagccagctcagggcattcagaatttggtggtttggggacacttggtacacccacagccttagccgcacatccccaactagcatcttttccagaatggtggcgaacaactgatgctcatactcgtacaggagcaaccttctttccaccattactgggaattccaccactatttgctcccccagcccagaatcatgattcttcttcattccattcaaggacttcgggaaaaagtaatcgaaatggtcccgaaaaaggtgtaaatgggtcaataaatggaagtaatacatcatctgtaattggtatcaacacatctgtactatccactactgcttcaagttccatgggacaaactaaaagtacaagctcaggtggaggaaatcgaaaatgtaatcaggaacaaagcaaaaaccagcctttggatgctagagttgacaaaatcaaagataagaaaccaaggaagaaagcaatggaaagttctagcaacagtgatagtgattcaggcacatcatcagacacctcaagtgaaggcattagtagcagtgattcagatgatctagaagaagatgaagaagaagaagatcaaagtattgaagaaagtgaagatgatgattctgattcagagagtgaagcacaacataaaagtaacaaccaggtgctattacatggtatttcagacccaaaagcagatggacagaaagcaactgaaaaagcccaggaaaaaagaatacaccagccattacctcttgcgtctgaatcccagactcactcattccaatcccagcagaagcagcctcaggttttgtcacagcagcttccatttattttccaaagctctcaggcaaaggaggaatctgtgaacaaacacaccagtgtaatacagtctacgggattggtgtccaatgtgaaacctttatctttggtaaatcaagccaaaaaggaaacttacatgaaactcatagttccttctcctgatgttcttaaagcagggaataaaaatacctctgaagaatctagtttattgaccagtgaattgagatccaaacgggaacaatataaacaggcattcccatcacagttaaagaaacaagagtcatcgaagagcctgaagaaggttattgcagctttgtcaaatccaaaagcaacctctagttcaccagcacatccaaaacaaacattagaaaacaaccacccaaatccattcttgacaaatgcacttttaggtaatcaccaaccaaatggagttattcaaagtgtcattcaagaagctcctctagcacttactaccaaaactaaaatgcagagcaagattaatgaaaacattgctgctgcaagtagcacccctttttcctcacctgtaaatctgagtacaagtgggagaagaacccctggcaatcagacacctgtaatgccctctgcctctcccatcctgcatagtcaagggaaggaaaaagcagttagcaataatgtaaacccagtaaaaacacagcatcactcccatcctgcaaaatctttagtggaacaattcagaggaacagattcagacattcccagtagtaaagattctgaagattcaaatgaggatgaagaggaagatgatgaagaagaagatgaggaagatgatgaagatgatgaatctgatgacagccaatcagaatcagatagtaattcagaatcagatacagaaggatcagaagaagaagatgatgatgataaagaccaagatgaatcagatagtgatactgaaggagagaaaacttcaatgaaactgaataaaacaacttcctctgtcaaaagcccttccatgagtctcacaggtcactcaacacctcgtaacctccacatagcaaaagccccaggctctgctcctgctgccttatgttctgaatcccagtcacctgcttttcttggtacatcttcttccacacttacttcaagcccacactctggcacttccaaaagaagaagagtaacagatgaacgtgaactgcgtattccattggaatatggctggcagagagagacaagaataagaaactttggagggcgccttcaaggagaagtagcatattatgctccatgtggaaagaaacttaggcagtaccctgaagtaataaagggaatgcagtggtgtcttttgaaagaagaggatgtcattcctcgtatcagggcaatggaaggtcgtagaggaagaccaccaaatccagatagacaacgagcaagagaggaatccaggatgagacgtcggaaaggtcgacctccaaatgttggcaatgctgaattcctagataacgcagatgcaaagttgctaagaaaactgcaagctcaagaaatagccaggcaagcagcacaaataaagcttttgagaaaacttcaaaagcaggaacaggctcgggttgctaaagaagccaaaaaacaacaagcaataatggctgctgaggagaagcggaagcaaaaagaacagataaagattatgaaacagcaggaaaaaattaagagaatacagcaaatcagaatggaaaaagaacttcgagctcagcaaattctagaggctaaaaagaaaaagaaggaagaagcggcaaatgccaaattattggaggccgagaaacgaataaaggaaaaagaaatgagaagacaacaagctgttcttctgaaacatcaggaacgagagcgaaggcgacaacacatgatgcttatgaaagctatggaagctcgtaaaaaagcagaagaaaaagagcggttgaaacaagaaaaacgtgatgagaaaagattaaataaagagcgtaaactagagcagcgaagattagaattagaaatggcaaaggaactaaagaagcctaatgaagacatgtgcttagcagaccaaaagcctttgccagagttgcctcgtattccaggacttgttctctctggaagtacattttcagactgtctcatggtggtgcagttcttacgaaactttggtaaagttttgggctttgatgtgaatattgatgttccaaacctgagtgttcttcaagagggattgctaaatataggggacagcatgggtgaagtacaagacttgcttgtgaggctcctctcagctgctgtatgtgatccaggtctaataacaggatacaaggctaaaacagctcttggagaacatttgctgaatgttggtgtgaatcgagacaatgtttccgagattttacagatatttatggaagcccactgtggacaaactgagcttactgaaagtctgaagaccaaagcttttcaggctcacactccagcacagaaagcttcagtcctggctttcctgatcaatgaactggcatgcagcaagagtgtggtcagtgaaatcgacaagaacattgattatatgtcaaacttgaggagagataaatgggtggtagaaggtaaactccgcaagctcagaatcattcatgctaagaaaacaggcaaaagagacacttcaggtggcattgatctgggagaagagcagcatcccttgggcacacccactccaggacgcaagcgaagaaggaagggaggagacagtgattatgacgatgatgatgacgatgacagtgatgaccaaggggatgaagatgatgaggatgaagaagataaagaagacaaaaaaggaaaaaagactgatatctgtgaagatgaggatgaaggtgaccaagcagcaagtgttgaagagctggaaaaacagattgaaaaactgagtaaacaacagagtcagtacagaaggaagctctttgatgcgtctcactcattgcgttcagtgatgtttggccaagatcgttacagacgccggtactggattcttccccaatgtggggggatttttgtagaaggcatggagagtggtgaaggactagaagaaattgcaaaagaaagagaaaaactgaaaaaggcagaaagtgtccagatcaaagaagaaatgtttgagacttctggggacagtttaaattgttcaaatacagatcactgtgaacaaaaggaagatcttaaagaaaaagataacacaaatctattccttcagaaacctggctctttttccaaattaagcaagcttttggaagtagctaagatgcctcctgagtcagaggttatgacccccaaaccaaatgctggtgcaaatgggtgcacgttgtcttatcagaacagtggaaaacattcactgggcagcgttcagtcaacagcaacgcaaagcaatgtggaaaaggcagactctaataatctgtttaatactggttcaagtggtccagggaagttctacagtcctctccccaatgaccagttactaaaaacgctgactgaaaagaatagacaatggtttagtcttttgccacgaacaccctgtgatgacacttcacttactcatgccgatatgtcaactgcttctttggtgactcctcagtctcagccaccatctaagtcaccttcacctaccccagctcctcttggatcttctgctcagaatcctgttggcttaaatccatttgctttatcacctcttcaggtgaaaggtggagtatctatgatgggacttcagttttgtggatggcccactggtgtggttacttctaatattccatttacatcatctgtacctagtctaggatcggggttagggttatcagaaggaaatggtaattcattcttgacttccaatgttgcttcaagtaaaagtgaatctccagtaccacagaatgaaaaggccacttcagctcaacctgcagctgttgaagtagcaaaaccagtagattttcctagtccaaaacctattccagaagaaatgcagtttggttggtggagaattattgacccagaggacctaaaagctttgctcaaagtgctgcatctcagaggaataagagaaaaggcattacaaaaacaaattcagaaacatttggattatattactcaagcctgcctcaagaataaggatgttgctattattgaactgaatgaaaatgaagaaaaccaagtaactcgagatattgtggagaactggtcagtagaagaacaagcaatggaaatggatttgagtgtccttcaacaggtagaagatctagaaaggagagttgcatcagcaagtttgcaagtgaagggttggatgtgtccagagcctgcatcagaaagggaggacttggtatattttgaacataaatcatttactaaattgtgcaaggagcatgatggagaatttactggcgaagacgaaagcagtgcacatgcactagaacggaagagtgacaaccccctagatatagctgtaaccaggctggctgatttggagcggaacattgaaagaagaattgaagaggatattgctccagggctcagggtatggagaagggcattatcagaagctcgcagtgctgcacaggtagctctgtgcattcagcaattacagaaatcaatagcatgggaaaaatcaattatgaaagtttactgccaaatctgtcgaaagggagataatgaagaactgcttcttctttgtgatggctgtgacaaaggctgtcatacctactgccatagacccaagattacaacaatcccagatggagactggttttgtccagcttgcattgctaaggcaagtggtcaaactctaaaaatcaaaaaacttcatgtcaaaggaaaaaagactaatgagtcaaagaaaggcaagaaggtaactttaacaggagatactgaagatgaagactctgcatctacaagtagttcactaaaaagaggaaacaaagacctcaagaaaagaaaaatggaggaaaacacttctattaacttgtcaaaacaagaaagttttacttcagttaagaaacctaaaagagatgactccaaggacctagctctttgcagtatgattctgactgaaatggaaactcatgaggatgcatggccttttctacttcctgtaaacttgaaacttgttcctggttataagaaagttattaagaagcctatggatttttccacaattagagagaaactaagtagtggacagtatccaaaccttgaaacctttgctctagatgtcaggcttgtttttgacaactgtgaaacatttaatgaagatgattctgatataggcagagctggccacaatatgaggaagtattttgaaaaaaagtggacagatactttcaaagtgagctgaagttataataatctctttatttttttccttctaaacaaggacaaatgagaccagcaatgtgaactgtatttacataaacgtgcaaggcacatacataatgactttctttttccttaagtataaaaaaaaagtatcagaagaatgataccatttttaaaggcttcattcctacaacaaccaaggccctcggttattggtttgtgtgatttatcagctaatttaggtagaacagggaagcacacccaaagaattttcaaaggaaagggtgttatagtgcaatagcaattaaaatatatcaaatcgcactgaatactcaacaccagagctctaatgtgggaaatggttctcctttccctctcaataaatatctatttttcatttttttactttgtagtttattttttagtgaatgtatttaattttatgaattatttatgattaaaccacatccagaatcttcgttttctgtgaaaaggaagaactagaaaattgctttaaatcttgaaaatacaaggaatgttttaaaatataaaacaaagccaagttaaactgtttacactgatgtgctataaaagcaccaaaaagaaactttactgtagagttacaagtacatttatatatatatgttgctgcatcacttgtgtagttaaattgtatttcaaaacagtgaaaaaattgacatgtatatactgttcattcttgtttatattaagtcttgttttaaatatgtattatgtgtatatattgtttgcagacattattgttcatgccttagaggattgtagcattttattttcgtctgaaggtaatgatagctatacagtctgtacagtaattatcctctaccaacactgtggcgtctccttaatcttggtagtgcctgcctttgaaacagggtgtaggggatattagttttccatttttctattttgttatataattttaagccaccagggcctaaattaaagtataatcatttgtatccatgtggaataaaattgtgacaatttcctacgcacacagtattttttcatagaaacatttccctcccatttgccttgcctcagaaataaatttaaaagacgtttgtaaccactgtgttttatctactgtgtgttgtggtggcctgttggaggcaaatagatcagattttttttgtacctacgtaagagtacttgaagttttatttaaaataaaatgttgtggaaaaggtagcattctttttttaggagtgttatttttcactatgtgtggcacggatacaataaaagacttttacaaactaa

SEQ ID NO: 108602 - DNA, 6405 bp, Artificial Sequence
  derived and/or modified sequence
atggagagcggcgagagactgcccagcagcgccgccagcagcaccacccccaccagcagcagcacccccagcgtggccagcgtggtgagcaagggcggcctgagcaccggcgtggccagcctgagcagcaccatcaacccctgcggccacctgttcagaaccgccggcgaccagcccttcaacctgagcaccgtgagcagcgccttccccatggtgagccaccccgtgttcggcctgcacagcgccagcagcggccacagcgagttcggcggcctgggcaccctgggcacccccaccgccctggccgcccacccccagctggccagcttccccggcgccgagtggtggagaaccaccgacgcccacaccagaaccggcgccaccttcttcccccccctgctgggcatcccccccctgttcgccccccccgcccagaaccacgacagcagcagcttccacagcagaaccagcggcaagagcaacagaaacggccccgagaagggcgtgaacggcagcatcaacggcagcaacaccagcagcgtgatcggcatcaacaccagcgtgctgagcaccaccgccagcagcagcatgggccagaccaagagcaccagcagcggcggcggcaacagaaagtgcaaccaggagcagagcaagaaccagcccctggacgccagagtggacaagatcaaggacaagaagcccagaaagaaggccatggagagcagcagcaacagcgacagcgacagcggcaccagcagcgacaccagcagcgagggcatcagcagcagcgacagcgacgacctggaggaggacgaggaggaggaggaccagagcatcgaggagagcgaggacgacgacagcgacagcgagagcgaggcccagcacaagagcaacaaccaggtgctgctgcacggcatcagcgaccccaaggccgacggccagaaggccaccgagaaggcccaggagaagagaatccaccagcccctgcccctggccagcgagagccagacccacagcttccagagccagcagaagcagccccaggtgctgagccagcagctgcccttcatcttccagagcagccaggccaaggaggagagcgtgaacaagcacaccagcgtgatccagagcaccggcctggtgagcaacgtgaagcccctgagcctggtgaaccaggccaagaaggagacctacatgaagctgatcgtgcccagccccgacgtgctgaaggccggcaacaagaacaccagcgaggagagcagcctgctgaccagcgagctgagaagcaagagagagcagtacaagcaggccttccccagccagctgaagaagcaggagagcagcaagagcctgaagaaggtgatcgccgccctgagcaaccccaaggccaccagcagcagccccgcccaccccaagcagaccctggagaacaaccaccccaaccccttcctgaccaacgccctgctgggcaaccaccagcccaacggcgtgatccagagcgtgatccaggaggcccccctggccctgaccaccaagaccaagatgcagagcaagatcaacgagaacatcgccgccgccagcagcacccccttcagcagccccgtgaacctgagcaccagcggcagaagaacccccggcaaccagacccccgtgatgcccagcgccagccccatcctgcacagccagggcaaggagaaggccgtgagcaacaacgtgaaccccgtgaagacccagcaccacagccaccccgccaagagcctggtggagcagttcagaggcaccgacagcgacatccccagcagcaaggacagcgaggacagcaacgaggacgaggaggaggacgacgaggaggaggacgaggaggacgacgaggacgacgagagcgacgacagccagagcgagagcgacagcaacagcgagagcgacaccgagggcagcgaggaggaggacgacgacgacaaggaccaggacgagagcgacagcgacaccgagggcgagaagaccagcatgaagctgaacaagaccaccagcagcgtgaagagccccagcatgagcctgaccggccacagcacccccagaaacctgcacatcgccaaggcccccggcagcgcccccgccgccctgtgcagcgagagccagagccccgccttcctgggcaccagcagcagcaccctgaccagcagcccccacagcggcaccagcaagagaagaagagtgaccgacgagagagagctgagaatccccctggagtacggctggcagagagagaccagaatcagaaacttcggcggcagactgcagggcgaggtggcctactacgccccctgcggcaagaagctgagacagtaccccgaggtgatcaagggcatgcagtggtgcctgctgaaggaggaggacgtgatccccagaatcagagccatggagggcagaagaggcagaccccccaaccccgacagacagagagccagagaggagagcagaatgagaagaagaaagggcagaccccccaacgtgggcaacgccgagttcctggacaacgccgacgccaagctgctgagaaagctgcaggcccaggagatcgccagacaggccgcccagatcaagctgctgagaaagctgcagaagcaggagcaggccagagtggccaaggaggccaagaagcagcaggccatcatggccgccgaggagaagagaaagcagaaggagcagatcaagatcatgaagcagcaggagaagatcaagagaatccagcagatcagaatggagaaggagctgagagcccagcagatcctggaggccaagaagaagaagaaggaggaggccgccaacgccaagctgctggaggccgagaagagaatcaaggagaaggagatgagaagacagcaggccgtgctgctgaagcaccaggagagagagagaagaagacagcacatgatgctgatgaaggccatggaggccagaaagaaggccgaggagaaggagagactgaagcaggagaagagagacgagaagagactgaacaaggagagaaagctggagcagagaagactggagctggagatggccaaggagctgaagaagcccaacgaggacatgtgcctggccgaccagaagcccctgcccgagctgcccagaatccccggcctggtgctgagcggcagcaccttcagcgactgcctgatggtggtgcagttcctgagaaacttcggcaaggtgctgggcttcgacgtgaacatcgacgtgcccaacctgagcgtgctgcaggagggcctgctgaacatcggcgacagcatgggcgaggtgcaggacctgctggtgagactgctgagcgccgccgtgtgcgaccccggcctgatcaccggctacaaggccaagaccgccctgggcgagcacctgctgaacgtgggcgtgaacagagacaacgtgagcgagatcctgcagatcttcatggaggcccactgcggccagaccgagctgaccgagagcctgaagaccaaggccttccaggcccacacccccgcccagaaggccagcgtgctggccttcctgatcaacgagctggcctgcagcaagagcgtggtgagcgagatcgacaagaacatcgactacatgagcaacctgagaagagacaagtgggtggtggagggcaagctgagaaagctgagaatcatccacgccaagaagaccggcaagagagacaccagcggcggcatcgacctgggcgaggagcagcaccccctgggcacccccacccccggcagaaagagaagaagaaagggcggcgacagcgactacgacgacgacgacgacgacgacagcgacgaccagggcgacgaggacgacgaggacgaggaggacaaggaggacaagaagggcaagaagaccgacatctgcgaggacgaggacgagggcgaccaggccgccagcgtggaggagctggagaagcagatcgagaagctgagcaagcagcagagccagtacagaagaaagctgttcgacgccagccacagcctgagaagcgtgatgttcggccaggacagatacagaagaagatactggatcctgccccagtgcggcggcatcttcgtggagggcatggagagcggcgagggcctggaggagatcgccaaggagagagagaagctgaagaaggccgagagcgtgcagatcaaggaggagatgttcgagaccagcggcgacagcctgaactgcagcaacaccgaccactgcgagcagaaggaggacctgaaggagaaggacaacaccaacctgttcctgcagaagcccggcagcttcagcaagctgagcaagctgctggaggtggccaagatgccccccgagagcgaggtgatgacccccaagcccaacgccggcgccaacggctgcaccctgagctaccagaacagcggcaagcacagcctgggcagcgtgcagagcaccgccacccagagcaacgtggagaaggccgacagcaacaacctgttcaacaccggcagcagcggccccggcaagttctacagccccctgcccaacgaccagctgctgaagaccctgaccgagaagaacagacagtggttcagcctgctgcccagaaccccctgcgacgacaccagcctgacccacgccgacatgagcaccgccagcctggtgaccccccagagccagccccccagcaagagccccagccccacccccgcccccctgggcagcagcgcccagaaccccgtgggcctgaaccccttcgccctgagccccctgcaggtgaagggcggcgtgagcatgatgggcctgcagttctgcggctggcccaccggcgtggtgaccagcaacatccccttcaccagcagcgtgcccagcctgggcagcggcctgggcctgagcgagggcaacggcaacagcttcctgaccagcaacgtggccagcagcaagagcgagagccccgtgccccagaacgagaaggccaccagcgcccagcccgccgccgtggaggtggccaagcccgtggacttccccagccccaagcccatccccgaggagatgcagttcggctggtggagaatcatcgaccccgaggacctgaaggccctgctgaaggtgctgcacctgagaggcatcagagagaaggccctgcagaagcagatccagaagcacctggactacatcacccaggcctgcctgaagaacaaggacgtggccatcatcgagctgaacgagaacgaggagaaccaggtgaccagagacatcgtggagaactggagcgtggaggagcaggccatggagatggacctgagcgtgctgcagcaggtggaggacctggagagaagagtggccagcgccagcctgcaggtgaagggctggatgtgccccgagcccgccagcgagagagaggacctggtgtacttcgagcacaagagcttcaccaagctgtgcaaggagcacgacggcgagttcaccggcgaggacgagagcagcgcccacgccctggagagaaagagcgacaaccccctggacatcgccgtgaccagactggccgacctggagagaaacatcgagagaagaatcgaggaggacatcgcccccggcctgagagtgtggagaagagccctgagcgaggccagaagcgccgcccaggtggccctgtgcatccagcagctgcagaagagcatcgcctgggagaagagcatcatgaaggtgtactgccagatctgcagaaagggcgacaacgaggagctgctgctgctgtgcgacggctgcgacaagggctgccacacctactgccacagacccaagatcaccaccatccccgacggcgactggttctgccccgcctgcatcgccaaggccagcggccagaccctgaagatcaagaagctgcacgtgaagggcaagaagaccaacgagagcaagaagggcaagaaggtgaccctgaccggcgacaccgaggacgaggacagcgccagcaccagcagcagcctgaagagaggcaacaaggacctgaagaagagaaagatggaggagaacaccagcatcaacctgagcaagcaggagagcttcaccagcgtgaagaagcccaagagagacgacagcaaggacctggccctgtgcagcatgatcctgaccgagatggagacccacgaggacgcctggcccttcctgctgcccgtgaacctgaagctggtgcccggctacaagaaggtgatcaagaagcccatggacttcagcaccatcagagagaagctgagcagcggccagtaccccaacctggagaccttcgccctggacgtgagactggtgttcgacaactgcgagaccttcaacgaggacgacagcgacatcggcagagccggccacaacatgagaaagtacttcgagaagaagtggaccgacaccttcaaggtgagctag

SEQ ID NO: 108603 - DNA, 6399 bp, Artificial Sequence
  derived and/or modified sequence
atggagagcggcgagagactgcccagcagcgccgccagcagcaccacccccaccagcagcagcacccccagcgtggccagcgtggtgagcaagggcggcctgagcaccggcgtggccagcctgagcagcaccatcaacccctgcggccacctgttcagaaccgccggcgaccagcccttcaacctgagcaccgtgagcagcgccttccccatggtgagccaccccgtgttcggcctgcacagcgccagcagcggccacagcgagttcggcggcctgggcaccctgggcacccccaccgccctggccgcccacccccagctggccagcttccccgagtggtggagaaccaccgacgcccacaccagaaccggcgccaccttcttcccccccctgctgggcatcccccccctgttcgccccccccgcccagaaccacgacagcagcagcttccacagcagaaccagcggcaagagcaacagaaacggccccgagaagggcgtgaacggcagcatcaacggcagcaacaccagcagcgtgatcggcatcaacaccagcgtgctgagcaccaccgccagcagcagcatgggccagaccaagagcaccagcagcggcggcggcaacagaaagtgcaaccaggagcagagcaagaaccagcccctggacgccagagtggacaagatcaaggacaagaagcccagaaagaaggccatggagagcagcagcaacagcgacagcgacagcggcaccagcagcgacaccagcagcgagggcatcagcagcagcgacagcgacgacctggaggaggacgaggaggaggaggaccagagcatcgaggagagcgaggacgacgacagcgacagcgagagcgaggcccagcacaagagcaacaaccaggtgctgctgcacggcatcagcgaccccaaggccgacggccagaaggccaccgagaaggcccaggagaagagaatccaccagcccctgcccctggccagcgagagccagacccacagcttccagagccagcagaagcagccccaggtgctgagccagcagctgcccttcatcttccagagcagccaggccaaggaggagagcgtgaacaagcacaccagcgtgatccagagcaccggcctggtgagcaacgtgaagcccctgagcctggtgaaccaggccaagaaggagacctacatgaagctgatcgtgcccagccccgacgtgctgaaggccggcaacaagaacaccagcgaggagagcagcctgctgaccagcgagctgagaagcaagagagagcagtacaagcaggccttccccagccagctgaagaagcaggagagcagcaagagcctgaagaaggtgatcgccgccctgagcaaccccaaggccaccagcagcagccccgcccaccccaagcagaccctggagaacaaccaccccaaccccttcctgaccaacgccctgctgggcaaccaccagcccaacggcgtgatccagagcgtgatccaggaggcccccctggccctgaccaccaagaccaagatgcagagcaagatcaacgagaacatcgccgccgccagcagcacccccttcagcagccccgtgaacctgagcaccagcggcagaagaacccccggcaaccagacccccgtgatgcccagcgccagccccatcctgcacagccagggcaaggagaaggccgtgagcaacaacgtgaaccccgtgaagacccagcaccacagccaccccgccaagagcctggtggagcagttcagaggcaccgacagcgacatccccagcagcaaggacagcgaggacagcaacgaggacgaggaggaggacgacgaggaggaggacgaggaggacgacgaggacgacgagagcgacgacagccagagcgagagcgacagcaacagcgagagcgacaccgagggcagcgaggaggaggacgacgacgacaaggaccaggacgagagcgacagcgacaccgagggcgagaagaccagcatgaagctgaacaagaccaccagcagcgtgaagagccccagcatgagcctgaccggccacagcacccccagaaacctgcacatcgccaaggcccccggcagcgcccccgccgccctgtgcagcgagagccagagccccgccttcctgggcaccagcagcagcaccctgaccagcagcccccacagcggcaccagcaagagaagaagagtgaccgacgagagagagctgagaatccccctggagtacggctggcagagagagaccagaatcagaaacttcggcggcagactgcagggcgaggtggcctactacgccccctgcggcaagaagctgagacagtaccccgaggtgatcaagggcatgcagtggtgcctgctgaaggaggaggacgtgatccccagaatcagagccatggagggcagaagaggcagaccccccaaccccgacagacagagagccagagaggagagcagaatgagaagaagaaagggcagaccccccaacgtgggcaacgccgagttcctggacaacgccgacgccaagctgctgagaaagctgcaggcccaggagatcgccagacaggccgcccagatcaagctgctgagaaagctgcagaagcaggagcaggccagagtggccaaggaggccaagaagcagcaggccatcatggccgccgaggagaagagaaagcagaaggagcagatcaagatcatgaagcagcaggagaagatcaagagaatccagcagatcagaatggagaaggagctgagagcccagcagatcctggaggccaagaagaagaagaaggaggaggccgccaacgccaagctgctggaggccgagaagagaatcaaggagaaggagatgagaagacagcaggccgtgctgctgaagcaccaggagagagagagaagaagacagcacatgatgctgatgaaggccatggaggccagaaagaaggccgaggagaaggagagactgaagcaggagaagagagacgagaagagactgaacaaggagagaaagctggagcagagaagactggagctggagatggccaaggagctgaagaagcccaacgaggacatgtgcctggccgaccagaagcccctgcccgagctgcccagaatccccggcctggtgctgagcggcagcaccttcagcgactgcctgatggtggtgcagttcctgagaaacttcggcaaggtgctgggcttcgacgtgaacatcgacgtgcccaacctgagcgtgctgcaggagggcctgctgaacatcggcgacagcatgggcgaggtgcaggacctgctggtgagactgctgagcgccgccgtgtgcgaccccggcctgatcaccggctacaaggccaagaccgccctgggcgagcacctgctgaacgtgggcgtgaacagagacaacgtgagcgagatcctgcagatcttcatggaggcccactgcggccagaccgagctgaccgagagcctgaagaccaaggccttccaggcccacacccccgcccagaaggccagcgtgctggccttcctgatcaacgagctggcctgcagcaagagcgtggtgagcgagatcgacaagaacatcgactacatgagcaacctgagaagagacaagtgggtggtggagggcaagctgagaaagctgagaatcatccacgccaagaagaccggcaagagagacaccagcggcggcatcgacctgggcgaggagcagcaccccctgggcacccccacccccggcagaaagagaagaagaaagggcggcgacagcgactacgacgacgacgacgacgacgacagcgacgaccagggcgacgaggacgacgaggacgaggaggacaaggaggacaagaagggcaagaagaccgacatctgcgaggacgaggacgagggcgaccaggccgccagcgtggaggagctggagaagcagatcgagaagctgagcaagcagcagagccagtacagaagaaagctgttcgacgccagccacagcctgagaagcgtgatgttcggccaggacagatacagaagaagatactggatcctgccccagtgcggcggcatcttcgtggagggcatggagagcggcgagggcctggaggagatcgccaaggagagagagaagctgaagaaggccgagagcgtgcagatcaaggaggagatgttcgagaccagcggcgacagcctgaactgcagcaacaccgaccactgcgagcagaaggaggacctgaaggagaaggacaacaccaacctgttcctgcagaagcccggcagcttcagcaagctgagcaagctgctggaggtggccaagatgccccccgagagcgaggtgatgacccccaagcccaacgccggcgccaacggctgcaccctgagctaccagaacagcggcaagcacagcctgggcagcgtgcagagcaccgccacccagagcaacgtggagaaggccgacagcaacaacctgttcaacaccggcagcagcggccccggcaagttctacagccccctgcccaacgaccagctgctgaagaccctgaccgagaagaacagacagtggttcagcctgctgcccagaaccccctgcgacgacaccagcctgacccacgccgacatgagcaccgccagcctggtgaccccccagagccagccccccagcaagagccccagccccacccccgcccccctgggcagcagcgcccagaaccccgtgggcctgaaccccttcgccctgagccccctgcaggtgaagggcggcgtgagcatgatgggcctgcagttctgcggctggcccaccggcgtggtgaccagcaacatccccttcaccagcagcgtgcccagcctgggcagcggcctgggcctgagcgagggcaacggcaacagcttcctgaccagcaacgtggccagcagcaagagcgagagccccgtgccccagaacgagaaggccaccagcgcccagcccgccgccgtggaggtggccaagcccgtggacttccccagccccaagcccatccccgaggagatgcagttcggctggtggagaatcatcgaccccgaggacctgaaggccctgctgaaggtgctgcacctgagaggcatcagagagaaggccctgcagaagcagatccagaagcacctggactacatcacccaggcctgcctgaagaacaaggacgtggccatcatcgagctgaacgagaacgaggagaaccaggtgaccagagacatcgtggagaactggagcgtggaggagcaggccatggagatggacctgagcgtgctgcagcaggtggaggacctggagagaagagtggccagcgccagcctgcaggtgaagggctggatgtgccccgagcccgccagcgagagagaggacctggtgtacttcgagcacaagagcttcaccaagctgtgcaaggagcacgacggcgagttcaccggcgaggacgagagcagcgcccacgccctggagagaaagagcgacaaccccctggacatcgccgtgaccagactggccgacctggagagaaacatcgagagaagaatcgaggaggacatcgcccccggcctgagagtgtggagaagagccctgagcgaggccagaagcgccgcccaggtggccctgtgcatccagcagctgcagaagagcatcgcctgggagaagagcatcatgaaggtgtactgccagatctgcagaaagggcgacaacgaggagctgctgctgctgtgcgacggctgcgacaagggctgccacacctactgccacagacccaagatcaccaccatccccgacggcgactggttctgccccgcctgcatcgccaaggccagcggccagaccctgaagatcaagaagctgcacgtgaagggcaagaagaccaacgagagcaagaagggcaagaaggtgaccctgaccggcgacaccgaggacgaggacagcgccagcaccagcagcagcctgaagagaggcaacaaggacctgaagaagagaaagatggaggagaacaccagcatcaacctgagcaagcaggagagcttcaccagcgtgaagaagcccaagagagacgacagcaaggacctggccctgtgcagcatgatcctgaccgagatggagacccacgaggacgcctggcccttcctgctgcccgtgaacctgaagctggtgcccggctacaagaaggtgatcaagaagcccatggacttcagcaccatcagagagaagctgagcagcggccagtaccccaacctggagaccttcgccctggacgtgagactggtgttcgacaactgcgagaccttcaacgaggacgacagcgacatcggcagagccggccacaacatgagaaagtacttcgagaagaagtggaccgacaccttcaaggtgagctag

SEQ ID NO: 108604 - protein, 568 aa, Artificial Sequence
  derived and/or modified sequence
MNKLRQSLRRRKPAYVPEASRPHQWQADEDAVRKGTCSFPVRYLGHVEVEESRGMHVCEDAVKKLKAMGRKSVKSVLWVSADGLRVVDDKTKDLLVDQTIEKVSFCAPDRNLDKAFSYICRDGTTRRWICHCFLALKDSGERLSHAVGCAFAACLERKQRREKECGVTAAFDASRTSFAREGSFRLSGGGRPAEREAPDKKKAEAAAAPTVAPGPAQPGHVSPTPATTSPGEKGEAGTPVAAGTTAAAIPRRHAPLEQLVRQGSFRGFPALSQKNSPFKRQLSLRLNELPSTLQRRTDFQVKGTVPEMEPPGAGDSDSINALCTQISSSFASAGAPAPGPPPATTGTSAWGEPSVPPAAAFQPGHKRTPSEAERWLEEVSQVAKAQQQQQQQQQQQQQQQQQQQQAASVAPVPTMPPALQPFPAPVGPFDAAPAQVAVFLPPPHMQPPFVPAYPGLGYPPMPRVPVVGITPSQMVANAFCSAAQLQPQPATLLGKAGAFPPPAIPSAPGSQARPRPNGAPWPPEPAPAPAPELDPFEAQWAALEGKATVEKPSNPFSGDLQKTFEIEL

SEQ ID NO: 108605 - DNA, 1707 bp, Artificial Sequence
  derived and/or modified sequence
atgaataagctgcgtcaatccttacgccggcggaaaccagcatacgttcctgaagcgagtagaccccatcagtggcaagcagacgaggatgccgtgcggaaaggcacatgttccttcccggtgcgatatctcggacacgtggaagtggaggagagcagaggcatgcacgtatgtgaagacgctgtcaagaaactgaaggccatgggccgcaaatctgtgaagtctgttctttgggtttcggccgatgggctgcgtgtcgtagatgacaagacgaaggacctgcttgtcgaccagacaatcgagaaggtctctttctgtgcacccgaccgaaacttagataaagcctttagttacatctgccgcgatggaacaactagaagatggatctgtcactgtttcttagcactgaaggactctggagaaaggctttcccacgccgtgggatgcgcctttgccgcctgtctcgagagaaagcaaagaagggagaaagagtgcggagtgactgccgctttcgatgcttcacggacctctttcgcccgtgaaggctcgtttagactatccggcggcggccggcctgccgaaagagaagctccagataaaaagaaagcagaggccgcagctgcccccaccgtcgccccgggtccggcccaacctgggcacgtgtcgccaacccccgctaccaccagcccaggagaaaaaggggaggcaggcacccctgtagccgccggcaccactgcagccgctattcctagaaggcatgcaccactggagcagctcgtccgccaggggtctttccgtggatttccagctctgagtcagaaaaactcccctttcaagaggcagttgtctctgaggctgaacgagttgccgtccaccctccaacggcgtacagacttccaggtcaagggtactgttcctgaaatggagcctcccggagccggggattctgattctatcaacgccctgtgcacccagatctcttcgagctttgccagcgcaggtgctcctgcaccaggtcctccacctgcaaccaccggcacgtctgcctggggcgagcctagcgtgccgccagctgcggcctttcagcctggacacaagcgcaccccatcagaggctgaaaggtggttagaagaagtttcacaggtagctaaggcacagcaacagcagcaacagcagcagcagcagcagcagcagcagcaacagcagcaacaacaagctgcctccgtagcccctgttcccactatgcctcctgcactccagccattccccgcacctgtgggccctttcgatgctgcccctgcacaggtcgccgtgttcctgcctcctccacacatgcagcctcccttcgtgcccgcttatcccggcctgggttatccacctatgcctagagtccccgtcgtcgggataaccccgtctcagatggtagcgaatgccttctgttctgccgcacagctccaaccacagcctgctaccctgctaggtaaggcgggagcattccccccccccgcaatcccaagcgcccctggctcccaggctcgtccccggccgaacggggccccatggccaccagaaccagcccctgccccagcaccggagcttgatcctttcgaagcacaatgggcagcgcttgaaggaaaggctacagtggaaaagccttcaaaccccttttcaggcgatttgcagaaaacattcgagatcgagctctag

SEQ ID NO: 108606 - DNA, 1707 bp, Artificial Sequence
  derived and/or modified sequence
atgaacaagctgcggcagagcctgcggcggaggaagccagcctacgtgcctgaggccagccggccccaccagtggcaggctgatgaagatgctgtgaggaagggcacctgcagcttccctgtgcgctacctgggccacgtggaggtggaggagagccggggcatgcacgtgtgtgaagatgctgtgaagaagctgaaggccatgggcaggaagtctgtgaagtctgtgctgtgggtgtctgcagatggcctgcgggtggtggatgacaagaccaaggacctgctggtggaccagaccatcgagaaggtgtccttctgtgccccagacaggaacctggacaaggccttctcctacatctgcagagatggcaccacccggcgctggatctgccactgcttcctggccctgaaggacagcggggagcggctgagccatgctgtgggctgtgcctttgctgcctgcctggagaggaagcagaggcgggagaaggaatgtggggtgacagctgcctttgatgccagcaggaccagctttgcccgggagggcagcttccggctgagcggcggcggccggcctgctgagcgggaggccccagacaagaagaaggccgaggccgctgctgcccccaccgtggcccctggccctgcccagcccggccacgtgagccccaccccagccaccaccagccctggagagaagggggaggccggcacccctgtggccgccggcaccacagctgctgccatccccaggagacatgcccccctggagcagctggtgcggcagggcagcttccggggcttccctgccctgagccagaagaacagccccttcaagaggcagctgagcctgcggctgaatgagctgcccagcaccctgcagaggagaacagacttccaggtgaagggcaccgtgcctgagatggagcccccaggagctggggacagcgacagcatcaatgccctgtgcacccagatcagcagcagctttgccagcgctggggccccagcccctggccccccaccagccaccaccggcaccagcgcctggggcgagcccagcgtgcccccagctgctgccttccagcccggccacaagaggacccccagcgaggccgagcgctggctggaggaggtgtcccaggtggccaaggcccagcagcagcagcagcagcagcagcagcagcagcagcagcagcagcagcagcagcagcaggccgcctctgtggcccctgtgcccaccatgcccccagccctgcagcccttccctgcccctgtgggcccctttgatgctgccccagcccaggtggccgtgttcctgcccccaccccacatgcagcccccatttgtgcctgcctacccaggcctgggctacccacccatgccccgggtgcctgtggtgggcatcacccccagccagatggtggccaatgccttctgcagcgctgcccagctgcagccccagcctgccaccctgctgggcaaggccggggccttccccccaccagccatccccagcgcccctggcagccaggcccggccccggcccaatggagccccctggcccccagagcccgccccagccccagcccctgagctggacccctttgaggcccagtgggccgccctggagggcaaggccaccgtggagaagcccagcaaccccttcagcggggacctgcagaagacctttgaaattgagctgtag

SEQ ID NO: 108607 - DNA, 1707 bp, Artificial Sequence
  derived and/or modified sequence
atgaacaagctgcggcagagcctgcggcggcggaagcccgcctacgtccccgaggcctccaggcctcaccaatggcaagctgatgaggatgccgtacgtaagggtacctgtagtttccctgtgagatacttgggccacgtggaggttgaagaaagtcggggcatgcatgtctgcgaggatgctgtgaaaaagctgaaagcaatgggccggaagtctgtcaaaagtgtcctctgggtatctgccgacggccttcgagtagtcgatgacaagactaaggacctgctggtggatcagaccatcgaaaaggtgtcattttgcgcacctgaccggaacctggacaaggctttttcttacatctgtcgcgatggaacaacgaggaggtggatctgccactgtttccttgcgctgaaggatagcggtgaaaggctgagccatgcagtgggatgcgcattcgccgcgtgtctggagcggaagcagcggcgtgagaaggaatgcggtgtgacagccgctttcgatgccagtagaacaagtttcgcccgcgagggatcttttcggttgtccggtggcgggaggcctgctgaacgggaggcccctgataagaagaaagcggaggccgcagccgcccctaccgtggcccctgggcccgctcagccggggcacgtttcaccaactccagccacaacctccccaggcgagaaaggcgaggcgggcacacccgtggctgcagggacgacggccgctgccatccctcggcgccatgccccgctagaacagttggttcggcaaggcagttttagaggatttcctgccctatcacagaaaaattctccatttaaacggcagctgtcactccgtctgaatgagcttccaagcacattgcagagaagaaccgacttccaggttaagggcacagtacccgagatggagccgccaggagcaggcgactctgactctatcaacgccttgtgcactcagatcagctcttcctttgcctcagctggggcgcccgcgccaggcccgccccccgccacaaccggcacttctgcttggggagagccttctgtgccccccgcagcggcctttcagccaggtcacaagcgcaccccctccgaagcagagcgctggttggaagaggtgagtcaggttgcgaaagctcaacagcaacagcagcagcaacaacagcagcagcagcagcagcaacagcagcagcaacaggccgctagcgtcgcccccgttcctaccatgcctccagctcttcagcctttccctgccccggttggtccgtttgacgctgccccggctcaagtcgccgtgttcctccctcctccacatatgcaacctccatttgtccccgcatatcctggccttggatacccacccatgcctagagtgcctgtagtgggaattacgccaagtcagatggtcgccaacgctttctgcagtgccgctcagttacagcctcaacccgccacccttctgggcaaggccggcgcttttccccctccagccattccctccgcaccaggcagtcaagcacggccaagacccaatggggcaccttggccacctgagcccgcgcccgccccagcaccagagttggatcctttcgaggcacaatgggctgctctggaagggaaggcaactgtggaaaaaccaagcaatccgtttagtggtgatctgcagaagacattcgagatcgagctttag

SEQ ID NO: 108608 - DNA, 1707 bp, Artificial Sequence
  derived and/or modified sequence
atgaataagctgaggcagtccttgagacggaggaagcccgcttatgtcccagaggcctctcgccctcaccagtggcaggccgatgaggatgccgtgcgaaaaggcacatgtagcttccctgtccgatacttggggcatgtggaggtggaggagtcaaggggcatgcacgtatgtgaagacgcagtcaagaagctcaaggcgatgggcagaaagtcagtgaaatccgtgctctgggtcagcgctgacggcttacgagtagttgacgacaagaccaaagaccttctcgtcgaccaaacaatcgaaaaggtgagcttctgcgctccggaccgcaacctcgataaggctttctcttatatttgtcgagacggcactacacggagatggatctgtcactgctttcttgccttgaaagactccggcgaacgcttatcccacgccgtgggatgtgcatttgccgcatgtcttgaacggaaacagcgaagggagaaggaatgtggtgtgactgccgcttttgacgcatcccggaccagctttgcaagggaaggtagtttccggctgagtgggggtggtcggccagcagaacgtgaggcccctgacaagaaaaaggctgaagcggcagccgctcccacagtagctccgggtccagcccagcctgggcatgtctctcctacccccgctacaacttctccaggcgagaagggagaagccggtactccagtagcagctggaaccacagcagctgcaatcccgaggcgccacgctccattggagcagctggttaggcaagggtcttttcgaggctttcccgctctatctcagaagaactcaccattcaagcgacagttatcacttcgcctcaacgaacttcccagtaccctgcaaagaagaacagacttccaagtgaaagggactgtgcccgagatggaaccaccaggggctggggacagcgactcaatcaacgctctctgtacacagatctcgagttcctttgcctctgcaggagctccggctccaggcccacctcctgccaccacaggaacgtcagcatggggagagccatccgtgcctcccgctgccgctttccagcctggccataagcgtacgccttctgaagctgagagatggctggaggaagtgagtcaggtggcgaaggcacagcaacagcaacaacaacaacagcagcagcaacagcagcagcagcagcagcaacagcaggctgcctcagtcgcccctgtgcccaccatgcctccggctctgcaaccttttccagcacctgtagggccattcgatgccgcacccgcacaggtggccgtgttcctacccccaccacatatgcaaccaccctttgttcccgcatatcccggtctgggttatccacctatgccccgtgttcccgtggtgggaataacccccagccagatggtggccaacgccttctgctcagccgctcagctccaaccccaacccgctactctgctcgggaaggcgggtgcttttccaccccctgctattccatctgcccctggctctcaggcccgtccgagacccaacggcgcaccctggccccctgaacctgcacccgcacctgccccagagttggatcccttcgaagcccagtgggctgccctcgagggcaaggctactgtggagaaacccagtaatcccttttctggagatctgcagaaaaccttcgagattgagctttag

SEQ ID NO: 108609 - DNA, 1707 bp, Artificial Sequence
  derived and/or modified sequence
atgaacaagctgagacagagcctgagaagaagaaagcccgcctacgtgcccgaggccagcagaccccaccagtggcaggccgacgaggacgccgtgagaaagggcacctgcagcttccccgtgagatacctgggccacgtggaggtggaggagagcagaggcatgcacgtgtgcgaggacgccgtgaagaagctgaaggccatgggcagaaagagcgtgaagagcgtgctgtgggtgagcgccgacggcctgagagtggtggacgacaagaccaaggacctgctggtggaccagaccatcgagaaggtgagcttctgcgcccccgacagaaacctggacaaggccttcagctacatctgcagagacggcaccaccagaagatggatctgccactgcttcctggccctgaaggacagcggcgagagactgagccacgccgtgggctgcgccttcgccgcctgcctggagagaaagcagagaagagagaaggagtgcggcgtgaccgccgccttcgacgccagcagaaccagcttcgccagagagggcagcttcagactgagcggcggcggcagacccgccgagagagaggcccccgacaagaagaaggccgaggccgccgccgcccccaccgtggcccccggccccgcccagcccggccacgtgagccccacccccgccaccaccagccccggcgagaagggcgaggccggcacccccgtggccgccggcaccaccgccgccgccatccccagaagacacgcccccctggagcagctggtgagacagggcagcttcagaggcttccccgccctgagccagaagaacagccccttcaagagacagctgagcctgagactgaacgagctgcccagcaccctgcagagaagaaccgacttccaggtgaagggcaccgtgcccgagatggagccccccggcgccggcgacagcgacagcatcaacgccctgtgcacccagatcagcagcagcttcgccagcgccggcgcccccgcccccggccccccccccgccaccaccggcaccagcgcctggggcgagcccagcgtgccccccgccgccgccttccagcccggccacaagagaacccccagcgaggccgagagatggctggaggaggtgagccaggtggccaaggcccagcagcagcagcagcagcagcagcagcagcagcagcagcagcagcagcagcagcagcaggccgccagcgtggcccccgtgcccaccatgccccccgccctgcagcccttccccgcccccgtgggccccttcgacgccgcccccgcccaggtggccgtgttcctgccccccccccacatgcagccccccttcgtgcccgcctaccccggcctgggctacccccccatgcccagagtgcccgtggtgggcatcacccccagccagatggtggccaacgccttctgcagcgccgcccagctgcagccccagcccgccaccctgctgggcaaggccggcgccttccccccccccgccatccccagcgcccccggcagccaggccagacccagacccaacggcgccccctggccccccgagcccgcccccgcccccgcccccgagctggaccccttcgaggcccagtgggccgccctggagggcaaggccaccgtggagaagcccagcaaccccttcagcggcgacctgcagaagaccttcgagatcgagctgtag

SEQ ID NO: 108610 - protein, 255 aa, Artificial Sequence
  derived and/or modified sequence
MEEKRRKYSISSDNSDTTDSHATSTSASRCSKLPSSTKSGWPRQNEKKPSEVFRTDLITAMKIPDSYQLSPDDYYILADPWRQEWEKGVQVPAGAEAIPEPVVRILPPLEGPPAQASPSSTMLGEGSQPDWPGGSRYDLDEIDAYWLELINSELKEMERPELDELTLERVLEELETLCHQNMARAIETQEGLGIEYDEDVVCDVCRSPEGEDGNEMVFCDKCNVCVHQACYGILKVPTGSWLCRTCALGVQPKCL

SEQ ID NO: 108611 - protein, 850 aa, Artificial Sequence
  derived and/or modified sequence
MVPTAAIAVGGYFLGGMEEKRRKYSISSDNSDTTDSHATSTSASRCSKLPSSTKSGWPRQNEKKPSEVFRTDLITAMKIPDSYQLSPDDYYILADPWRQEWEKGVQVPAGAEAIPEPVVRILPPLEGPPAQASPSSTMLGEGSQPDWPGGSRYDLDEIDAYWLELINSELKEMERPELDELTLERVLEELETLCHQNMARAIETQEGLGIEYDEDVVCDVCRSPEGEDGNEMVFCDKCNVCVHQACYGILKVPTGSWLCRTCALGVQPKCLLCPKRGGALKPTRSGTKWVHVSCALWIPEVSIGCPEKMEPITKISHIPASRWALSCSLCKECTGTCIQCSMPSCVTAFHVTCAFDHGLEMRTILADNDEVKFKSFCQEHSDGGPRNEPTSEPTEPSQAGEDLEKVTLRKQRLQQLEEDFYELVEPAEVAERLDLAEALVDFIYQYWKLKRKANANQPLLTPKTDEVDNLAQQEQDVLYRRLKLFTHLRQDLERVRNLCYMVTRRERTKHAICKLQEQIFHLQMKLIEQDLCRERSGRRAKGKKSDSKRKGCEGSKGSTEKKEKVKAGPDSVLGQLAGLSTSFPIDGTFFNSWLAQSVQITAENMAMSEWPLNNGHREDPAPGLLSEELLQDEETLLSFMRDPSLRPGDPARKARGRTRLPAKKKPPPPPPQDGPGSRTTPDKAPKKTWGQDAGSGKGGQGPPTRKPPRRTSSHLPSSPAAGDCPILATPESPPPLAPETPDEAASVAADSDVQVPGPAASPKPLGRLRPPRESKVTRRLPGARPDAGMGPPSAVAERPKVSLHFDTETDGYFSDGEMSDSDVEAEDGGVQRGPREAGAEEVVRMGVLAS

SEQ ID NO: 108612 - DNA, 2553 bp, Artificial Sequence
  derived and/or modified sequence
atggtacctactgccgccatagcagtaggtggctacttcctcggaggcatggaggaaaaacggcgcaaatatagcatttcgtctgacaattccgacacaacagacagccatgctaccagcacctctgcctctcgctgctcgaagcttccttcgtccacaaaatcaggctggcctaggcagaatgagaaaaagccctccgaagttttccgcacagacctgatcacagcaatgaagatcccagattcgtaccagcttagcccagatgattactacatactggcggatccctggcgccaggaatgggaaaagggagtgcaagtgcccgccggggctgaagccatccctgaaccggttgttcgcattctgccgccactagaaggccctccggcacaagcctcgccttcgagcaccatgcttggggagggatcccagccagactggcccggaggatctaggtatgacctcgacgagatcgacgcctactggctcgaactgataaattctgagctcaaggaaatggagcggcccgaattggacgagctgacgttagagcgggtgctggaggagctggagaccctttgccatcagaatatggcacgcgcaattgagacacaggaggggctcgggatcgaatacgacgaggacgtggtgtgtgatgtttgcagatcccctgagggagaagacggcaatgaaatggttttctgtgataaatgcaacgtgtgcgttcatcaggcctgctacggtatcttgaaggttcctacagggtcttggttatgtagaacctgtgccctgggggtccaaccaaagtgccttctgtgccccaagcgcggaggagcccttaagcctacccggagtggaacgaagtgggtccatgtctcttgtgctctgtggataccagaggtttctattggctgcccagaaaaaatggagcccattaccaagatcagccacattcctgcttcaaggtgggctctgtcatgctcactgtgtaaggagtgtacaggaacctgtatacagtgctctatgccatcatgcgtgacagctttccacgtcacctgtgccttcgaccacggactcgagatgaggacaatcctggctgataacgatgaagtgaagtttaagtccttctgccaggagcactctgacggcggccccaggaatgaacctacaagcgagccaacagaacctagccaagccggtgaggatctcgagaaggtgacacttcgcaaacagcggctgcagcagctggaggaggacttctacgagctggtagagccagcagaagttgccgagcgcctggatctagctgaggccctggtggacttcatataccagtattggaaactaaagagaaaggcaaacgctaaccagccccttctgacaccaaagaccgatgaagtagacaatctcgcccagcaagaacaggatgtactttatcggagactgaagttatttacgcacctgcgtcaggaccttgagcgggtgagaaatctgtgttacatggtcacacgcagggagcggaccaagcacgcaatatgcaaactgcaagagcagattttccacttgcagatgaagcttatcgaacaagacctttgtcgggagcggtccggacgccgcgccaagggaaaaaaatctgacagtaagcgcaaaggctgcgaaggcagtaaaggttctaccgaaaagaaagaaaaggtgaaagccgggcctgattccgtgctcggacagcttgcagggctctctacttcattccctatcgacggaacatttttcaactcttggctcgcacagtccgtgcaaatcaccgctgaaaacatggcaatgtccgagtggcctctaaacaatgggcacagagaagacccagcacccggactcctctctgaggagttgctacaagatgaagagacacttctgtcgtttatgcgtgaccctagcctgcgccccggtgacccagcacgcaaggccagaggtcgcactaggctccctgccaaaaagaaaccacctcctccgccaccccaagacgggcccggcagtaggaccactcccgataaggcccctaaaaagacatggggccaagacgctggcagcgggaagggcggccagggaccccctacacgaaagccccccaggcggacctcctcacacttaccaagttcaccagccgcgggggattgccccattctggccacccccgagagtcccccgccattggcgccggaaactccagacgaagccgcgtccgtggctgccgattccgacgttcaggtgcctgggccagccgccagtccgaagcctctggggcgcctacggcctcctagggagagcaaagttacccgaagactccctggcgcccgtccagatgccgggatgggtcctccttcggcggttgctgagcggccgaaggtttccctgcatttcgacaccgagacagatggctacttcagtgacggggagatgtcagattccgacgtagaggccgaggatggaggagtccagaggggcccgcgcgaggccggcgcagaggaggttgtgagaatgggcgtcctggccagctag

SEQ ID NO: 108613 - DNA, 2750 bp, Artificial Sequence
  derived and/or modified sequence
ggtttaaaaagaaacagaaacatacacagggggttggtgaatggtgccgaccgcggccatcgcagttggaggctattttttgggggggatggaagagaagaggcgaaaatactccatcagcagtgacaactctgacaccactgacagtcatgcgacatctacatccgcatcaagatgctccaaactgcccagcagcaccaagtcgggctggccccgacagaacgaaaagaagccctccgaggttttccggacagacttgatcacagccatgaagatcccggactcataccagctcagcccggatgactactacatcctggcagacccatggcgacaggaatgggagaaaggtgtgcaggtgcctgccggggcagaggccatcccagagcccgtggtgaggatcctcccaccactggaaggcccccctgcccaggcatccccgagcagcaccatgcttggtgagggctcccagcctgattggccagggggcagccgctatgacttggacgagattgatgcctactggctggagctcatcaactcggagcttaaggagatggagaggccggagctggacgagctgacattagagcgtgtgctggaggagctggagaccctgtgccaccagaatatggccagggccattgagacgcaggaggggctgggcatcgagtacgacgaggatgttgtctgcgacgtgtgtcgctctcctgagggcgaggatggcaacgagatggtcttctgtgacaagtgcaacgtctgtgtgcatcaggcatgctacgggatcctcaaggtgcccacgggcagctggctgtgccggacgtgtgccctgggtgtccagccaaagtgcctgctctgccccaagcgaggaggagccttgaagcccactagaagtgggaccaagtgggtgcatgtcagctgtgccctatggattcctgaggtcagcatcggctgcccagagaagatggagcccatcaccaagatctcgcatatcccagccagccgctgggctctgtcctgcagcctctgcaaggaatgcacaggcacctgcatccagtgttccatgccttcctgcgtcacagcgttccatgtcacatgcgcctttgaccacggcctggaaatgcggactatattagcagacaacgatgaggtcaagttcaagtcattctgccaggagcacagtgacgggggcccacgtaatgagcccacatctgagcccacggaacccagccaggctggcgaggacctggaaaaggtgaccctgcgcaagcagcggctgcagcagctagaggaggacttctacgagctggtggagccggctgaggtggctgagcggctggacctggctgaggcactggtcgacttcatctaccagtactggaagctgaagaggaaagccaatgccaaccagccgctgctgacccccaagaccgacgaggtggacaacctggcccagcaggagcaggacgtcctctaccgccgcctgaagctcttcacccatctgcggcaggacctagagagggttagaaatctgtgctacatggtgacaaggcgcgagagaacgaaacacgccatctgcaaactccaggagcagatattccacctgcagatgaaacttattgaacaggatctgtgtcgagagcggtctgggaggagagcaaagggcaagaagagtgactcgaagaggaagggctgcgagggctccaagggcagcactgagaagaaagagaaagtgaaggcggggcctgactcagtcctggggcagctggcaggcctgtccacctcattccccatcgatggcaccttcttcaacagctggctggcacagtcggtgcagatcacagcagagaacatggccatgagcgagtggccactgaacaatgggcaccgcgaggaccctgctccagggctgctgtcagaggaactgctgcaggacgaggagacactgctcagcttcatgcgggacccctcgctgcgacctggtgaccctgctaggaaggcccgaggccgcacccgcctgcctgccaagaagaaaccaccaccaccaccaccgcaggacgggcctggttcacggacgactccagacaaagcccccaagaagacctggggccaggatgcaggcagtggcaaggggggtcaagggccacctaccaggaagccaccacgtcggacatcttctcacttgccgtccagccctgcagccggggactgtcccatcctagccacccctgaaagccccccgccactggcccctgagaccccggacgaggcagcctcagtagctgctgactcagatgtccaagtgcctggccctgcagcaagccctaagcctttgggccggctccggccaccccgcgagagcaaggtaacccggagattgccgggtgccaggcctgatgctgggatgggaccaccttcagctgtggctgagaggcccaaggtcagcctgcattttgacactgagactgatggctacttctctgatggggagatgagcgactcagatgtagaggccgaggacggtggggtgcagcggggtccccgggaggcaggggcagaggaggtggtccgcatgggcgtactggcctcctaactcacccccttccctgtcccaggccctgccctggtccccccacaaggcctcagcccagtcacaactgccatttccagtctctgctgagtgtcccagaccctcgaggctgccactccgtcgtggttttatttttaatatagagagagttttgaattct

SEQ ID NO: 108614 - DNA, 2553 bp, Artificial Sequence
  derived and/or modified sequence
atggtgcccacagctgccatcgctgtgggcggctacttcctgggcggcatggaggagaagaggaggaagtacagcatcagcagtgacaacagcgacaccacagacagccacgccaccagcaccagcgccagccgctgcagcaagctgcccagcagcaccaagagcggctggccccggcagaatgagaagaagcccagcgaggtgttcagaacagacctgatcacagccatgaagatcccagacagctaccagctgagcccagatgactactacatcctggccgacccctggaggcaggagtgggagaagggcgtgcaggtgcctgctggagctgaggccatccctgagcctgtggtgcgcatcctgccccccctggagggccccccagcccaggccagccccagcagcaccatgctgggggagggcagccagcctgactggccaggcggcagccgctatgacctggatgaaattgatgcctactggctggagctgatcaacagcgagctgaaggagatggagaggcctgagctggatgagctgaccctggagcgggtgctggaggagctggagaccctgtgccaccagaacatggcccgggccatcgagacccaggagggcctgggcatcgagtatgatgaagatgtggtgtgtgatgtgtgccgcagcccagaaggagaagatggaaatgagatggtgttctgtgacaagtgcaatgtgtgtgtgcaccaggcctgctacggcatcctgaaggtgcccaccggctcctggctgtgcaggacctgtgccctgggcgtgcagcccaagtgcctgctgtgccccaagagaggaggagccctgaagcccaccaggagcggcaccaagtgggtgcacgtgtcctgtgccctgtggatccctgaggtgtccatcggctgcccagagaagatggagcccatcaccaagatcagccacatcccagccagccgctgggccctgagctgcagcctgtgcaaggagtgcaccggcacctgcatccagtgcagcatgcccagctgtgtgacagccttccacgtgacctgtgcctttgaccacggcctggagatgaggaccatcctggccgacaatgatgaggtgaagttcaagagcttctgccaggagcacagtgatggcggccccagaaatgagcccaccagcgagcccacagagcccagccaggccggggaggacctggagaaggtgaccctgaggaagcagaggctgcagcagctggaggaggacttctatgagctggtggagcctgctgaggtggccgagcggctggacctggccgaggccctggtggacttcatctaccagtactggaagctgaagaggaaggccaatgccaaccagcccctgctgacccccaagacagatgaggtggacaacctggcccagcaggagcaggatgtgctgtaccgccgcctgaagctgttcacccacctgcggcaggacctggagcgggtgaggaacctgtgctacatggtgacccggcgggagaggaccaagcacgccatctgcaagctgcaggagcagatcttccacctgcagatgaagctgattgagcaggacctgtgccgggagaggagcggccggcgggccaagggcaagaagagtgacagcaagaggaagggctgtgagggcagcaagggcagcacagagaagaaggagaaggtgaaggccggcccagattctgtgctgggccagctggccggcctgagcaccagcttccccattgatggcaccttcttcaacagctggctggcccagagcgtgcagatcacagctgagaacatggccatgtctgagtggcccctgaacaacggccaccgggaggaccctgcccctggcctgctgtctgaggagctgctgcaggatgaggagaccctgctgtccttcatgagggaccccagcctgcggcctggggaccctgccaggaaggcccggggccgcacccggctgcctgccaagaagaagcccccacctcctccaccccaggacggccctggcagcaggaccaccccagacaaggcccccaagaagacctggggccaggatgctggcagcgggaaaggaggccagggcccccccaccaggaagccacccaggaggaccagcagccacctgcccagcagccctgctgctggggactgccccatcctggccaccccagagagccccccacccctggcccctgagaccccagatgaggccgcctctgtggccgctgacagtgatgtgcaggtgcccggccctgctgccagccccaagcccctgggccgcctgcggcccccccgggagagcaaggtgacccggcggctgcccggggcccggccagatgctggcatgggccccccatctgctgtggccgagcggcccaaggtgtccctgcactttgacacagaaacagatggctacttcagtgatggagagatgtctgacagtgatgtggaggccgaggatggaggagtgcagaggggcccccgggaggccggggctgaggaggtggtgaggatgggcgtgctggccagctag

SEQ ID NO: 108615 - DNA, 2553 bp, Artificial Sequence
  derived and/or modified sequence
atggtgcccaccgccgccatcgccgtgggcggctacttcctgggcggaatggaggaaaaaagaagaaaatatagcatctcctctgataattctgacaccaccgattctcacgccacatcgacgtcagccagccgatgttctaagcttcccagcagcacgaaatccggctggccccgccaaaacgaaaaaaaaccctccgaggtctttcggactgacttgataacagccatgaaaattccagatagctaccagcttagtccggatgattactatatcctcgctgacccatggagacaagaatgggagaaaggggtccaggttcctgccggcgcagaggctatacccgaaccagtggtgcgaatcttaccccccctagaaggcccccctgcccaagcctccccaagctctacaatgctgggcgagggaagtcaacccgactggccaggcggctctcggtacgatctggacgagattgacgcatactggttggaactgatcaactccgagttgaaggagatggaacgccccgagttggatgaacttacattggagagggtccttgaggagctggagacactgtgtcatcagaacatggccagggccatcgaaactcaggagggcctgggaattgagtacgacgaggacgtggtttgtgacgtgtgcaggtcgccagaaggcgaggatgggaacgagatggtgttctgtgataagtgtaatgtttgtgttcaccaggcatgctacgggattctgaaggttcccacgggcagttggctgtgtagaacttgtgccctaggtgtgcagcctaaatgcctgctgtgcccaaagcgcggaggcgcactgaaacctacaagaagcggcaccaagtgggtccacgtgtcctgcgctctctggattccagaggtttccatcggctgccccgagaaaatggaacctataaccaagatctcccatattccagccagccggtgggctctctcatgttctctgtgcaaggagtgtacaggcacgtgcattcagtgcagcatgccatcctgcgtcactgccttccatgttacgtgtgcattcgatcacggcttggaaatgcgaacaatcctggccgacaacgacgaggtcaaattcaaaagtttttgtcaggaacattctgacggaggcccccgcaatgaaccgacaagcgagccgacagagccttctcaggccggggaagacttagagaaggtaactctgcggaaacagcggctacagcaactggaagaggatttttacgaacttgtagagccggctgaagtcgcagaacggttagacctagccgaagctctggtcgattttatctatcaatactggaagctgaagaggaaagcgaacgcgaatcagccattgctaactccgaaaacagatgaggtggacaacctggcccaacaggagcaggatgtgctttatagaaggctgaagttgttcactcacctgcggcaggacttagaacgcgtgagaaatctgtgctacatggtgacccggagggagaggactaagcacgccatttgtaagctgcaggagcagatcttccacttacaaatgaagctaatcgaacaggatctctgtcgagaaaggagcggtagacgcgcgaaggggaaaaagagtgactccaaacgtaagggctgtgagggaagtaaaggctctacagaaaaaaaggaaaaagtgaaggctggaccagactcggtgttgggacagcttgcaggattatcaacatcctttcccattgacggaacattcttcaatagttggctcgcccaatctgtccaaattactgctgaaaatatggccatgtctgaatggccattgaacaacggacacagagaggacccagctcccggcctgttgagcgaggagttactccaggacgaggagaccctcctttctttcatgcgagatccatcattgcgtccaggggatccagcgcgaaaagctcgcggccgaacgagactgccagcaaagaagaagccaccacctccgccccctcaagatggcccaggcagccggaccaccccagataaggccccaaaaaaaacttgggggcaggacgccggtagtggcaaaggtggccagggaccacccaccagaaagccgcctagacggacaagctctcatctgccttcaagtccagctgccggggattgccctatcctggcaacacccgaatcgccccctccgttagcccctgagaccccagacgaagctgcctctgtggctgcagacagtgacgttcaagtacctggccccgctgcgagccctaagccccttggcaggctcagaccacctagggagagcaaggtgacgagacgccttcccggggcacgacctgacgccggcatgggacctccctcagctgttgcagaaagacctaaggtcagtctacacttcgacactgaaactgacggttacttctcggacggtgaaatgtctgatagtgatgtggaggctgaggacggtggcgttcaacgcggcccacgcgaggctggggctgaggaagtggtgcggatgggagttctggcttcctag

SEQ ID NO: 108616 - DNA, 2553 bp, Artificial Sequence
  derived and/or modified sequence
atggtgcccacggccgcaattgccgtaggcggatactttctcggcggtatggaggagaaacgacgtaaatactccataagttctgataattctgacacgaccgacagtcacgccacttccacatctgcaagtcggtgctccaagctgccctccagtactaagtccgggtggcccagacagaacgagaagaaaccaagcgaggtttttcgcaccgacctgataaccgctatgaagatcccagattcatatcaattaagccccgacgattactacattctcgcggacccctggcgccaggaatgggaaaagggggtccaagttcctgccggagctgaggcaatccccgaacccgtcgtccggatcttgcctccactagagggaccccctgcgcaagccagccccagcagtaccatgctgggtgagggttcccagcccgattggccagggggttctcgatatgatctagatgagatcgatgcctactggctcgaactaataaattcagaactaaaagagatggagagacccgagctcgacgaactgactctggaacgggttctggaggagctggaaactctgtgtcatcagaatatggcccgagccatcgaaacccaggagggcctaggtatagagtacgatgaggatgtggtgtgtgacgtttgtagaagccccgagggcgaggatggtaacgagatggtgttctgcgacaaatgcaatgtgtgtgttcaccaggcgtgctacgggatcctcaaggtaccaacaggctcatggctttgtcgtacttgtgctctcggtgtccagcctaaatgcctgttgtgcccaaaaagagggggtgccctcaagccgactagatcgggaactaagtgggtgcatgtgagctgtgccctgtggatacctgaagtgagcatcggatgccccgaaaagatggagcccatcacaaaaatttctcatatccccgcttcaaggtgggccctttcatgcagcctatgcaaggagtgtaccggtacttgtatacagtgctcaatgccttcttgcgtgactgcttttcacgtgacgtgtgcgttcgatcacggtctggaaatgcgtacgattcttgctgacaacgacgaagttaaattcaagtcgttctgccaggagcattccgacggcggacccagaaatgagccgactagcgagccgactgagccctcacaggccggagaggacttggagaaggtcaccctgagaaagcagcgtctccagcagctggaggaggatttttacgagttagttgagcccgcagaggttgccgagaggctggatttagcagaagcactggtagattttatttaccagtattggaagctcaaacgcaaagcgaacgctaaccagccgctgcttacacccaagacagacgaggttgataatctcgcacaacaggaacaagatgtgctataccgcagactgaagctgtttactcatctacgacaagatttggagcgcgtacggaatctgtgctatatggtgacgcgcagggaacgcacaaagcacgccatctgtaaattgcaggaacagatcttccatttacagatgaagctgattgaacaggacctctgcagagagaggagcggcagaagggccaagggtaaaaagtctgattctaaacggaagggttgtgagggttcaaaggggtccactgaaaagaaggagaaggtcaaagctgggccagattctgttctgggacagctagctggcctatccacctcctttcctatagacggcacttttttcaattcttggttggcccagagcgttcaaattaccgctgaaaatatggccatgtctgaatggccgctaaataacggccaccgggaagatccagcccctggtctcctgtctgaggagttgttacaggacgaagaaaccctgctgagtttcatgcgagatccatcgctgcggcctggtgacccagctcggaaggcaaggggtcggacgcgcctccctgccaaaaaaaaacctcccccaccccctccccaggacgggcctggaagccgcactacgcctgataaagcgcctaagaaaacatggggccaggacgccggttccggaaaaggcggtcagggacccccaaccaggaagccacccaggagaacatcaagccatctcccctcttctccggcagcgggagactgcccaatattggccactccagagtcccccccacccctggctcccgaaaccccagatgaagctgcaagtgtggccgctgactccgacgtgcaggtgcccggtcctgctgcttcccctaagccactgggcagactgagacccccacgggaaagcaaggtcacacgcagactgcctggcgcacggcctgatgcaggcatgggcccacctagcgccgtggctgagcgccctaaggtcagcctgcatttcgataccgaaactgatggctacttcagcgatggcgagatgtctgacagtgacgtggaggcggaagacggcggtgtccaacgaggcccacgggaagctggcgctgaggaggttgtgagaatgggggttctcgcctcatag

SEQ ID NO: 108617 - DNA, 2553 bp, Artificial Sequence
  derived and/or modified sequence
atggtgcccaccgccgccatcgccgtgggcggctacttcctgggcggcatggaggagaagagaagaaagtacagcatcagcagcgacaacagcgacaccaccgacagccacgccaccagcaccagcgccagcagatgcagcaagctgcccagcagcaccaagagcggctggcccagacagaacgagaagaagcccagcgaggtgttcagaaccgacctgatcaccgccatgaagatccccgacagctaccagctgagccccgacgactactacatcctggccgacccctggagacaggagtgggagaagggcgtgcaggtgcccgccggcgccgaggccatccccgagcccgtggtgagaatcctgccccccctggagggcccccccgcccaggccagccccagcagcaccatgctgggcgagggcagccagcccgactggcccggcggcagcagatacgacctggacgagatcgacgcctactggctggagctgatcaacagcgagctgaaggagatggagagacccgagctggacgagctgaccctggagagagtgctggaggagctggagaccctgtgccaccagaacatggccagagccatcgagacccaggagggcctgggcatcgagtacgacgaggacgtggtgtgcgacgtgtgcagaagccccgagggcgaggacggcaacgagatggtgttctgcgacaagtgcaacgtgtgcgtgcaccaggcctgctacggcatcctgaaggtgcccaccggcagctggctgtgcagaacctgcgccctgggcgtgcagcccaagtgcctgctgtgccccaagagaggcggcgccctgaagcccaccagaagcggcaccaagtgggtgcacgtgagctgcgccctgtggatccccgaggtgagcatcggctgccccgagaagatggagcccatcaccaagatcagccacatccccgccagcagatgggccctgagctgcagcctgtgcaaggagtgcaccggcacctgcatccagtgcagcatgcccagctgcgtgaccgccttccacgtgacctgcgccttcgaccacggcctggagatgagaaccatcctggccgacaacgacgaggtgaagttcaagagcttctgccaggagcacagcgacggcggccccagaaacgagcccaccagcgagcccaccgagcccagccaggccggcgaggacctggagaaggtgaccctgagaaagcagagactgcagcagctggaggaggacttctacgagctggtggagcccgccgaggtggccgagagactggacctggccgaggccctggtggacttcatctaccagtactggaagctgaagagaaaggccaacgccaaccagcccctgctgacccccaagaccgacgaggtggacaacctggcccagcaggagcaggacgtgctgtacagaagactgaagctgttcacccacctgagacaggacctggagagagtgagaaacctgtgctacatggtgaccagaagagagagaaccaagcacgccatctgcaagctgcaggagcagatcttccacctgcagatgaagctgatcgagcaggacctgtgcagagagagaagcggcagaagagccaagggcaagaagagcgacagcaagagaaagggctgcgagggcagcaagggcagcaccgagaagaaggagaaggtgaaggccggccccgacagcgtgctgggccagctggccggcctgagcaccagcttccccatcgacggcaccttcttcaacagctggctggcccagagcgtgcagatcaccgccgagaacatggccatgagcgagtggcccctgaacaacggccacagagaggaccccgcccccggcctgctgagcgaggagctgctgcaggacgaggagaccctgctgagcttcatgagagaccccagcctgagacccggcgaccccgccagaaaggccagaggcagaaccagactgcccgccaagaagaagcccccccccccccccccccaggacggccccggcagcagaaccacccccgacaaggcccccaagaagacctggggccaggacgccggcagcggcaagggcggccagggcccccccaccagaaagccccccagaagaaccagcagccacctgcccagcagccccgccgccggcgactgccccatcctggccacccccgagagccccccccccctggcccccgagacccccgacgaggccgccagcgtggccgccgacagcgacgtgcaggtgcccggccccgccgccagccccaagcccctgggcagactgagaccccccagagagagcaaggtgaccagaagactgcccggcgccagacccgacgccggcatgggcccccccagcgccgtggccgagagacccaaggtgagcctgcacttcgacaccgagaccgacggctacttcagcgacggcgagatgagcgacagcgacgtggaggccgaggacggcggcgtgcagagaggccccagagaggccggcgccgaggaggtggtgagaatgggcgtgctggccagctag

SEQ ID NO: 108618 - DNA, 603 bp, Artificial Sequence
  derived and/or modified sequence
atgctgatcagacacatggagcactgggcccacagactgttccccaagctgcagttcgaggacttcatcgacagagtggagtacctgggcagcaagaaggaggtgcagacctgcctgaagagaatcagactggacctgcccatcctgcacgaggacttcgtgagcaacaacgacgaggtggccgagaacaacgagcacgacgtgaccagcaccgagctggaccccttcctgaccaacctgagcgagagcgagatgttcgccagcgagctgagcagaagcctgaccgaggagcagcagcagagaatcgagagaaacaagcagctggccctggagagaagacaggccaagctgctgagcaacagccagaccctgggcaacgacatgctgatgaacacccccagagcccacaccgtggaggaggtgaacaccgacgaggaccagaaggaggagagcaacggcctgaacgaggacatcctggacaacccctgcaacgacgccatcgccaacaccctgaacgaggaggagaccctgctggaccagagcttcaagaacgtgcagcagcagctggacgccaccagcagaaacatcaccgaggccagatag

SEQ ID NO: 108619 - DNA, 603 bp, Artificial Sequence
  derived and/or modified sequence
atgttgatccgccatatggagcactgggcccatcggctttttccaaagctgcagtttgaagacttcatagaccgtgttgagtacctcgggtcaaagaaagaagtgcagacttgcctcaagcgcattcgcctggacttgccgattctgcacgaggatttcgtgagcaacaacgatgaagtagccgaaaacaacgagcacgacgttacgtcaaccgaactcgatccatttctgaccaacctgagtgagtccgaaatgtttgcatccgagttgtctaggtctttaactgaagagcagcaacagcgcatcgagcgcaataagcagcttgcccttgagaggagacaggccaagttattgagtaactcacagacattaggtaatgacatgctcatgaacacaccaagggcccatacggtggaggaagtcaacacagatgaggaccagaaagaagaatctaatgggttgaatgaggatatcttggataatccatgtaatgatgctattgctaatacgctaaacgaggaggaaaccctactggaccagagcttcaaaaatgtccagcagcagctggacgccacatctagaaatatcactgaggcacggtag

SEQ ID NO: 108620 - DNA, 603 bp, Artificial Sequence
  derived and/or modified sequence
atgctgatccgccacatggagcactgggcccacaggctcttccccaagctgcagtttgaggacttcatcgacagagtggagtacctgggcagcaagaaggaggtgcagacctgcctgaagaggatccggctggacctgcccatcctgcatgaagattttgtgagcaacaatgatgaggtggccgagaacaatgaacatgatgtgaccagcacagagctggaccccttcctgaccaacctgtctgagagcgagatgtttgccagcgagctgagccgcagcctgacagaggagcagcagcagagaattgaaagaaacaagcagctggccctggagcggcggcaggccaagctgctgagcaacagccagaccctgggcaatgacatgctgatgaacaccccccgggcccacacagtggaggaggtgaacacagatgaggaccagaaggaggagagcaatggcctgaatgaagacatcctggacaacccctgcaatgatgccatcgccaacaccctgaatgaggaggagaccctgctggaccagagcttcaagaatgtgcagcagcagctggatgccaccagcaggaacatcacagaggccaggtag

SEQ ID NO: 108621 - DNA, 603 bp, Artificial Sequence
  derived and/or modified sequence
atgctgatccggcacatggagcactgggcccaccggctgttccccaagctccagtttgaggatttcatcgatcgagtggaatacctggggagtaagaaagaggtccaaacctgtctgaaacgtatccggttggatctaccaattctgcacgaggacttcgtgtcaaataatgatgaagtcgccgagaacaatgagcatgatgtcacgtccacagaattagaccccttcctcacaaatttaagcgagtcagagatgtttgctagcgaactgtcccggtccctgaccgaggagcagcagcaacgcattgagcgtaacaagcagttagcactagagaggagacaggctaagttactatccaatagccagactctcggaaatgatatgctgatgaatacgcctcgggcccacaccgtggaggaagtcaacacggacgaggaccaaaaggaagagtccaatggactgaacgaggacatcctggataatccgtgtaacgatgctatcgccaacacgcttaatgaggaggagacactgcttgaccagtcttttaagaatgtacagcagcaacttgatgccacatcccggaacattacggaggcgagatag

SEQ ID NO: 108622 - DNA, 603 bp, Artificial Sequence
  derived and/or modified sequence
atgctcattaggcatatggagcattgggcacaccgcctgttccccaagctacagttcgaggattttatcgacagggtcgagtatctgggctccaagaaggaagtgcagacgtgcctgaaaaggatccgcctggacttgcccatcctccatgaagattttgtgtctaacaacgatgaagtagcggagaataatgagcatgacgttacttctaccgaattagaccctttcctgactaacctgagtgagtcggaaatgttcgccagtgaactgtcccgaagcctgaccgaggagcaacagcagcgtatcgaacgcaacaaacagcttgccctggagcgcagacaggctaagcttttgtctaactcccagactctgggcaacgatatgctgatgaacactcctcgggctcacacagtggaggaagtgaatactgatgaggaccagaaggaggaatctaacgggttgaacgaggacatactggataatccatgcaatgacgccattgctaacactctaaacgaagaagagacgctgcttgaccagagtttcaagaatgtgcagcagcagcttgacgccacttccaggaatatcacagaggcaagatag

SEQ ID NO: 108623 - protein, 1114 aa, Artificial Sequence
  derived and/or modified sequence
MLKTEKTKPEVLEAHYGSAEPEKVLRVLHRDAILAQEKSIGEDVYEKPISELDRLEEKQKETYRRMLEQLLLAEKCHRRTVYELENEKHKHTDYMNKSDDFTNLLEQERERLKKLLEQEKAYQARKEKENAKRLNKLRDELVKLKSFALMLVDERQMHIEQLGLQSQKVQDLTQKLREEEEKLKAITSKSKEDRQKLLKLEVDFEHKASRFSQEHEEMNAKLANQESHNRQLRLKLVGLTQRIEELEETNKNLQKAEEELQELRDKIAKGECGNSSLMAEVENLRKRVLEMEGKDEEITKTESQCRELRKKLQEEEHHSKELRLEVEKLQKRMSELEKLEEAFSKSKSECTQLHLNLEKEKNLTKDLLNELEVVKSRVKELECSESRLEKAELSLKDDLTKLKSFTVMLVDERKNMMEKIKQEERKVDGLNKNFKVEQGKVMDVTEKLIEESKKLLKLKSEMEEKVYNLTRERDELIGKLKSEEEKSSELSCSVDLLKKRLDGIEEVEREITRGRSRKGSELTCPEDNKIKELTLEIERLKKRLQQLEVVEGDLMKTEDEYDQLEQKFRTEQDKANFLSQQLEEIKHQIAKNKAIEKGEVVSQEAELRHRFRLEEAKSRDLKAEVQALKEKIHELMNKEDQLSQLQVDYSVLQQRFMEEENKNKNMGQEVLNLTKELELSKRYSRALRPSVNGRRMVDVPVTSTGVQTDAVSGEAAEEETPAVFIRKSFQEENHIMSNLRQVGLKKPVERSSVLDRYPPAANELTMRKSWIPWMRKRENGPSITQEKGPRTNSSPGHPGEVVLSPKQGQPLHIRVTPDHENSTATLEITSPTSEEFFSSTTVIPTLGNQKPRITIIPSPNVMPQKQKSGDTTLGPERAMSPVTITTFSREKTPESGRGAFADRPTSPIQIMTVSTSAAPAEIAVSPESQEMPMGRTILKVTPEKQTVPTPVRKYNSNANIITTEDNKIHIHLGSQFKRSPGTSGEGVSPVITVRPVNVTAEKEVSTGTVLRSPRNHLSSRPGASKVTSTITITPVTTSSARGTQSVSGQDGSSQRPTPTRIPMSKGMKAGKPVVAAPGAGNLTKFEPRAETQSMKIELKKSAASSTTSLGGGKG

SEQ ID NO: 108624 - DNA, 4580 bp, Artificial Sequence
  derived and/or modified sequence
acccaacaacacctagcaacagtagaaaaaacttttaaacaaaagtctgggtgggagatatacaacaacttccaatttctgctgatcgggatttcagggagaagaagctgctttccctcctctctactctgtttcctgcatgacttcagctattggctggtcctgggaaagaaagtgggaaaagctttttcctctgtattcttttgggctggatagtttttgagaactcgaatctgtcttgggctgtgagacaagccactgggttcttcaaaggataaactacctacatagaggacatacctttggttaaaggagctgccgtcaggtgggaatgagatctcgaaaccaaggtggtgaaagtgcatctgatgggcatatctcctgtcccaagccctccatcatcggcaatgctggtgaaaaaagtctctcagaagatgcaaaaaagaagaagaaatcaaataggaaggaggatgatgtcatggcctcaggaactgtcaaacgacacctaaaaacatctggagaatgtgaacgaaaaactaagaaatccctggagttatccaaagaagacctcatccaactactcagtataatggaaggggagttgcaggccagagaagatgtgatccacatgctgaagacagagaaaaccaagcctgaggttctggaggctcattacgggtctgcggagccagagaaagtgctgcgggtcctgcaccgagatgccattcttgcccaggagaaatccataggagaagatgtctatgagaaaccgatttcagagctggacagacttgaggaaaaacagaaagaaacctaccggcgcatgctagagcagctgttgctggccgagaagtgtcataggcgcaccgtatacgagttagagaacgagaagcataaacacactgactacatgaacaagagcgacgacttcaccaacctgctggagcaggagcgggagaggttaaaaaagctccttgaacaagaaaaggcttatcaagcccgcaaagaaaaggaaaatgctaaacgactcaataaactaagagatgagcttgttaaactcaaatcctttgcactcatgctggtggatgaaagacaaatgcacattgaacaacttggcctgcaaagccagaaagtacaggatcttactcagaagctgagggaagaagaagagaagctcaaagccattacttccaaatccaaagaagacagacagaaattgctcaagttagaagtggactttgaacacaaggcttcgaggttttctcaagagcatgaagagatgaacgctaaactggctaatcaagagtctcacaataggcaacttagactcaagctggttggcttaacccaaagaatcgaggagctagaagagaccaacaaaaatctgcagaaggcagaggaagaacttcaagaattaagagataaaattgccaaaggagaatgtggaaactctagcctcatggcagaagtggaaaatcttcgaaagcgtgtgcttgaaatggaaggtaaagatgaggagatcactaaaactgaatcccagtgtagggaattgaggaagaagctgcaagaggaagaacaccatagtaaggagctcagacttgaagttgagaagctacagaagagaatgtctgaactagagaaattggaagaagcatttagcaagagtaaatctgagtgcacccagctacatttaaatctggagaaagaaaagaacttaaccaaagacctgctaaatgaattggaggtggtcaagagtcgagttaaagaattggaatgttctgaaagtagattggaaaaggctgaattaagcctaaaagatgatcttaccaagttgaagtcatttaccgtgatgctggttgatgaaaggaaaaatatgatggaaaaaataaaacaagaagagagaaaagtggatggactcaataaaaattttaaggtggaacaaggaaaagttatggatgtaactgaaaaactaattgaagaaagtaagaaacttttaaaactaaaatctgaaatggaggaaaaagtatacaacttgacaagagaaagagatgagttgataggcaaattgaaaagtgaagaagaaaaatcctctgaattaagctgcagtgttgacttactaaagaagagacttgatggtatagaggaagtggaaagagaaataacaagaggaaggtcacgaaaagggtctgagctcacctgcccggaagataataagattaaggaactaacacttgaaattgagagactgaagaaacgtctccaacaattggaagtggtcgaaggggatttgatgaagacagaagatgagtatgatcagctggaacagaaatttagaactgagcaggataaggctaacttcctctctcaacaactagaggagatcaagcaccaaattgccaagaataaagcaatagagaagggtgaggttgtgagccaggaagctgaactgagacacagatttcggttggaagaagctaaaagtcgagacttaaaagccgaagtacaagctcttaaagagaagattcacgaattaatgaacaaagaagatcagctttctcagctccaggtagattattctgtacttcaacaaagatttatggaagaagaaaataagaacaaaaacatggggcaggaggttctcaatctgaccaaagagttggagctttccaagcgctacagcagagctcttaggcccagtgtgaatggaagaagaatggtggatgttcctgtgacgtcaactggagtccaaactgatgcagtcagcggtgaagcagcagaggaagaaacgccagctgtattcatacggaaatccttccaggaagaaaatcatattatgagtaatcttcggcaggtgggattgaagaaacccgtggaaagatcttctgttctagacaggtatcctccagcagcaaatgagctcactatgagaaagtcttggattccatggatgagaaagagggaaaacggcccctccatcactcaggagaaagggccccgaacaaattccagtccagggcacccaggagaggtagtcctttcaccaaagcagggccagcccctgcatattcgagtgacaccagaccacgagaacagcactgcgactttggagataacaagcccgacatctgaagaatttttttctagtaccactgtcattcctaccttagggaatcagaaaccaagaataaccattattccatcaccaaacgttatgcctcaaaaacaaaaaagtggagatactactcttggcccagaacgagccatgtccccagtcacaattactacattttccagagagaagactccagaaagtggaagaggcgcatttgcagacaggcccacatcccctattcagataatgacggtgtctacatcagcagcaccagctgagattgcagtttctcccgaatcccaggaaatgcccatgggacggacaatcctcaaagtcaccccagaaaaacagactgttccaactccagtacggaaatacaactccaatgccaatatcataaccacagaggacaataaaattcacattcacttagggtctcagtttaaacggtcccctgggacttcaggtgaaggagtcagtccagttattactgtccgaccagtaaacgtgacagccgaaaaggaggtttccaccggcactgtccttcgctctcccaggaatcacctctcctcacggcctggtgcaagcaaagtgacgagcactatcaccataacaccggtcacaacgtcatctgctcgaggaacccagtcagtgtcaggacaagacgggtcatcccagcggcctacacccacccgcattcctatgtcaaaaggtatgaaagcaggaaagccagtagtggcagccccaggagcaggaaatctgaccaaattcgagcctcgagctgagactcagtctatgaaaatagagctgaagaaatctgcagccagcagcaccacctctctcggaggggggaagggctgagggcagtggctaagggggtatgttgtgcagatgctactgctgccgtgaaagtgaaccttcatctgtttgtgccagttctttacatgtactaatttaagttttaaatattgtgtttataaaataaccaactaataaccatttgtctttcccattttgtgcatttgttttgatgctggggaacaaaattagcaaaactattgcttgctgcctagaagccagggcgtggtttctagttccagttttgcttctagcaagtggacccatcaatagacccatctgagcctgtttcctcatcagttagatgtggggactcaatcacacgctcttcaagtccggctcccatatttcctaattgcaagccaaatttaatgtaccttgttccacaataattttttattaaaaaaatcctattacaaaataagacatactttaactattgtcatttgcctctttcacatcatgaatttgctttatgtgctggaaaaaacatcacatagctatcacagggcctggacctctaaaattttgcaaaaacaaaaggttctaagatgatttcaggaaataatgtgaacatgtaataaaatggaaatgaaatatggaatcctaa

SEQ ID NO: 108625 - protein, 187 aa, Artificial Sequence
  derived and/or modified sequence
MTAHSFALPVIIFTTFWGLVGIAGPWFVPKGPNRGVIITMLVATAVCCYLFWLIAILAQLNPLFGPQLKNETIWCPALGMTVAPLSLTTPSSGPSPTQLCLVTSSLLLAPRDPDPQGLPGSWKSSQSSQPARALGSPGHSSGRGDVLLQYPHCSGVCPLSQGDAAGELVWVGSFPLQTGQMPGLSPS

SEQ ID NO: 108626 - DNA, 564 bp, Artificial Sequence
  derived and/or modified sequence
atgaccgcccatagcttcgccctgcccgtaattattttcaccaccttttggggccttgttggtatagctggcccctggttcgtacctaaggggcctaatcggggtgtcattatcacaatgctggttgccacagccgtgtgctgctacctgttttggttgattgccatccttgcgcaattaaacccattattcggcccccagctcaaaaacgagactatctggtgtcccgccctgggcatgaccgtggcacccttgtctcttacaacaccttccagtggtccaagccccacacagctgtgtctcgtcacatcctcactcctcctggctccaagagatcctgacccccagggcctgccagggagttggaaatcctcacagtcttcgcaaccagccagagctcttggttcaccagggcactctagcgggcgcggcgacgttttgcttcagtacccacattgcagtggagtgtgccctttatcacagggtgacgccgccggcgagctggtgtgggtgggcagcttccccctccagaccggccagatgcccggcctgtccccttcttag

SEQ ID NO: 108627 - DNA, 564 bp, Artificial Sequence
  derived and/or modified sequence
atgacagcccacagctttgccctgcctgtgatcatcttcaccaccttctggggcctggtgggcattgctggcccctggtttgtgcccaagggccccaacagaggagtcatcatcaccatgctggtggccacagctgtgtgctgctacctgttctggctgattgccatcctggcccagctgaaccccctgtttggcccccagctgaagaatgagaccatctggtgcccagccctgggcatgacagtggcccccctgagcctgaccacccccagcagcggccccagccccacccagctgtgcctggtgaccagcagcctgctgctggccccccgggaccctgacccccagggcctgcccggctcctggaagagcagccagagcagccagcctgcccgggccctgggcagccctggccacagcagcggcagaggagatgtgctgctgcagtacccccactgcagcggcgtgtgccccctgagccagggagatgctgctggggagctggtgtgggtgggcagcttccccctgcagacaggccagatgcctggcctgagccccagctag

SEQ ID NO: 108628 - DNA, 564 bp, Artificial Sequence
  derived and/or modified sequence
atgaccgcccacagcttcgccctgcccgtgatcatcttcaccaccttctggggcctggttggtatcgccgggccttggtttgtgccgaagggtcccaacagaggcgtgattatcactatgttagtcgcgaccgctgtgtgttgctatctgttttggctcatagccatactggctcaactgaatccactttttggcccgcaactgaaaaacgagactatctggtgccctgcattggggatgactgtggcccccctttctttgaccacaccttcttcaggacccagccctactcaactctgtcttgtcacctcaagcttactgctggcccctcgggaccctgatcctcagggcctgcctggatcttggaagagtagccaatctagtcaaccagcccgcgcactgggctcacccggtcactcaagcggtcgaggggacgttctgttgcagtatcctcattgtagtggtgtttgtcccctgagccagggagacgcggcgggcgaattagtatgggtcggcagctttccgctgcagaccggacagatgcccggtctcagcccatcatag

SEQ ID NO: 108629 - DNA, 546 bp, Artificial Sequence
  derived and/or modified sequence
atgagaccatccggtacatgcgcttcgtgtggtagcgatccaccgccacctacccaagtgccctctagtcgcaatgactgtggcagcacagtcccggacaacccctttgtgagaacgcttcctcacacaaccatgagtggccaccagctccccccagcgggtacccagcgtcctggacctgccgcatgtcttgtccctggctccctcccctcactgccctcccagcccggtccatggggggctttggggaccgccgcagccgagggtatgagttgcagtaatacgaggacagcactggaatttgccctgtttcccaaagaaatgctactgggaagctggtatggctggggtttgtctttatacaggcgtggacgatgccaagactccgcacacccggaagaggatacctgcccccatggcgaaggcgctcctgctcaggctggagagtcggtgcctagccaacagctatgtcatcaccccgctggaaactggggtggtctctactgggtgatcggtaaagctttttcccttgcatggaattgctag

SEQ ID NO: 108630 - DNA, 564 bp, Artificial Sequence
  derived and/or modified sequence
atgacagcacacagtttcgccctccccgtcatcatctttacgaccttttggggtttggtagggatcgccggtccttggtttgtgcctaaggggccaaacaggggagtaatcatcaccatgctggtcgccacagcggtctgctgttacctcttctggctgatcgcaatcttagctcagttaaacccacttttcggaccacaactgaagaacgagacaatttggtgccccgcactcggaatgactgtggcacccctatccctcacaactccatcttcaggacccagtcctactcagttgtgccttgtcacaagcagtctgctgctagcacccagggatcccgacccccagggactcccgggatcttggaagtcttctcaatcatcccaacccgcacgggcactggggtctccgggacactccagtgggcgaggggacgtgctattacaatacccacattgctcgggagtttgcccattgtcccagggcgacgccgctggagaattagtctgggtggggtcgtttcctctccaaacggggcagatgcccggtctgtcaccttcctag

SEQ ID NO: 108631 - DNA, 2716 bp, Artificial Sequence
  derived and/or modified sequence
gttgctagagataccgcctggaggccactgatctgtaaaagggatctctacagaagatagggatttttgatcgccagagaagaagggatatgtgagatccaaacgccgaaggaggaaagcaggctccgtggtctcttccagccctgatggaagaaactaccgagccttattatactaggtgctttccacatgcctattcatttaatcctccagcaaccttgtaagaagggccatcccattttatatttaaacaaaccttaactactgacgcaaggagtcaaggatctaatcccaaagcctctgcctggttcgctgcagatggatgtccgcgaggacgccagccctccgcctcccgccgggtccctgaacgccggcccggccggtccaacctcattccgcttcccgccatcgaaacgcgaagcccccgccttcccccaaacgtctcagcgccgctggggcctttctggctgcgccgcctccgaccccaggccccggtccgcgcccgccgctcgctagtcctgggagtgaggagaacgcgtgctgaggacccggccagagggacagcggggaccgccctcccgctgcgtctctgaaagcgaggccgttcctcccgcgtccgacccccgcggggccgtcaggttcggggcggcccaggctgcgggtccgcagggcgcttcgggccgagccggcgcggcgcgtgaagggcaggggacgccccgaaagaccgctggggtgggaccccaagctccaggggtctttggaaataagaatgcggcgtgacgttggctgtgcgggcgcggggctgacgcggaccctataacccatcgccgaaaccgggcggccgcgcccctattcctcggcatttctctctgtccgcggccctgctcagccaatcagcgagtgggctcctaggcaggtcctgagtgacagcgcggcgggctggatcaggagatgcgcgtgcgcggcccggcccggctgatcgcttcgggtgctcgactcctgttgcgcatgctcagcgcgctgcccggctggggacccgcgcacctgcagcgcccgctgctcggccctgcatcctgcctgggcatcctgcgcccggccatgacggcgcactcattcgccctcccggtcatcatcttcaccacgttctggggcctcgtcggcatcgccgggccctggttcgtgccgaagggacccaaccgcggagtgatcatcaccatgctggtcgccaccgccgtctgctgttacctcttctggctcatcgccatcctggcgcagctgaaccccctgttcgggccccagctgaagaatgagaccatctggtacgtgcgcttcctgtgggagtgacccgccgcccccgacccaggtgcccagctctcggaatgactgtggctccactgtccctgacaaccccttcgtccggaccctcccccacacaactatgtctggtcaccagctccctcctgctggcacccagagacccggacccgcagcctgcctggttcctggaagtcttcccagtcttcccagccagcccgggccctggggagccctgggcacagcagcggccgaggggatgtcctgctccaatacccgcactgctctggagtttgccctctttcccaaggagatgctgctggggagctggtatgggtggggtctttccctttacagacggggcagatgccaggactcagcccatcctgaggaggacacgtgtcctcatggagagggtgctccggcccaggcgggggagtcagtgcccagtcagcagctctgccaccatcctgctgggaactgggggggcctctattgggttataggcaaggccttttctctggcatggaattgttaattttctgacacgtctagatgtgaaatttctgaaaatgttgaagcagagaaacattcacacacaaaaagcaacatagtcatgtgggtccagatggcctcagtcctagatgttggcaccctttgctgtgtctcctcagagtatcctgttccgcctcctgccacctggacctccctcagtggatgtcttccctcccccgaccccagcctgtcagtccgagcacagtgcaggtttggctctgacttgggcttttggctgcagtgggggtggatttcagagcctctcatggcagcatctaagtgaccagagctgggatgagagaggggaaggggcaatgtgagtggcgctatgggacgggccagccctgctcctgagccagccccgccctctgccccctggccctgggctctgtgctagggatggtgaagaatgggggcgtgccagcctggcaggagtgggaagcaacacgcaggggtcccggacctctccagccttgccctcacgcttacccgagctcccagtgtggttagcacagagctcacccaccttgcctggctcccagctggggcctgtcctcactggtgctccaggggaagaaacgacagcctcacttctgtatggactgctgatgtggcctgccatcctgttcagcgggcattgtctttggagcagcaggagaataggatgcctctcactcacatgccagttcctggctggccagctgctcagggctcaggctggggcctcccattgacatcctccccctacactccctctctgagcctccgtcgcccctcctgttgggtaagggtgttgagtgtgacttgtgctgaaaacctggttcatatataataaataatggtgatg

SEQ ID NO: 108632 - DNA, 2722 bp, Artificial Sequence
  derived and/or modified sequence
gttgctagagataccgcctggaggccactgatctgtaaaagggatctctacagaagatagggatttttgatcgccagagaagaagggatatgtgagatccaaacgccgaaggaggaaagcaggctccgtggtctcttccagccctgatggaagaaactaccgagccttattatactaggtgctttccacatgcctattcatttaatcctccagcaaccttgtaagaagggccatcccattttatatttaaacaaaccttaactactgacgcaaggagtcaaggatctaatcccaaagcctctgcctggttcgctgcagatggatgtccgcgaggacgccagccctccgcctcccgccgggtccctgaacgccggcccggccggtccaacctcattccgcttcccgccatcgaaacgcgaagcccccgccttcccccaaacgtctcagcgccgctggggcctttctggctgcgccgcctccgaccccaggccccggtccgcgcccgccgctcgctagtcctgggagtgaggagaacgcgtgctgaggacccggccagagggacagcggggaccgccctcccgctgcgtctctgaaagcgaggccgttcctcccgcgtccgacccccgcggggccgtcaggttcggggcggcccaggctgcgggtccgcagggcgcttcgggccgagccggcgcggcgcgtgaagggcaggggacgccccgaaagaccgctggggtgggaccccaagctccaggggtctttggaaataagaatgcggcgtgacgttggctgtgcgggcgcggggctgacgcggaccctataacccatcgccgaaaccgggcggccgcgcccctattcctcggcatttctctctgtccgcggccctgctcagccaatcagcgagtgggctcctaggcaggtcctgagtgacagcgcggcgggctggatcaggagatgcgcgtgcgcggcccggcccggctgatcgcttcgggtgctcgactcctgttgcgcatgctcagcgcgctgcccggctggggacccgcgcacctgcagcgcccgctgctcggccctgcatcctgcctgggcatcctgcgcccggccatgacggcgcactcattcgccctcccggtcatcatcttcaccacgttctggggcctcgtcggcatcgccgggccctggttcgtgccgaagggacccaaccgcggagtgatcatcaccatgctggtcgccaccgccgtctgctgttacctcttctggctcatcgccatcctggcgcagctgaaccccctgttcgggccccagctgaagaatgagaccatctggtacgtgcgcttcctgtgggagtgacccgccgcccccgacccaggtgcccagctctcggaatgactgtggctccactgtccctgacaaccccttcgtccggaccctcccccacacaactatgtctggtcaccagctccctcctgctggcacccagagacccggacccgcagggcctgcctggttcctggaagtcttcccagtcttcccagccagcccgggccctggggagccctgggcacagcagcggccgaggggatgtcctgctccaatacccgcactgctctggagtttgccctctttcccaaggagatgctgctggggagctggtatgggtggggtctttccctttacagacggggcagatgccaggactcagcccatcctgaggaggacacgtgtcctcatggagagggtgctccggcccaggcgggggagtcagtgcccagtcagcagctctgccaccatcctgctgggaactgggggggcctctattgggttataggcaaggccttttctctggcatggaattgttaattttctgacacgtctagatgtgaaatttctgaaaatgttgaagcagagaaacattcacacacaaaaagcaacatagtcatgtgggtccagatggcctcagtcctagatgttggcaccctttgctgtgtctcctcagagtatcctgttccgcctcctgccacctggacctccctcagtggatgtcttccctcccccgaccccagcctgtcagtccgagcacagtgcaggtttggctctgacttgggcttttggctgcagtgggggtggatttcagagcctctcatggcagcatctaagtgaccagagctgggatgagagaggggaaggggcaatgtgagtggcgctatgggacgggccagccctgctcctgagccagccccgccctctgccccctggccctgggctctgtgctagggatggtgaagaatgggggcgtgccagcctggcaggagtgggaagcaacacgcaggggtcccggacctctccagccttgccctcacgcttacccgagctcccagtgtggttagcacagagctcacccaccttgcctggctcccagctggggcctgtcctcactggtgctccaggggaagaaacgacagcctcacttctgtatggactgctgatgtggcctgccatcctgttcagcgggcattgtctttggagcagcaggagaataggatgcctctcactcacatgccagttcctggctggccagctgctcagggctcaggctggggcctcccattgacatcctccccctacactccctctctgagcctccgtcgcccctcctgttgggtaagggtgttgagtgtgacttgtgctgaaaacctggttcatatataataaataatggtgatgaaaa

SEQ ID NO: 108633 - DNA, 1764 bp, Artificial Sequence
  derived and/or modified sequence
gctgcccggctggggacccgcgcacctgcagcgcccgctgctcggccctgcatcctgcctgggcatcctgcgcccggccatgacggcgcactcattcgccctcccggtcatcatcttcaccacgttctggggcctcgtcggcatcgccgggccctggttcgtgccgaagggacccaaccgcggagtgatcatcaccatgctggtcgccaccgccgtctgctgttacctcttctggctcatcgccatcctggcgcagctgaaccccctgttcgggccccagctgaagaatgagaccatctggtacgtgcgcttcctgtgggagtgacccgccgcccccgacccagcgcttcaccccaaggcaagaccctaacctgggccctaacctggacggagggagggaaagggtgcccagctctcggaatgactgtggctccactgtccctgacaaccccttcgtccggaccctcccccacacaactatgtctggtcaccagctccctcctgctggcacccagagacccggacccgcagggcctgcctggttcctggaagtcttcccagtcttcccagccagcccgggccctggggagccctgggcacagcagcggccgaggggatgtcctgctccaatacccgcactgctctggagtttgccctctttcccaaggagatgctgctggggagctggtatgggtggggtctttccctttacagacggggcagatgccaggactcagcccatcctgaggaggacacgtgtcctcatggagagggtgctccggcccaggcgggggagtcagtgcccagtcagcagctctgccaccatcctgctgggaactgggggggcctctattgggttataggcaaggccttttctctggcatggaattgttaattttctgacacgtctagatgtgaaatttctgaaaatgttgaagcagagaaacattcacacacaaaaagcaacatagtcatgtgggtccagatggcctcagtcctagatgttggcaccctttgctgtgtctcctcagagtatcctgttccgcctcctgccacctggacctccctcagtggatgtcttccctcccccgaccccagcctgtcagtccgagcacagtgcaggtttggctctgacttgggcttttggctgcagtgggggtggatttcagagcctctcatggcagcatctaagtgaccagagctgggatgagagaggggaaggggcaatgtgagtggcgctatgggacgggccagccctgctcctgagccagccccgccctctgccccctggccctgggctctgtgctagggatggtgaagaatgggggcgtgccagcctggcaggagtgggaagcaacacgcaggggtcccggacctctccagccttgccctcacgcttacccgagctcccagtgtggttagcacagagctcacccaccttgcctggctcccagctggggcctgtcctcactggtgctccaggggaagaaacgacagcctcacttctgtatggactgctgatgtggcctgccatcctgttcagcgggcattgtctttggagcagcaggagaataggatgcctctcactcacatgccagttcctggctggccagctgctcagggctcaggctggggcctcccattgacatcctccccctacactccctctctgagcctccgtcgcccctcctgttgggtaagggtgttgagtgtgacttgtgctgaaaacctggttcatatataataaataatggtgatgaaaag

SEQ ID NO: 108634 - DNA, 1666 bp, Artificial Sequence
  derived and/or modified sequence
atgctcagcgcgctgcccggctggggacccgcgcacctgcagcgcccgctgctcggccctgcatcctgcctgggcatcctgcgcccggccatgacggcgcactcattcgccctcccggtcatcatcttcaccacgttctggggcctcgtcggcatcgccgggccctggttcgtgccgaagggacccaaccgcggagtgatcatcaccatgctggtcgccaccgccgtctgctgttacctcttctggctcatcgccatcctggcgcagctgaaccccctgttcgggccccagctgaagaatgagaccatctggtgcccagctctcggaatgactgtggctccactgtccctgacaaccccttcgtccggaccctcccccacacaactatgtctggtcaccagctccctcctgctggcacccagagacccggacccgcagggcctgcctggttcctggaagtcttcccagtcttcccagccagcccgggccctggggagccctgggcacagcagcggccgaggggatgtcctgctccaatacccgcactgctctggagtttgccctctttcccaaggagatgctgctggggagctggtatgggtggggtctttccctttacagacggggcagatgccaggactcagcccatcctgaggaggacacgtgtcctcatggagagggtgctccggcccaggcgggggagtcagtgcccagtcagcagctctgccaccatcctgctgggaactgggggggcctctattgggttataggcaaggccttttctctggcatggaattgttaattttctgacacgtctagatgtgaaatttctgaaaatgttgaagcagagaaacattcacacacaaaaagcaacatagtcatgtgggtccagatggcctcagtcctagatgttggcaccctttgctgtgtctcctcagagtatcctgttccgcctcctgccacctggacctccctcagtggatgtcttccctcccccgaccccagcctgtcagtccgagcacagtgcaggtttggctctgacttgggcttttggctgcagtgggggtggatttcagagcctctcatggcagcatctaagtgaccagagctgggatgagagaggggaaggggcaatgtgagtggcgctatgggacgggccagccctgctcctgagccagccccgccctctgccccctggccctgggctctgtgctagggatggtgaagaatgggggcgtgccagcctggcaggagtgggaagcaacacgcaggggtcccggacctctccagccttgccctcacgcttacccgagctcccagtgtggttagcacagagctcacccaccttgcctggctcccagctggggcctgtcctcactggtgctccaggggaagaaacgacagcctcacttctgtatggactgctgatgtggcctgccatcctgttcagcgggcattgtctttggagcagcaggagaataggatgcctctcactcacatgccagttcctggctggccagctgctcagggctcaggctggggcctcccattgacatcctccccctacactccctctctgagcctccgtcgcccctcctgttgggtaagggtgttgagtgtgacttgtgctgaaaacctggttcatatataataaataatggtgatg

SEQ ID NO: 108635 - DNA, 564 bp, Artificial Sequence
  derived and/or modified sequence
atgaccgcccacagcttcgccctgcccgtgatcatcttcaccaccttctggggcctggtgggcatcgccggcccctggttcgtgcccaagggccccaacagaggcgtgatcatcaccatgctggtggccaccgccgtgtgctgctacctgttctggctgatcgccatcctggcccagctgaaccccctgttcggcccccagctgaagaacgagaccatctggtgccccgccctgggcatgaccgtggcccccctgagcctgaccacccccagcagcggccccagccccacccagctgtgcctggtgaccagcagcctgctgctggcccccagagaccccgacccccagggcctgcccggcagctggaagagcagccagagcagccagcccgccagagccctgggcagccccggccacagcagcggcagaggcgacgtgctgctgcagtacccccactgcagcggcgtgtgccccctgagccagggcgacgccgccggcgagctggtgtgggtgggcagcttccccctgcagaccggccagatgcccggcctgagccccagctag

SEQ ID NO: 108636 - protein, 462 aa, Artificial Sequence
  derived and/or modified sequence
MQLRKMQTVKKEQASLDASSNVDKMMVLNSALTEVSEDSTTGEELLLSEGSVGKNKSSACRRKREFIPDEKKDAMYWEKRRKNNEAAKRSREKRRLNDLVLENKLIALGEENATLKAELLSLKLKFGLISSTAYAQEIQKLSNSTAVYFQDYQTSKSNVSSFVDEHEPSMVSSSCISVIKHSPQSSLSDVSEVSSVEHTQESSVQGSCRSPENKFQIIKQEPMELESYTREPRDDRGSYTASIYQNYMGNSFSGYSHSPPLLQVNRSSSNSPRTSETDDGVVGKSSDGEDEQQVPKGPIHSPVELKHVHATVVKVPEVNSSALPHKLRIKAKAMQIKVEAFDNEFEATQKLSSPIDMTSKRHFELEKHSAPSMVHSSLTPFSVQVTNIQDWSLKSEHWHQKELSGKTQNSFKTGVVEMKDSGYKVSDPENLYLKQGIANLSAEVVSLKRLIATQPISASDSG

SEQ ID NO: 108637 - DNA, 2104 bp, Artificial Sequence
  derived and/or modified sequence
acgtagcgcggcgctcggaactgacctactaacacacatctctccgcgcggccacggcgcccgcggacccggcgcgcccgcccgcctcccgcgccgcgccctcgccgccgcccgcctcccgccgcggccccggaggcccggcccggcccgagccccgagcgccggcggcccgactcccggccgcccctttctttctcctcgccggcccgagagcaggaacacgataacgaaggaggcccaacttcattcaataaggagcctgacggatttatcccagacggtagaacaaaaggaagaatattgatggattttaaaccagagtttttaaagagcttgagaatacggggaaattaatttgttctcctacacacatagatagggtaaggttgtttctgatgcagctgagaaaaatgcagaccgtcaaaaaggagcaggcgtctcttgatgccagtagcaatgtggacaagatgatggtccttaattctgctttaacggaagtgtcagaagactccacaacaggtgaggagctgcttctcagtgaaggaagtgtggggaagaacaaatcttctgcatgtcggaggaaacgggaattcattcctgatgaaaagaaagatgctatgtattgggaaaaaaggcggaaaaataatgaagctgccaaaagatctcgtgagaagcgtcgactgaatgacctggttttagagaacaaactaattgcactgggagaagaaaacgccactttaaaagctgagctgctttcactaaaattaaagtttggtttaattagctccacagcatatgctcaagagattcagaaactcagtaattctacagctgtgtactttcaagattaccagacttccaaatccaatgtgagttcatttgtggacgagcacgaaccctcgatggtgtcaagtagttgtatttctgtcattaaacactctccacaaagctcgctgtccgatgtttcagaagtgtcctcagtagaacacacgcaggagagctctgtgcagggaagctgcagaagtcctgaaaacaagttccagattatcaagcaagagccgatggaattagagagctacacaagggagccaagagatgaccgaggctcttacacagcgtccatctatcaaaactatatggggaattctttctctgggtactcacactctcccccactactgcaagtcaaccgatcctccagcaactccccgagaacgtcggaaactgatgatggtgtggtaggaaagtcatctgatggagaagacgagcaacaggtccccaagggccccatccattctccagttgaactcaagcatgtgcatgcaactgtggttaaagttccagaagtgaattcctctgccttgccacacaagctccggatcaaagccaaagccatgcagatcaaagtagaagcctttgataatgaatttgaggccacgcaaaaactttcctcacctattgacatgacatctaaaagacatttcgaactcgaaaagcatagtgccccaagtatggtacattcttctcttactcctttctcagtgcaagtgactaacattcaagattggtctctcaaatcggagcactggcatcaaaaagaactgagtggcaaaactcagaatagtttcaaaactggagttgttgaaatgaaagacagtggctacaaagtttctgacccagagaacttgtatttgaagcaggggatagcaaacttatctgcagaggttgtctcactcaagagacttatagccacacaaccaatctctgcttcagactctgggtaaattactactgagtaagagctgggcatttagaaagatgtcatttgcaatagagcagtccattttgtattatgctgaattttcactggacctgtgatgtcatttcactgtgatgtgcacatgttgtctgtttggtgtctttttgtgcacagattatgatgaagattagattgtgttatcactctgcctgtgtatagtcagatagtccatgcgaaggctgtatatattgaacattatttttgttgttctattataaagtgtgtaagttaccagtttcaataaaggattggtgacaaacacagaaaaaaaaaaaaaaaaaaaaa

SEQ ID NO: 108638 - DNA, 96 bp, Artificial Sequence
  derived and/or modified sequence
agaaaggattcgaatggaatgaaaaagaattgaatggaatagaacagaatggaatcaaatcgaatgaaatggaatggaatagaaaggaatggaatg

SEQ ID NO: 108639 - DNA, 1389 bp, Artificial Sequence
  derived and/or modified sequence
atgcaactgcggaagatgcaaaccgtcaagaaggagcaggccagtctggacgcctcttccaacgtggacaaaatgatggtcctgaacagcgcccttacagaagtgagtgaggactcaaccacaggcgaggagttactcctctccgaaggttcagttggaaaaaataagagttctgcatgccggcggaagagggagttcatacccgacgaaaagaaagacgccatgtactgggagaaaaggcgcaagaataatgaagctgctaaacgtagtcgcgagaagagacgcctaaacgaccttgtgctggagaacaagctgatagctctgggggaggaaaacgccacactgaaggccgagctgctgtcactgaagctgaaatttggtctcataagtagcactgcctacgcccaggagatccaaaaactgagtaactccaccgcagtctattttcaggactatcagacgtccaagagcaacgtcagtagtttcgtagatgagcacgagccatcaatggtatcttccagctgcatttccgtaatcaaacactctccacagagcagcctgtccgacgtgtctgaagtgtcttcggttgagcacacccaggaaagctccgtgcagggctcctgtagaagccccgagaataagttccagattatcaaacaagaacctatggagctcgagtcttacacaagggaaccaagagatgatcgcggatcttacaccgcatcaatatatcagaattatatgggtaacagctttagcgggtattcacattcacctcctctgctgcaggtaaatcgcagctcttccaattcaccaaggacatctgaaactgacgacggcgtagtcggtaagtcttcagacggcgaggatgagcagcaggtgccaaaaggtcctattcacagccctgtggaactaaaacacgtgcacgctacagtagttaaagtccccgaggtcaactctagcgccctgcctcacaaattacgaataaaggccaaggccatgcagattaaagttgaggcgttcgacaatgagtttgaggccacacagaagttgagtagccccatcgatatgacgtctaagcgtcactttgagctggagaagcatagcgcaccttccatggtgcacagttcccttacaccattctctgttcaggttacaaacatccaggattggtcactgaaatctgaacactggcatcagaaggagctaagtgggaagacgcagaattcttttaagacaggggttgtagaaatgaaggactcagggtataaagtttccgatccggagaatctttatctgaagcaggggatagctaatttgtcagcagaggtggtcagcctgaaaagattgatcgccacgcagccaatctctgcttccgacagcgggtag

SEQ ID NO: 108640 - DNA, 1389 bp, Artificial Sequence
  derived and/or modified sequence
atgcaactgcgaaaaatgcagactgtgaaaaaggagcaggcctccctcgatgcctcctctaacgttgacaagatgatggtgttgaactccgcactgaccgaggtttccgaagatagcacaaccggagaggagcttctgttgtcagaaggctccgttggcaaaaataagagctccgcttgtagaagaaagcgcgagttcatcccagatgaaaagaaggatgctatgtactgggagaagcgtcgcaagaataatgaggctgctaagcgctctagagagaaaaggagacttaacgatctagtgctcgaaaacaaactcattgccctgggcgaggaaaatgcgaccttgaaggcagagttgcttagtttgaaattgaaatttggcctcatttctagcactgcctacgcacaggagatccagaagctatctaactccacagctgtgtattttcaggactatcagacatccaaatctaacgtcagtagctttgtggatgaacatgagcctagcatggtatcctcctcttgcatctcagtcattaagcacagcccccagtccagcctttccgacgtgtctgaggtctcctcagtggagcacactcaggaatctagcgtgcagggctcatgtagatcacctgaaaacaagttccaaatcattaagcaggaaccaatggaattggaaagttacacgagagaacctcgggatgacagagggagttatacagcctctatatatcaaaactacatgggcaactctttttccggctattcccactcgcccccacttctacaggttaacagaagttcaagtaacagcccacgtacctctgagactgacgatggggtcgtcggtaagagcagcgacggtgaagatgagcagcaagtgcctaaaggaccgatccactccccagtcgagctgaaacacgttcacgcaactgttgtaaaagtccccgaagtgaactccagcgcacttccccacaagctccgtataaaggctaaagctatgcagataaaggttgaagccttcgacaacgaatttgaagctactcagaagctgtcctcccctatcgacatgacatctaagcgacactttgagttagaaaagcatagcgcacctagcatggttcacagttctctgaccccctttagtgttcaagttactaacatacaggattggagcctaaagtcagaacactggcatcagaaagagctgagcggtaagacgcagaatagttttaagactggggttgttgagatgaaagacagcgggtataaggtcagtgaccctgaaaatctgtacttaaaacaagggatcgctaacctgagcgcagaagtggtctccctgaaacgactcatcgcaactcagccaatatctgcctctgatagtggttag

SEQ ID NO: 108641 - DNA, 1389 bp, Artificial Sequence
  derived and/or modified sequence
atgcagctgaggaagatgcagacagtgaagaaggagcaggccagcctggatgccagcagcaatgtggacaagatgatggtgctgaacagcgccctgacagaggtgtctgaggacagcaccactggagaggagctgctgctgtctgagggctctgtgggcaagaacaagagcagcgcctgcaggaggaagcgggagttcatcccagatgagaagaaggatgccatgtactgggagaagaggaggaagaacaatgaggccgccaagaggagccgggagaagaggcggctgaatgacctggtgctggagaacaagctgattgccctgggggaggagaatgccaccctgaaggccgagctgctgagcctgaagctgaagtttggcctcatcagcagcacagcctatgcccaggagatccagaagctgagcaacagcacagctgtgtacttccaggactaccagaccagcaagagcaatgtgtcctcctttgtggatgagcacgagcccagcatggtgagcagcagctgcatcagcgtcatcaagcacagcccccagagcagcctgagtgatgtgtctgaggtgtcctctgtggagcacacccaggagagctctgtgcagggcagctgccgcagccctgagaacaagttccagatcatcaagcaggagcccatggagctggagagctacacccgggagcccagagatgaccggggcagctacacagccagcatctaccagaactacatgggcaacagcttcagcggctacagccacagcccccccctgctgcaggtgaacagaagcagcagcaacagccccaggaccagcgagacagatgatggagtggtgggcaagagcagtgatggagaagatgagcagcaggtgcccaagggccccatccacagccctgtggagctgaagcacgtgcacgccaccgtggtgaaggtgcctgaggtgaacagcagcgccctgccccacaagctgcgcatcaaggccaaggccatgcagatcaaggtggaggcctttgacaatgaatttgaggccacccagaagctgagcagccccatcgacatgaccagcaagaggcactttgagctggagaagcacagcgcccccagcatggtgcacagcagcctgacccccttctctgtgcaggtgaccaacatccaggactggagcctgaagtctgagcactggcaccagaaggagctgagcggcaagacccagaacagcttcaagacaggagtggtggagatgaaggacagcggctacaaggtgtctgaccctgaaaatctctacctgaagcagggcatcgccaacctgtctgctgaggtggtgtccctgaagaggctgattgccacccagcccatcagcgccagtgacagcggctag

SEQ ID NO: 108642 - DNA, 1389 bp, Artificial Sequence
  derived and/or modified sequence
atgcagctgcggaagatgcagaccgtgaagaaggagcaggccagcctggacgccagttctaacgtggataagatgatggtgctgaatagcgcattgaccgaggtgtctgaagacagcaccaccggggaggaactcttgttgtctgaaggtagtgtgggcaaaaacaaatcaagtgcttgtcggagaaagagggagttcatccctgatgagaagaaggacgctatgtactgggaaaagcggagaaagaacaatgaagctgcaaagcggagcagagagaagcgccgtctcaacgacttggtgctcgaaaataagctcatagcactcggagaggaaaacgctacattgaaagccgaacttttgagcttgaagctcaagttcggtctgattagcagtacggcttacgctcaggagatacagaagttgtctaattccacagcagtttatttccaggattatcagacttccaaatccaacgttagcagttttgtggacgagcacgagcccagtatggtctcatcctcctgtataagcgtaattaagcattctccacagtcaagcctgtctgatgtgtccgaggtctccagcgtagagcacacacaggagagctccgttcaaggatcctgtcggagccccgaaaacaagttccaaattattaaacaagagccaatggagctggagtcttacaccagggaaccaagagacgacagagggtcatacactgctagtatttatcagaactatatggggaattctttcagtgggtattcacactcgccaccccttctacaggtgaatcggagcagctctaacagcccccggacatccgaaactgatgacggcgtcgtggggaaaagtagcgacggcgaggacgagcagcaggtacccaagggtcctattcactcccctgttgagctgaaacacgtacacgcaactgtcgtgaaagtgccagaggtgaattcctctgcccttccccataagcttaggattaaggccaaggcaatgcaaattaaggtggaagccttcgacaatgagttcgaggccacccaaaagctaagttcccccatcgatatgacatccaagcgccacttcgagctcgagaagcactcagctccatccatggtccattctagtctgacgcctttctcggtccaggtaaccaacattcaggattggtccttgaaatctgaacactggcaccaaaaggagctgtctgggaagactcaaaattcgttcaaaacgggcgtagtggagatgaaagattctggctacaaggtgtccgatccggaaaatctctacttgaaacagggcatcgccaacctgtcggccgaggtcgttagcctgaaacgtctcatcgccacccagcctatttcggcctcagacagcgggtag

SEQ ID NO: 108643 - DNA, 1389 bp, Artificial Sequence
  derived and/or modified sequence
atgcagctgcggaagatgcagaccgtgaagaaggagcaggccagcctggatgcctcttcaaatgtcgataagatgatggtgctgaatagtgcccttaccgaggtcagtgaggacagtacgacgggggaagagctacttctgtctgaggggagtgtcgggaaaaataagagtagcgcttgtcgtaggaagcgcgagttcataccagacgaaaaaaaagatgccatgtattgggaaaaacgccggaaaaacaacgaagcggccaaaaggagccgcgaaaagcgccgcttaaacgacctagtgctggagaacaagctaatagcactcggagaagaaaacgctacccttaaggccgagctgctcagcctgaagttgaagttcggcctgatttctagtaccgcttacgcacaggagattcagaagctgagcaatagcactgcagtgtacttccaggactatcagaccagcaagtccaatgtgagctcattcgtcgacgagcacgaaccctctatggtgtcaagcagctgcatctctgtgataaagcactctcctcaaagcagcctgtccgacgttagtgaggtatcctcagtcgaacacacccaagaatcttccgtgcaaggatcttgccgaagcccagagaacaaattccagatcattaaacaagaaccaatggagcttgagtcttataccagggagccacgagacgacaggggttcctacactgccagcatatatcagaactacatgggaaactcgttctcaggatactcacattccccaccactgctccaggtgaatcggagtagctccaactcccccagaacgagtgagaccgacgatggcgtagtgggaaagtccagtgacggggaagacgagcaacaggtgcccaaaggccctatccactccccggtcgagttgaagcatgtccatgctactgtagtaaaggtgccagaagtgaacagctcagccctgcctcacaagcttcggattaaagcaaaggccatgcagattaaagttgaggccttcgataacgaattcgaagcgacccagaaactgagctccccgatcgacatgacatcgaagcgtcactttgaattggagaagcactccgcccctagcatggtgcactcctcactaactcccttttctgtgcaggtgactaacatccaagattggtcactgaaatcggaacactggcaccaaaaggagctttccggaaaaacacagaatagcttcaagacaggggtggtggaaatgaaggactccggttacaaggtgagcgaccctgagaacctctatctcaagcaaggaattgccaacttatcggccgaggtggttagtctgaagagactgattgcaactcagcctatcagcgctagcgactccggctag

SEQ ID NO: 108644 - DNA, 2081 bp, Artificial Sequence
  derived and/or modified sequence
acgtagcgcggcgctcggaactgacctactaacacacatctctccgcgcggccacggcgcccgcggacccggcgcgcccgcccgcctcccgcgccgcgccctcgccgccgcccgcctcccgccgcggccccggaggcccggcccggcccgagccccgagcgccggcggcccgactcccggccgcccctttctttctcctcgccggcccgagagcaggaacacgataacgaaggaggcccaacttcattcaataaggagcctgacggatttatcccagacggtagaacaaaaggaagaatattgatggattttaaaccagagtttttaaagagcttgagaatacggggaaattaatttgttctcctacacacatagatagggtaaggttgtttctgatgcagctgagaaaaatgcagaccgtcaaaaaggagcaggcgtctcttgatgccagtagcaatgtggacaagatgatggtccttaattctgctttaacggaagtgtcagaagactccacaacaggtgaggagctgcttctcagtgaaggaagtgtggggaagaacaaatcttctgcatgtcggaggaaacgggaattcattcctgatgaaaagaaagatgctatgtattgggaaaaaaggcggaaaaataatgaagctgccaaaagatctcgtgagaagcgtcgactgaatgacctggttttagagaacaaactaattgcactgggagaagaaaacgccactttaaaagctgagctgctttcactaaaattaaagtttggtttaattagctccacagcatatgctcaagagattcagaaactcagtaattctacagctgtgtactttcaagattaccagacttccaaatccaatgtgagttcatttgtggacgagcacgaaccctcgatggtgtcaagtagttgtatttctgtcattaaacactctccacaaagctcgctgtccgatgtttcagaagtgtcctcagtagaacacacgcaggagagctctgtgcagggaagctgcagaagtcctgaaaacaagttccagattatcaagcaagagccgatggaattagagagctacacaagggagccaagagatgaccgaggctcttacacagcgtccatctatcaaaactatatggggaattctttctctgggtactcacactctcccccactactgcaagtcaaccgatcctccagcaactccccgagaacgtcggaaactgatgatggtgtggtaggaaagtcatctgatggagaagacgagcaacaggtccccaagggccccatccattctccagttgaactcaagcatgtgcatgcaactgtggttaaagttccagaagtgaattcctctgccttgccacacaagctccggatcaaagccaaagccatgcagatcaaagtagaagcctttgataatgaatttgaggccacgcaaaaactttcctcacctattgacatgacatctaaaagacatttcgaactcgaaaagcatagtgccccaagtatggtacattcttctcttactcctttctcagtgcaagtgactaacattcaagattggtctctcaaatcggagcactggcatcaaaaagaactgagtggcaaaactcagaatagtttcaaaactggagttgttgaaatgaaagacagtggctacaaagtttctgacccagagaacttgtatttgaagcaggggatagcaaacttatctgcagaggttgtctcactcaagagacttatagccacacaaccaatctctgcttcagactctgggtaaattactactgagtaagagctgggcatttagaaagatgtcatttgcaatagagcagtccattttgtattatgctgaattttcactggacctgtgatgtcatttcactgtgatgtgcacatgttgtctgtttggtgtctttttgtgcacagattatgatgaagattagattgtgttatcactctgcctgtgtatagtcagatagtccatgcgaaggctgtatatattgaacattatttttgttgttctattataaagtgtgtaagttaccagtttcaataaaggattggtgacaaacac

SEQ ID NO: 108645 - DNA, 2267 bp, Artificial Sequence
  derived and/or modified sequence
acgtagcgcggcgctcggaactgacctactaacacacatctctccgcgcggccacggcgcccgcggacccggcgcgcccgcccgcctcccgcgccgcgccctcgccgccgcccgcctcccgccgcggccccggaggcccggcccggcccgagccccgagcgccggcggcccgactcccggccgcccctttctttctcctcgccggcccgagagcaggaacacgtagtttaggtatttgggaacttatttcctttttgaaaatgctaacttgttgaaagaaagaactgtggccatgcctcatctgtgcttgtatgccctaaatgcttagcatatttccttgtacataatttgtaataaacatttatccagtgaataactggttttttttttattcatgtattgcagataacgaaggaggcccaacttcattcaataaggagcctgacggatttatcccagacggtagaacaaaaggaagaatattgatggattttaaaccagagtttttaaagagcttgagaatacggggaaattaatttgttctcctacacacatagatagggtaaggttgtttctgatgcagctgagaaaaatgcagaccgtcaaaaaggagcaggcgtctcttgatgccagtagcaatgtggacaagatgatggtccttaattctgctttaacggaagtgtcagaagactccacaacaggtgaggagctgcttctcagtgaaggaagtgtggggaagaacaaatcttctgcatgtcggaggaaacgggaattcattcctgatgaaaagaaagatgctatgtattgggaaaaaaggcggaaaaataatgaagctgccaaaagatctcgtgagaagcgtcgactgaatgacctggttttagagaacaaactaattgcactgggagaagaaaacgccactttaaaagctgagctgctttcactaaaattaaagtttggtttaattagctccacagcatatgctcaagagattcagaaactcagtaattctacagctgtgtactttcaagattaccagacttccaaatccaatgtgagttcatttgtggacgagcacgaaccctcgatggtgtcaagtagttgtatttctgtcattaaacactctccacaaagctcgctgtccgatgtttcagaagtgtcctcagtagaacacacgcaggagagctctgtgcagggaagctgcagaagtcctgaaaacaagttccagattatcaagcaagagccgatggaattagagagctacacaagggagccaagagatgaccgaggctcttacacagcgtccatctatcaaaactatatggggaattctttctctgggtactcacactctcccccactactgcaagtcaaccgatcctccagcaactccccgagaacgtcggaaactgatgatggtgtggtaggaaagtcatctgatggagaagacgagcaacaggtccccaagggccccatccattctccagttgaactcaagcatgtgcatgcaactgtggttaaagttccagaagtgaattcctctgccttgccacacaagctccggatcaaagccaaagccatgcagatcaaagtagaagcctttgataatgaatttgaggccacgcaaaaactttcctcacctattgacatgacatctaaaagacatttcgaactcgaaaagcatagtgccccaagtatggtacattcttctcttactcctttctcagtgcaagtgactaacattcaagattggtctctcaaatcggagcactggcatcaaaaagaactgagtggcaaaactcagaatagtttcaaaactggagttgttgaaatgaaagacagtggctacaaagtttctgacccagagaacttgtatttgaagcaggggatagcaaacttatctgcagaggttgtctcactcaagagacttatagccacacaaccaatctctgcttcagactctgggtaaattactactgagtaagagctgggcatttagaaagatgtcatttgcaatagagcagtccattttgtattatgctgaattttcactggacctgtgatgtcatttcactgtgatgtgcacatgttgtctgtttggtgtctttttgtgcacagattatgatgaagattagattgtgttatcactctgcctgtgtatagtcagatagtccatgcgaaggctgtatatattgaacattatttttgttgttctattataaagtgtgtaagttaccagtttcaataaaggattggtgacaaacacagaa

SEQ ID NO: 108646 - DNA, 1389 bp, Artificial Sequence
  derived and/or modified sequence
atgcaactgcgcaagatgcagaccgttaagaaggagcaagcatctctggacgccagcagtaatgtggataagatgatggtgctcaactctgccctcaccgaggtgtctgaggacagtacgactggcgaagaactcctgttgagcgaaggctccgttgggaagaataaaagtagcgcctgccgccgtaagcgggaattcatacccgatgagaaaaaggatgccatgtattgggaaaagcgacgcaagaacaacgaagcggcaaagaggtcacgggagaagaggaggctaaatgacctcgtgttagaaaataaactcatagccctgggagaggaaaacgcgactcttaaggctgaattattgtcacttaagcttaagtttggattgatatcgtcaaccgcgtatgcccaggagatccagaaactctccaactcaactgccgtgtatttccaggactatcagacatctaaatctaacgtgtcaagcttcgtcgatgaacatgagccttcaatggtatcctcctcatgtatttctgtcatcaagcacagtccacaatcctccctaagcgacgtctcggaggtgtctagcgtagaacacactcaggagtctagtgttcaggggtcctgtaggagccctgagaacaagtttcagattattaagcaggagccaatggaactggagtcttacaccagggagccacgggacgatagaggcagttataccgcttctatttaccagaactacatggggaactctttttccggctacagtcactccccgcctttattgcaggtcaataggagctcctccaatagcccgagaacttccgagacggatgatggcgtggtcggcaagagctcggacggagaggacgaacagcaagtgcctaaaggcccaatccactctcccgtggaactcaagcatgttcacgccactgtagtgaaggttccggaggtgaactcctcggctctgccacacaagctgaggatcaaggcaaaggctatgcagatcaaggtggaggctttcgacaacgagtttgaggcgacccagaaactgtccagtccgattgacatgacctctaaaaggcacttcgaactagaaaagcacagtgccccatctatggtgcactcaagcctcaccccttttagtgtccaagtgaccaatattcaagactggtcactgaagtctgaacattggcatcagaaggaactcagtgggaagacacagaacagctttaagaccggggtggtcgaaatgaaagatagcggatacaaggtttcggacccagaaaacctctacttaaagcaagggatagccaatctgtctgccgaggtcgtctctcttaaacggcttatagcaacccaaccaattagcgcttctgattcagggtag

SEQ ID NO: 108647 - DNA, 1389 bp, Artificial Sequence
  derived and/or modified sequence
atgcagctcagaaaaatgcagacagtaaaaaaggagcaggcaagcctcgacgcctccagcaatgttgataaaatgatggtgctaaatagcgcccttactgaagtgagcgaagactcaacaacgggcgaggaacttcttctgagcgaggggtctgttggcaagaataagagttccgcttgtagaaggaaacgtgaattcatcccggatgagaaaaaagacgctatgtattgggagaagaggagaaagaataatgaagccgcaaagcgatcacgggagaaacgtcggctaaatgacctcgtcctcgagaataagctgatcgccctgggcgaagagaatgcaaccctgaaagccgagctgctaagtcttaaactcaagttcggattgatcagctccaccgcatacgcccaggagattcagaaattgtcaaacagcactgcggtctacttccaagattatcagacaagcaagagcaacgttagctctttcgtggatgagcatgaaccctctatggtctccagctcctgtatatcagtcattaagcactcacctcagagctccttgagcgacgtgagcgaagtttcctccgtagagcatacccaggagtcctcagttcaggggagctgtcgctcccccgagaacaaatttcagatcattaagcaagaaccaatggaactagaaagttacacccgggagccgagggacgacagggggtcatacaccgcatcaatttatcagaattacatggggaactccttctctgggtacagccactcccccccattgcttcaagtgaatcggagcagctctaattcccccagaactagtgagaccgatgatggggtggtgggcaaaagttcagatggagaggacgagcagcaagtgccaaaaggcccaatacacagccccgtagagctcaagcacgtccacgcaaccgtagtgaaagtccccgaggtgaactcctccgcgctgccccataagctgcggattaaggctaaggctatgcagatcaaggtcgaggcttttgacaatgaattcgaggcgacgcaaaaattatcctcaccaattgacatgacctcaaagaggcacttcgagttagaaaaacactctgccccttccatggtgcactcttcgctgaccccctttagcgtccaggtgaccaacatccaggactggtccttaaagagtgagcactggcaccagaaggaactgagcggtaagacccaaaactcgttcaaaaccggtgtggtcgaaatgaaagactccggctacaaagtgtctgaccccgagaatctttatctaaagcaaggcatcgcaaatttaagcgccgaagtggtgagcctgaaacggttgattgcaacacaaccaatatctgccagtgacagtggctag

SEQ ID NO: 108648 - DNA, 1389 bp, Artificial Sequence
  derived and/or modified sequence
atgcagctgagaaagatgcagaccgtgaagaaggagcaggccagcctggacgccagcagcaacgtggacaagatgatggtgctgaacagcgccctgaccgaggtgagcgaggacagcaccaccggcgaggagctgctgctgagcgagggcagcgtgggcaagaacaagagcagcgcctgcagaagaaagagagagttcatccccgacgagaagaaggacgccatgtactgggagaagagaagaaagaacaacgaggccgccaagagaagcagagagaagagaagactgaacgacctggtgctggagaacaagctgatcgccctgggcgaggagaacgccaccctgaaggccgagctgctgagcctgaagctgaagttcggcctgatcagcagcaccgcctacgcccaggagatccagaagctgagcaacagcaccgccgtgtacttccaggactaccagaccagcaagagcaacgtgagcagcttcgtggacgagcacgagcccagcatggtgagcagcagctgcatcagcgtgatcaagcacagcccccagagcagcctgagcgacgtgagcgaggtgagcagcgtggagcacacccaggagagcagcgtgcagggcagctgcagaagccccgagaacaagttccagatcatcaagcaggagcccatggagctggagagctacaccagagagcccagagacgacagaggcagctacaccgccagcatctaccagaactacatgggcaacagcttcagcggctacagccacagcccccccctgctgcaggtgaacagaagcagcagcaacagccccagaaccagcgagaccgacgacggcgtggtgggcaagagcagcgacggcgaggacgagcagcaggtgcccaagggccccatccacagccccgtggagctgaagcacgtgcacgccaccgtggtgaaggtgcccgaggtgaacagcagcgccctgccccacaagctgagaatcaaggccaaggccatgcagatcaaggtggaggccttcgacaacgagttcgaggccacccagaagctgagcagccccatcgacatgaccagcaagagacacttcgagctggagaagcacagcgcccccagcatggtgcacagcagcctgacccccttcagcgtgcaggtgaccaacatccaggactggagcctgaagagcgagcactggcaccagaaggagctgagcggcaagacccagaacagcttcaagaccggcgtggtggagatgaaggacagcggctacaaggtgagcgaccccgagaacctgtacctgaagcagggcatcgccaacctgagcgccgaggtggtgagcctgaagagactgatcgccacccagcccatcagcgccagcgacagcggctag

SEQ ID NO: 108649 - DNA, 858 bp, Artificial Sequence
  derived and/or modified sequence
atgcagccccccctggacctgaagcagatcctgcccttccccctggagcccgcccccaccctgggcctgttcagcaactacagcaccatggaccccgtgcagaaggccgtgctgagccacaccttcggcggccccctgctgaagaccaagagacccgtgatcagctgcaacatctgccagatcagattcaacagccagagccaggccgaggcccactacaagggcaacagacacgccagaagagtgaagggcatcgaggccgccaagaccagaggcagagagcccggcgtgagagagcccggcgaccccgccccccccggcagcacccccaccaacggcgacggcgtggcccccagacccggcaccaagcacaagaccatcctggaggccagaagcggcctgggccccatcaaggcctaccccagactgggcccccccacccccggcgagcccgaggcccccgcccaggacagaaccttccactgcgagatctgcaacgtgaaggtgaacagcgaggtgcagctgaagcagcacatcagcagcagaagacacagagacggcgtggccggcaagcccaaccccctgctgagcagacacaagaagagcagaggcgccggcgagctggccggcaccctgaccttcagcaaggagctgcccaagagcctggccggcggcctgctgcccagccccctggccgtggccgccgtgatggccgccgccgccggcagccccctgagcctgagacccgcccccgccgcccccctgctgcagggcccccccatcacccaccccctgctgcaccccgcccccggccccatcagaaccgcccacggccccatcctgttcagcccctactag

SEQ ID NO: 108650 - DNA, 858 bp, Artificial Sequence
  derived and/or modified sequence
atgcagccccccttggacctgaagcaaattctgccatttcctctggaaccagctccgacattgggccttttctcgaactacagtaccatggatcccgtgcagaaagccgttctctcacacactttcggcggaccactgctgaagaccaagagacccgtgatctcttgtaatatctgtcaaattcgattcaattctcagtcccaagcggaagctcattataaaggtaatcgtcacgccagacgtgtcaagggaattgaagccgcgaaaactcgaggccgggaacccggggtccgagagcctggggacccagccccccctggcagtactcccaccaacggcgatggagtcgccccgcggcccggaaccaagcacaagacgattttagaagcccgctctgggctggggccaattaaagcttatcctagactcggtccacctacccctggggagccagaagcaccagcccaggacagaacatttcattgcgagatttgcaatgttaaggtcaactccgaggttcagctgaagcagcatatctcatccaggcggcacagagatggggtcgctggtaagccaaatccgctacttagtcgtcacaagaagtcacggggtgctggagaattggctgggacgctcacgttcagcaaagaattaccaaagagcctcgccggcggcctacttccctctcccctcgcagtcgccgcagttatggccgccgccgcaggctcacctctctccctgcggcccgcccccgccgccccactccttcaggggccacctattactcatccactacttcatccagcccctgggcccatccgcactgcccacgggccaatactgttcagcccatattag

SEQ ID NO: 108651 - DNA, 858 bp, Artificial Sequence
  derived and/or modified sequence
atgcagccccccctggacctgaagcagatcctgcccttccccctggagcccgcccccaccctgggcctcttcagcaactacagcaccatggaccctgtgcagaaggctgtgctgagccacaccttcggcggccccctgctgaagaccaagaggcctgtgatcagctgcaacatctgccagatccgcttcaacagccagagccaggccgaggcccactacaagggcaacagacatgcccggcgggtgaagggcattgaagctgccaagacccggggccgggagcccggggtgcgggagcccggggaccctgcccctcctggcagcacccccaccaatggagatggagtggccccccggcccggcaccaagcacaagaccatcctggaggcccggagcggcctgggccccatcaaggcctacccccggctgggcccccccaccccaggagagcctgaggccccagcccaggacaggaccttccactgtgagatctgcaatgtgaaggtgaacagcgaggtgcagctgaagcagcacatcagcagccgccgccacagagatggagtggccggcaagcccaaccccctgctgagccgccacaagaagagcagaggagctggggagctggccggcaccctgaccttcagcaaggagctgcccaagagcctggccggcggcctgctgcccagccccctggccgtggccgctgtgatggctgctgctgctggcagccccctgagcctgcggcctgccccagctgcccccctgctgcagggcccccccatcacccaccccctgctgcacccagcccctggccccatcagaacagcccacggccccatcctcttcagcccctactag

SEQ ID NO: 108652 - DNA, 858 bp, Artificial Sequence
  derived and/or modified sequence
atgcagccccccctggacctgaagcagatcctgcccttccccctggaaccggctcctacccttggccttttcagcaattatagtactatggatccagtccagaaggctgtgctcagccacaccttcggcgggcccttactgaagacgaagcgtccagtgatttcctgtaatatctgtcagatacggttcaactcccagtcccaagctgaagcccactacaaaggtaataggcacgcacgtcgcgtgaaggggatagaagccgccaaaacaaggggccgcgaaccaggtgttcgggagccaggagacccggctccacccggtagcaccccgacgaatggagacggtgttgctcccaggcctggcacaaaacacaagactattctggaagcccgatctggcctgggaccaatcaaggcatacccaaggcttggtcccccaacgcccggcgaacctgaagcaccagcacaggatcgtacttttcattgcgagatatgcaatgtgaaagttaacagtgaagtccagctaaaacaacacatctctagtcggcgccatcgcgatggagtggcaggcaagccgaatccactgctcagcaggcataagaagtctagaggcgccggtgagctggcaggaacactcactttcagtaaggagctgcctaaaagcctggcgggcggactcctgccaagtccacttgccgtggccgcagtgatggcggcagctgctggcagccccctgtcactgcgcccagcaccagcagcaccccttctccagggcccccctatcacccatcctctactccaccccgcccctgggcccatccggaccgcccacgggcctattctgttcagtccctactag

SEQ ID NO: 108653 - DNA, 858 bp, Artificial Sequence
  derived and/or modified sequence
atgcagccaccgctagaccttaagcagatactgccttttccacttgagcctgcgcctacactgggattgtttagtaactactcgaccatggaccctgtgcagaaagctgtcctgagccatactttcggaggtcctctactcaagacaaagcgacccgtgataagttgcaatatttgtcaaattaggtttaatagccagagccaggccgaagcccactacaaagggaatcgccacgcacggagagtgaagggcattgaagctgccaaaaccagaggcagagaaccgggagtcagggagccaggcgacccagccccaccagggagtacccccacgaatggagatggtgtggccccaagacccggaaccaaacataaaaccatcctggaagcgagatctggcctgggcccaatcaaagcgtacccccgtctggggccaccaacaccaggggaacctgaagctccagctcaggaccgaacatttcactgcgagatctgcaacgtgaaagtgaacagtgaagttcagttgaagcagcacatatctagcaggcgtcatcgggacggtgtcgccggaaaaccaaatccattgcttagtcgccataagaaaagtagaggcgctggcgaactcgcgggtacacttacgttcagtaaagaactgcccaagtccctggctggcggactcctgccttctccgctggctgttgccgcagtgatggcggcagctgcgggatctccactctcactgcgcccagcccctgctgcaccactcttgcaaggtccgcctattacccatcctctgctccaccctgccccagggcctatccggactgcacacgggccaatcctcttcagcccttactag

SEQ ID NO: 108654 - DNA, 1101 bp, Artificial Sequence
  derived and/or modified sequence
atgcagccccccctggacctgaagcagatcctgcccttccccctggagcccgcccccaccctgggcctgttcagcaactacagcaccatggaccccgtgcagaaggccgtgctgagccacaccttcggcggccccctgctgaagaccaagagacccgtgatcagctgcaacatctgccagatcagattcaacagccagagccaggccgaggcccactacaagggcaacagacacgccagaagagtgaagggcatcgaggccgccaagaccagaggcagagagcccggcgtgagagagcccggcgaccccgccccccccggcagcacccccaccaacggcgacggcgtggcccccagacccgtgagcatggagaacggcctgggccccgcccccggcagccccgagaagcagcccggcagccccagcccccccagcatccccgagaccggccagggcgtgaccaagggcgagggcggcacccccgcccccgccagcctgcccggcggcagcaaggaggaggaggagaaggccaagagactgctgtactgcgccctgtgcaaggtggccgtgaacagcctgagccagctggaggcccacaacaagggcaccaagcacaagaccatcctggaggccagaagcggcctgggccccatcaaggcctaccccagactgggcccccccacccccggcgagcccgaggcccccgcccaggacagaaccttccactgcgagatctgcaacgtgaaggtgaacagcgaggtgcagctgaagcagcacatcagcagcagaagacacagagacggcgtggccggcaagcccaaccccctgctgagcagacacaagaagagcagaggcgccggcgagctggccggcaccctgaccttcagcaaggagctgcccaagagcctggccggcggcctgctgcccagccccctggccgtggccgccgtgatggccgccgccgccggcagccccctgagcctgagacccgcccccgccgcccccctgctgcagggcccccccatcacccaccccctgctgcaccccgcccccggccccatcagaaccgcccacggccccatcctgttcagcccctactag

SEQ ID NO: 108655 - DNA, 699 bp, Artificial Sequence
  derived and/or modified sequence
atgcagccccccctggacctgaagcagatcctgcccttccccctggagcccgcccccaccctgggcctgttcagcaactacagcaccatggaccccgtgcagaaggccgtgctgagccacaccttcggcggccccctgctgaagaccaagagacccgtgatcagctgcaacatctgccagatcagattcaacagccagagccaggccgaggcccactacaagggcaacagacacgccagaagagtgaagggcatcgaggccgccaagaccagaggcagagagcccggcgtgagagagcccggcgaccccgccccccccggcagcacccccaccaacggcgacggcgtggcccccagacccgtgagcatggagaacggcctgggccccgcccccggcagccccgagaagcagcccggcagccccagcccccccagcatccccgagaccggccagggcgtgaccaagggcgagggcggcacccccgcccccgccagcctgcccggcggcagcaaggaggaggaggagaaggccaagagactgctgtactgcgccctgtgcaaggtggccgtgaacagcctgagccagctggaggcccacaacaagggcaccaagcacaagaccatcctggaggccagaagcggcctgggccccatcaaggcctaccccagactgggcccccccacccccggcgagccctag

SEQ ID NO: 108656 - DNA, 498 bp, Artificial Sequence
  derived and/or modified sequence
atgcagccccccctggacctgaagcagatcctgcccttccccctggagcccgcccccaccctgggcctgttcagcaactacagcaccatggaccccgtgcagaaggccgtgctgagccacaccttcggcggccccctgctgaagaccaagagacccgtgatcagctgcaacatctgccagatcagattcaacagccagagccaggccgaggcccactacaagggcaacagacacgccagaagagtgaagggcatcgaggccgccaagaccagaggcagagagcccggcgtgagagagcccggcgaccccgccccccccggcagcacccccaccaacggcgacggcgtggcccccagacccgtgagcatggagaacggcctgggccccgcccccggcagccccgagaagcagcccggcagccccagcccccccagcatccccgagaccggccagggcgtgaccaagggcgagggcggcacccccgcccccgccagctag

SEQ ID NO: 108657 - DNA, 438 bp, Artificial Sequence
  derived and/or modified sequence
atgcagccccccctggacctgaagcagatcctgcccttccccctggagcccgcccccaccctgggcctgttcagcaactacagcaccatggaccccgtgcagaaggccgtgctgagccacaccttcggcggccccctgctgaagaccaagagacccgtgatcagctgcaacatctgccagatcagattcaacagccagagccaggccgaggcccactacaagggcaacagacacgccagaagagtgaagggcatcgaggccgccaagaccagaggcagagagcccggcgtgagagagcccggcgaccccgccccccccggcagcacccccaccaacggcgacggcgtggcccccagacccgtgagcatggagaacggcctgggccccgcccccggcagccccgagaagcagcccggcagccccagcccccccagctag

SEQ ID NO: 108658 - DNA, 1101 bp, Artificial Sequence
  derived and/or modified sequence
atgcagccaccgttggacctaaagcagatcctgccattccctctcgaacctgcacctacgttaggcctgtttagtaattactctacgatggacccggtccagaaggccgtcttatcgcacaccttcggcgggcccctgctcaagaccaaaagaccagttatctcttgtaatatatgtcagattagattcaacagccagtctcaggccgaggcccattataagggtaaccggcacgctagacgggtaaaaggtatcgaggcagctaagacccgaggacgtgaacctggggttcgcgaaccaggcgaccccgccccacctggttccacccctaccaatggtgacggcgtggccccgcgcccagtatcgatggagaatggtttgggccctgcccctggctctcctgaaaagcagcccgggtctccatcccccccaagcataccagaaaccggccaaggagtaaccaaaggggagggaggcaccccagctcctgccagtctgcctggcggaagtaaagaagaagaagaaaaagcaaagagactgttgtattgtgccctctgcaaggtcgccgtgaattcactgtctcaattggaagcccacaacaaaggaaccaaacataaaaccatccttgaagctaggagcggcctagggccaatcaaggcctacccaaggcttggcccacccacacctggagagccagaggcccccgcccaggaccgcacatttcattgtgaaatctgcaatgtgaaagtcaattctgaagtgcaactgaaacaacacataagtagccggagacatcgggacggagtcgccgggaaacccaaccctttgctgtctcgccacaaaaaaagcagaggagctggtgagcttgctggtactctaacattctctaaggaactgccgaagagcctcgcaggtggtttgctgcccagtccactggcagtggctgcagttatggcggctgccgccggttcccccctgtcactgagaccagcccctgctgctccactcctgcaggggccccctattacgcaccccctgctgcacccagctcctgggccaattaggaccgctcatggtcccatcctgttctctccctattag

SEQ ID NO: 108659 - DNA, 699 bp, Artificial Sequence
  derived and/or modified sequence
atgcagccgcccctggatctaaaacagatattgcccttcccactcgaaccagcccccactctcggcttgttttcaaactatagcactatggaccctgttcagaaggccgtgttgtctcataccttcggaggcccgctgcttaagaccaaacggccggtgattagttgtaatatctgccagatacggttcaacagccagtctcaagctgaggctcattacaagggcaataggcacgcccgcagggtgaaaggaatcgaagcagctaagaccagggggagggaacctggcgtgcgcgagccgggggacccggcaccaccgggatctacgcctaccaatggggatggtgttgctcccaggcctgtttctatggagaatggcctcgggcccgccccaggatccccagaaaaacagcccggaagtccgagcccgccaagtattcccgagactggccagggtgtaacaaagggggaaggaggaacccccgccccagccagtctgcccggcgggtccaaggaggaggaggagaaagcaaagaggctgctgtattgcgccctgtgcaaggtggccgttaactcgctgtcacagctggaggcacataacaaaggcacaaaacataagaccattctggaggcccgaagcggcctgggcccaattaaggcttatcctaggcttggcccgcccacgcctggtgaaccctag

SEQ ID NO: 108660 - DNA, 1101 bp, Artificial Sequence
  derived and/or modified sequence
atgcagccaccactcgacctaaagcagattttgcccttcccgctggaacccgcaccaactctcgggttgttctctaactacagtaccatggaccccgtgcagaaggccgtattgagccacacatttggggggccattgcttaagaccaagaggccggtgatttcatgcaacatctgccaaatccgcttcaatagccagtcccaggccgaggcccactataaaggaaaccgccacgcccgaagggtgaaagggatcgaggctgccaaaaccagaggcagggaaccaggtgtgcgcgagcctggggaccctgcccctcccgggtcaacccctactaatggagatggcgtggcgcctagacccgtcagcatggaaaatggcctcgggcctgcaccgggaagccccgaaaagcagcccggttccccaagcccaccctctattcctgagacagggcaaggcgttaccaaaggggagggcggtacacccgcaccagcctcattacccggaggttccaaagaggaggaagaaaaggcaaagcggcttctttactgtgccttatgcaaggtggccgtcaacagtctatcccagctggaggcacacaacaaaggaaccaaacacaaaaccatcctggaggctaggtccgggctgggtccgattaaggcttaccctagacttggccccccgacccccggtgagcccgaagccccagcccaagatcgaacttttcactgcgaaatctgtaacgtgaaagtgaactctgaggtgcagcttaagcagcatatctcctctaggcggcatcgtgacggagttgccgggaagcccaatccattattgtctcggcataagaagtcccggggagccggcgagttggcaggtaccctcacattcagcaaagagctgccaaaatctttagctggtggactgttaccctcgcctcttgccgtcgccgcagtgatggctgctgccgctggtagccccctttccttgaggcccgcaccagccgcacctttactgcagggccctccaataacacatccactgctgcatcctgcccctgggccgataaggactgctcatggaccaatcctcttcagcccatactag

SEQ ID NO: 108661 - DNA, 498 bp, Artificial Sequence
  derived and/or modified sequence
atgcagccccccttggatcttaagcagatcttgccctttccattggagcccgcccccaccttggggctattctccaactactccaccatggacccagttcagaaggccgtgctctcacatactttcggcggccctctactaaaaaccaaacgcccagtcatcagctgcaacatctgtcagataagattcaattctcaaagccaagccgaggcacattacaaagggaacaggcatgcgagaagggtaaaagggatcgaggctgcgaagacaagaggccgcgagcctggtgtgagagaaccaggcgatccagcccctcccggatctactccaacgaatggagacggcgtggcaccccggccagtgtctatggagaatggactggggcccgcccctggttctcccgagaaacaaccaggttcgcccagccctccgagcatacctgagacaggccagggcgtcactaagggagaaggagggaccccggcacctgcaagctag

SEQ ID NO: 108662 - DNA, 438 bp, Artificial Sequence
  derived and/or modified sequence
atgcagcctcctctggatctgaagcagattctccccttccctcttgaaccagcccccaccctgggtcttttttcaaactacagtactatggacccagtgcagaaagcagtgttgtcccatacatttggcggacccctgctcaaaactaagagacctgtgattagctgcaacatttgtcagattcgatttaactctcagagccaggctgaggcccactacaaagggaatagacacgcccgccgggtcaaaggcattgaggccgcaaagactagaggacgcgagcccggagtcagggagcccggcgaccccgccccacccggctctacccctaccaatggggacggcgtggcacctagaccagttagcatggagaacggtcttggtccagctccggggtcgcccgagaagcaacccggcagcccgagccccccaagctag

SEQ ID NO: 108663 - DNA, 1101 bp, Artificial Sequence
  derived and/or modified sequence
atgcagcccccactcgatcttaaacagatcctacccttcccgctggagccagcaccaaccctcggcttgtttagcaattactctaccatggatcctgtccagaaagctgtgctcagccataccttcgggggcccattgttaaaaaccaagaggccagtgatctcttgtaacatctgccaaatacgtttcaattctcagagccaggccgaggctcactataaggggaaccgtcacgccagacgcgtgaagggaatcgaggccgccaaaactagaggcagagagcctggagtcagagaaccgggagacccagccccccctggttccacccccactaacggagatggcgttgccccccgccctgttagtatggagaatgggctcggacccgcccctggaagccccgagaaacagcccgggtccccttcaccaccctcaatcccagaaactggtcagggggtaaccaaaggtgaaggtggcacccccgccccagcctcactgcctggagggagcaaggaagaagaagagaaagcaaagcggctgttgtactgtgccctctgcaaggtagctgttaattcactgtcacagttagaggctcacaacaaagggacaaagcataagacaattctggaggctcggagcgggctgggcccgatcaaggcataccccagacttgggcctccaacaccgggcgagcccgaggccccagcccaagacaggacttttcattgtgagatctgcaacgtgaaagtgaactcggaggtccagctcaagcaacatatcagcagcagacgccatcgcgacggcgttgccggtaagcctaaccccctgttgagtagacacaaaaaaagcaggggagccggcgaacttgccggcacattgacctttagcaaagagctgcctaaatcactggccggaggcctgctgcctagccccctggctgtcgcagccgtcatggccgccgctgcgggctctccactgtcgcttcgcccagcaccagccgctccccttctgcaggggcctcccattacacatccgttgctgcacccagccccaggcccaatccggacagcgcatggacctattttgttctcaccgtactag

SEQ ID NO: 108664 - DNA, 1101 bp, Artificial Sequence
  derived and/or modified sequence
atgcagccccccctggacctgaagcagatcctgcccttccccctggagcccgcccccaccctgggcctcttcagcaactacagcaccatggaccctgtgcagaaggctgtgctgagccacaccttcggcggccccctgctgaagaccaagaggcctgtgatcagctgcaacatctgccagatccgcttcaacagccagagccaggccgaggcccactacaagggcaacagacatgcccggcgggtgaagggcattgaagctgccaagacccggggccgggagcccggggtgcgggagcccggggaccctgcccctcctggcagcacccccaccaatggagatggagtggcccccaggcctgtgtccatggagaatggcctgggccctgcccctggcagccctgagaagcagcccggcagccccagccccccatccatccctgagaccggccagggcgtgaccaagggggagggcggcaccccagccccagccagcctgcccggcggcagcaaggaggaggaggagaaggccaagaggctgctgtactgtgccctgtgcaaggtggccgtgaacagcctgagccagctggaggcccacaacaagggcaccaagcacaagaccatcctggaggcccggagcggcctgggccccatcaaggcctacccccggctgggcccccccaccccaggagagcctgaggccccagcccaggacaggaccttccactgtgagatctgcaatgtgaaggtgaacagcgaggtgcagctgaagcagcacatcagcagcagaagacacagagatggagtggccggcaagcccaaccccctgctgagccgccacaagaagagcagaggagctggggagctggccggcaccctgaccttcagcaaggagctgcccaagagcctggccggcggcctgctgcccagccccctggccgtggccgctgtgatggctgctgctgctggcagccccctgagcctgcggcctgccccagctgcccccctgctgcagggcccccccatcacccaccccctgctgcacccagcccctggccccatcagaacagcccacggccccatcctcttcagcccctactag

SEQ ID NO: 108665 - DNA, 699 bp, Artificial Sequence
  derived and/or modified sequence
atgcagccccccctggacctgaagcagatcctgcccttccccctggagcccgcccccaccctgggcctcttcagcaactacagcaccatggaccctgtgcagaaggctgtgctgagccacaccttcggcggccccctgctgaagaccaagaggcctgtgatcagctgcaacatctgccagatccgcttcaacagccagagccaggccgaggcccactacaagggcaacagacatgcccggcgggtgaagggcattgaagctgccaagacccggggccgggagcccggggtgcgggagcccggggaccctgcccctcctggcagcacccccaccaatggagatggagtggcccccaggcctgtgtccatggagaatggcctgggccctgcccctggcagccctgagaagcagcccggcagccccagccccccatccatccctgagaccggccagggcgtgaccaagggggagggcggcaccccagccccagccagcctgcccggcggcagcaaggaggaggaggagaaggccaagaggctgctgtactgtgccctgtgcaaggtggccgtgaacagcctgagccagctggaggcccacaacaagggcaccaagcacaagaccatcctggaggcccggagcggcctgggccccatcaaggcctacccccggctgggcccccccaccccaggagagccctag

SEQ ID NO: 108666 - DNA, 498 bp, Artificial Sequence
  derived and/or modified sequence
atgcagccccccctggacctgaagcagatcctgcccttccccctggagcccgcccccaccctgggcctcttcagcaactacagcaccatggaccctgtgcagaaggctgtgctgagccacaccttcggcggccccctgctgaagaccaagaggcctgtgatcagctgcaacatctgccagatccgcttcaacagccagagccaggccgaggcccactacaagggcaacagacatgcccggcgggtgaagggcattgaagctgccaagacccggggccgggagcccggggtgcgggagcccggggaccctgcccctcctggcagcacccccaccaatggagatggagtggcccccaggcctgtgtccatggagaatggcctgggccctgcccctggcagccctgagaagcagcccggcagccccagccccccatccatccctgagaccggccagggcgtgaccaagggggagggcggcaccccagccccagccagctag

SEQ ID NO: 108667 - DNA, 438 bp, Artificial Sequence
  derived and/or modified sequence
atgcagccccccctggacctgaagcagatcctgcccttccccctggagcccgcccccaccctgggcctcttcagcaactacagcaccatggaccctgtgcagaaggctgtgctgagccacaccttcggcggccccctgctgaagaccaagaggcctgtgatcagctgcaacatctgccagatccgcttcaacagccagagccaggccgaggcccactacaagggcaacagacatgcccggcgggtgaagggcattgaagctgccaagacccggggccgggagcccggggtgcgggagcccggggaccctgcccctcctggcagcacccccaccaatggagatggagtggcccccaggcctgtgtccatggagaatggcctgggccctgcccctggcagccctgagaagcagcccggcagccccagcccccccagctag

SEQ ID NO: 108668 - DNA, 1101 bp, Artificial Sequence
  derived and/or modified sequence
atgcagccccccctggacctgaagcagatcctgcccttccccctggaacctgcccccaccttgggactcttctccaactactctaccatggacccagtccagaaggcagtgcttagccacaccttcgggggtcccttgctcaagactaagcgcccagtgatctcatgtaacatctgtcagatcaggttcaacagtcaaagtcaggcagaggcccactacaaaggaaacagacacgcccggagagtcaagggaatcgaggccgcgaagactcgagggagggagcctggagtccgtgagccaggagatcctgcccctcccggctctacacccactaacggcgatggggtggcgcccagacccgtgtcaatggagaacggactaggacctgcgccaggatcccctgagaagcagcccggatcgcctagcccaccaagtattcctgagacgggccagggggtcaccaagggagaaggaggcaccccagctcccgcctccctgccagggggaagcaaggaagaggaggaaaaagcaaagcgactgctctattgcgcactttgcaaggtagcagttaactcgctctctcaacttgaggctcacaacaaaggaacaaagcacaaaacaattctggaggctcgtagcggcctcggacccatcaaagcctaccccaggctggggccgccgacacccggcgaaccagaggcaccagcgcaggatagaacctttcattgcgagatctgtaatgtcaaggtgaattcagaggttcagttgaagcagcatatttcaagccggcgccatagagatggggtcgctgggaaacccaatccattgcttagccgtcataagaagtcgcgtggagcaggagaactcgccggtacattaactttttccaaggagctgcccaagtctttggccggtggactactaccttctccactcgccgttgccgcggtgatggctgctgccgcaggttcaccgctttcccttagaccagctcctgctgcgcctctgctacaggggccgccgatcacccaccctctccttcaccccgctcctgggcctatccgtacagcacatgggccgatccttttcagcccctactag

SEQ ID NO: 108669 - DNA, 699 bp, Artificial Sequence
  derived and/or modified sequence
atgcagccccccctggacctgaagcagatcctgcccttccccctggagccagccccgactctaggcctgtttagtaattacagcacaatggacccagttcagaaagctgtgcttagtcacacattcggaggccccttgttgaaaacaaagcgacccgtcatctcctgcaacatctgtcagatcagattcaatagccagagccaagccgaggctcattacaaagggaacagacacgcccggcgggtgaagggcattgaggcggctaaaaccaggggacgggagcccggggtcagggagcccggggacccagcccctccaggatctacgcctactaacggggacggagtggctccaagacccgttagcatggagaatgggctgggtccagcacctggatctccagagaaacagccagggtccccttcacctccaagtatcccggaaacagggcaaggggtgaccaagggcgagggtggcactcccgctcctgcctctctgcccgggggatccaaagaggaggaagagaaggctaagcgtcttttatattgcgccctgtgtaaagtggccgtcaacagtttaagtcagctcgaggctcataataaggggacaaaacacaagacgattctggaggccagatcaggcctcggtcccatcaaggcctaccctcgtctcggcccacccactcctggtgagccatag

SEQ ID NO: 108670 - DNA, 1101 bp, Artificial Sequence
  derived and/or modified sequence
atgcagccccccctggacctgaagcagatcctgcccttccccctggagcccgccccaaccttaggcctgttctctaactatagtactatggatcccgtgcagaaagccgttttaagccatacatttggagggcctctcctcaagactaaaagacccgtcatcagttgcaacatttgtcagataaggttcaatagtcagagtcaggccgaggcccactataagggcaatcgtcacgcccgccgtgtaaaagggatagaagccgccaaaactcgcggaagagaacccggagtgcgggagccgggggatccagcccctcccgggtccacccccacaaatggggatggtgtagcgccacgccccgtgagtatggagaacggcctgggacccgccccaggatcccccgaaaagcaacccgggagcccgtccccgccttccatcccagagacaggacagggcgtgaccaagggcgaaggaggtacgccggcacccgctagtctccctggaggcagtaaagaggaggaggagaaagctaagcggcttctctactgtgctctctgcaaggtagctgtaaattcgctaagtcaactagaggcgcataacaaaggcactaagcacaagaccatcctggaagcccggtcaggcctggggccgatcaaggcctatcctcgactcgggccacctaccccaggcgagcccgaagcaccagcacaggaccgaacctttcactgtgaaatctgtaacgtcaaagtcaactcggaggtgcagctgaagcagcatatctccagcaggcggcatagagatggggtggctggcaaaccaaatccgctcttgagtaggcataagaaatccagaggcgctggagaactggctggaactcttacattttcaaaggagctgcccaaatccctggcaggaggattgctcccaagtcccctggccgttgccgccgtgatggctgcggccgccggcagccccctctcacttagaccagctcctgcggcacccctcctacaggggccccccatcacacatcctctcctccaccccgcccctgggccaatccgcacagcacacgggcctattcttttctctccatattag

SEQ ID NO: 108671 - DNA, 498 bp, Artificial Sequence
  derived and/or modified sequence
atgcagccccccctggacctgaagcagatcctgcccttccccctggagcctgcccccacactgggcctgttttccaactacagtaccatggacccagttcagaaggccgttctttcgcatacattcggcgggcctctcctgaagacaaagagaccagtcatcagctgtaacatttgccaaatccggtttaattcacagtcccaggctgaagcccattacaaagggaaccgtcatgcccggagagtcaagggcatcgaagccgccaaaactcgggggcgcgaacctggagtgagggaacctggggaccctgccccacctggctccacaccaaccaacggagatggcgtggccccaaggcctgtcagtatggagaatggcttaggcccggctcccggttcccccgagaaacaaccaggctccccaagtcccccatcaattccggagacaggccagggcgtgaccaagggagaaggaggaacaccggcccccgcctcctag

SEQ ID NO: 108672 - DNA, 438 bp, Artificial Sequence
  derived and/or modified sequence
atgcagccccccctggacctgaagcagatcctgcccttccccctggaacctgctcctacattggggctgttcagtaattattccactatggaccctgttcaaaaggctgtgctttcccataccttcggcggaccactactgaaaacaaagcgaccggtaatatcatgcaatatctgtcagatccgttttaattcccaaagccaggctgaggcccattacaaggggaaccgtcacgcccggagggtcaaaggcatagaggctgcaaagacgagaggccgggagcctggcgtgcgcgaacctggcgaccctgcgccacctggttcaaccccaaccaacggggacggggtagcacctcgaccagttagcatggaaaacgggttagggccagcacctgggtcacccgagaagcagccaggctccccatctccacccagttag

SEQ ID NO: 108673 - DNA, 1101 bp, Artificial Sequence
  derived and/or modified sequence
atgcagccccccctggacctgaagcagatcctgcccttccccctggaacccgctccgaccctagggctcttttctaactactctactatggatccagttcagaaggccgtactgtctcatacattcggcgggcccctcctgaaaacaaagcgtcccgttatcagctgtaacatttgtcagatcaggttcaacagtcagtctcaagccgaagcacattacaaaggtaatcggcacgctaggcgtgtaaaaggtattgaggcagccaagaccaggggtagagagcccggcgtcagagagcccggcgatccagcccccccgggtagtaccccgactaatggtgacggggtcgcacctaggcctgtgagcatggaaaacggcctcggcccagccccgggaagtccagaaaagcaacccgggtccccctcacccccaagcatccctgaaactgggcagggagttacaaaaggagaaggaggaacccctgctcctgcctccctccctggaggcagcaaagaggaggaggagaaagctaagcgtctgctgtactgtgcgctttgtaaggtagctgtcaattcattaagccaactggaagcacacaacaaaggcactaagcacaaaactatcttggaggcgcgatccggcttgggaccgatcaaggcatacccgagactcggacctcccacgcctggcgaaccagaagcaccagctcaggacaggacctttcattgtgagatttgcaatgtgaaagtgaacagcgaagtgcagctgaaacagcacatatctagccgccggcatagggatggagttgctggcaaaccaaaccccctcctgtctcgacataagaagtccagaggagccggcgagttagccggaaccctgacctttagcaaggagctgccaaaatctctggcaggcggcctgctgcctagcccgttggcagtcgcagcggttatggcagctgcagcgggctccccactgtcactgcgccccgcccctgcagctccgctgctccaagggccccccataacccaccctctgctgcaccccgcgcccggtccgattaggacagctcacggccctattctgtttagcccatactag

SEQ ID NO: 108674 - DNA, 1101 bp, Artificial Sequence
  derived and/or modified sequence
atgcagcctcctttggacctgaagcagatcctgccctttcccctggagcccgctcccaccttgggtctgttttccaattactccacaatggacccagtccaaaaggctgtcctgtcacacacattcggaggaccgctgctgaagaccaaacggcctgtaatcagttgcaacatctgccagattcggttcaatagccagtctcaggctgaggctcactacaagggcaaccggcacgccaggcgggtgaaggggatcgaagcagcaaagacgcgtggcagggagccgggtgtgcgagaacccggagatcccgcaccgccaggatccaccccaactaatggggatggcgtggctccaagaccagtgagcatggagaatgggctaggcccagcacctggcagccctgaaaagcaacctggatccccctctcctccgtcaatccctgaaactggtcagggcgtgaccaaaggcgaagggggaactccggcaccagccagtctgcccggaggaagcaaggaagaagaagagaaggccaagagactgctgtattgtgcactctgtaaggtagccgttaattcactctcccaacttgaggctcacaataaagggactaaacacaagacgatcctagaggcacgctctgggttaggacctatcaaggcctatcccaggctgggccctcccactccaggagagcccgaagcccctgcccaggatcgtactttccactgtgagatttgtaacgttaaagtgaatagcgaagttcaactgaagcagcacatcagcagccgtcgccatagagacggagtggccggaaagccaaatccactgctcagcagacacaagaagagcagaggtgcaggtgaacttgccggaacactgactttcagcaaggaactccccaagtcacttgctggtggattgctcccttcccccctggccgtggcggcagtaatggccgcagccgctggctctcccctgtccctacgacctgccccagctgcaccactgcttcagggaccgccaatcacacatcctctgctgcaccctgcaccgggtccaatcagaactgcccacgggcctatcctattctcgccttattag

SEQ ID NO: 108675 - DNA, 699 bp, Artificial Sequence
  derived and/or modified sequence
atgcaacctcctttagacctgaaacaaatcctccccttcccgctggaacctgcgccaactcttggcctgttttcgaactatagcacaatggaccctgtgcagaaagccgtcttgtcgcacaccttcgggggtccactactgaaaacgaagcggcctgtgatatcatgcaacatatgtcagatcagattcaattcgcaatcgcaggcggaagcacactataaaggcaacagacatgctcgccgagtgaagggaatcgaggcagcgaagactagaggacgggagcctggcgtgagggagcccggtgatcctgcgccacccggatccactcctactaatggggacggagttgctccacgacccgtcagcatggagaacggattaggcccagcacctggctcccctgagaaacagcctgggagtcccagccctccctccattccggagacaggtcagggcgtgactaagggggaagggggaacacctgcccctgctagtctgcctgggggttccaaagaagaggaggagaaagcaaagcgcctgctgtactgcgcactgtgtaaggttgccgttaactctctgagccagttagaggcccataataaagggacaaagcacaagacgatcctcgaggcacgctctggcctaggtcctattaaggcatacccgagactgggaccccctacgccgggagagccgtag

SEQ ID NO: 108676 - DNA, 1101 bp, Artificial Sequence
  derived and/or modified sequence
atgcagcctccactggacctgaagcagattcttcctttcccactggaaccagctcccacccttggtctgtttagcaattactctaccatggacccagtgcagaaagccgtgctgagccacacattcggaggaccactgctgaagacaaaaaggcctgtgattagctgcaacatctgccaaattcggttcaactctcaaagtcaagccgaggcccactataagggcaacagacacgccagaagggtcaagggcatcgaagcggcaaagacacgtgggcgtgagccgggtgtgagagagcctggcgaccccgctcctcccggatcaacccctactaatggcgacggtgtcgcccctaggccagtcagcatggaaaacggactggggccagcccctgggtcgccagagaagcagcctggctcacctagcccacctagtatcccagagaccggtcaaggagtgactaagggggaagggggtaccccagccccagcaagcctgccagggggatcgaaggaggaggaagagaaggcaaaaaggctgctgtactgcgcactgtgtaaggttgccgtgaatagcttgtcccaactggaggcgcataataaggggacaaagcacaaaaccatcctagaggccagaagcgggcttgggccaatcaaagcctaccctcgcctggggcctccaacaccaggagaaccagaggcacctgcccaggaccggacttttcactgtgaaatctgcaatgttaaggtgaactcagaagtccaacttaaacaacatatctccagcagacggcaccgtgacggggttgcaggcaagccaaaccccttgcttagcaggcacaagaagagtcgcggagctggggaactagccggtactcttactttcagcaaagagctgccaaagagtctggctgggggtcttctgcccagcccactagcagtcgctgcagttatggcagctgccgcaggatcaccattgtctctgcgccctgcccctgccgctccactgctccaaggacctcccatcacccatcccctcctgcatccagcgccaggcccaattaggactgcccacggccctatcctgttctccccctactag

SEQ ID NO: 108677 - DNA, 498 bp, Artificial Sequence
  derived and/or modified sequence
atgcagcctccgctcgatctgaaacaaatcctgcctttccctcttgagcccgctcctactctcggcctcttctccaattattcaacaatggatcctgtgcaaaaggcagtcttgtcacacactttcggcggtcctctgctgaagaccaagaggcctgtgatcagctgtaatatttgccagattaggttcaactcccaatcgcaggccgaagcccattacaagggcaatcgccacgccaggcgagttaaaggtatagaggctgccaaaacacggggaagagagcccggtgtccgcgagccgggtgatcccgcacctcccggaagtacccccaccaatggcgatggagtggctcccaggcctgtcagtatggagaatggccttgggcctgcccctggcagtccagaaaaacagcctggatctccctctcctccctccatccccgagactggccagggggtgacaaagggcgagggcggtaccccggctcctgccagctag

SEQ ID NO: 108678 - DNA, 438 bp, Artificial Sequence
  derived and/or modified sequence
atgcagcctccgttggacctgaagcaaatcctgccttttcctctggagcccgcaccaacactaggtctgttcagcaactactctaccatggacccagtgcagaaggccgttctgtcccatactttcggcggacccttgttgaaaacaaaacgtcccgttattagttgcaacatttgccaaatacggttcaacagccaatcacaagctgaagctcattacaaaggaaaccgacacgctagaagagtgaagggcatagaggctgcaaagaccagggggcgtgagcccggagttcgagaaccaggcgatccggctcctcctggcagcactccgactaatggcgacggtgtcgctccaagacctgtaagcatggaaaatggattgggacccgcacccggaagtccagagaaacagcccggtagcccatctccaccttcctag

SEQ ID NO: 108679 - DNA, 1101 bp, Artificial Sequence
  derived and/or modified sequence
atgcaacccccactcgatctcaagcagattctgccattcccactggagccagcacccacattagggctcttttctaactactccactatggatccagtgcagaaagcggttttgagtcataccttcggcggtccactgcttaagacaaagagacccgtgatctcatgcaatatctgtcagattcgatttaacagccagtcacaagccgaggctcattataaggggaaccgccatgctcgcagggtcaaggggattgaggccgctaagacgagggggagggaacccggagtgagagaaccgggagaccctgcccctcccggtagcacacctacaaacggggatggggtagccccacggcctgtgagtatggaaaatggcctgggcccagcccctggatcgcctgagaaacagcccggaagccctagcccgccatccatccccgaaaccggacagggcgtcacgaagggcgaaggcggaacccccgctcctgctagtctgccaggcggttcaaaggaggaggaggaaaaggcaaagcgactactttactgcgcactgtgcaaagttgcagttaactctctcagccagctggaggcccacaacaaaggaaccaagcataagaccatattagaggccaggtctggtctggggccaattaaagcttaccctcgtcttggccctcctactcccggtgagccagaggcgcctgcccaggaccgcaccttccattgtgagatctgcaacgttaaagttaatagcgaggtgcagctgaagcagcatatctctagccggaggcatcgtgacggggtcgccggaaaacctaacccgcttctgtcgagacataaaaaatctcggggtgccggagaactcgccggtaccttgaccttttcaaaggaactcccaaagagtctggctgggggattactgcccagccccttggctgtcgcagccgttatggctgcagcagctggaagtcccctgtctttgcggcctgcaccagcagcaccactgctgcaggggccaccaattacccaccctctcttgcatccagcccctgggccaatcagaaccgctcacggaccaatccttttcagcccttactag

SEQ ID NO: 108680 - DNA, 1855 bp, Artificial Sequence
  derived and/or modified sequence
tcttcctacccatctgctccccagagggctgcctgctgtgcacttgggtcctggagcccttctccacccggatagattcttcacccttggcccgcctttgccccaccctactctgcccagaagtgcaagagcctaagccgcctccatggccccaggaaggattcaggggagaggccccaaacagggagccacgccagccagacaccccggccagaatggagctgactgaattgctcctcgtggtcatgcttctcctaactgcaaggctaacgctgtccagcccggctcctcctgcttgtgacctccgagtcctcagtaaactgcttcgtgactcccatgtccttcacagcagactgagccagtgcccagaggttcaccctttgcctacacctgtcctgctgcctgctgtggactttagcttgggagaatggaaaacccagatggaggagaccaaggcacaggacattctgggagcagtgacccttctgctggagggagtgatggcagcacggggacaactgggacccacttgcctctcatccctcctggggcagctttctggacaggtccgtctcctccttggggccctgcagagcctccttggaacccagcttcctccacagggcaggaccacagctcacaaggatcccaatgccatcttcctgagcttccaacacctgctccgaggaaaggtgcgtttcctgatgcttgtaggagggtccaccctctgcgtcaggcgggccccacccaccacagctgtccccagcagaacctctctagtcctcacactgaacgagctcccaaacaggacttctggattgttggagacaaacttcactgcctcagccagaactactggctctgggcttctgaagtggcagcagggattcagagccaagattcctggtctgctgaaccaaacctccaggtccctggaccaaatccccggatacctgaacaggatacacgaactcttgaatggaactcgtggactctttcctggaccctcacgcaggaccctaggagccccggacatttcctcaggaacatcagacacaggctccctgccacccaacctccagcctggatattctccttccccaacccatcctcctactggacagtatacgctcttccctcttccacccaccttgcccacccctgtggtccagctccaccccctgcttcctgacccttctgctccaacgcccacccctaccagccctcttctaaacacatcctacacccactcccagaatctgtctcaggaagggtaaggttctcagacactgccgacatcagcattgtctcgtgtacagctcccttccctgcagggcgcccctgggagacaactggacaagatttcctactttctcctgaaacccaaagccctggtaaaagggatacacaggactgaaaagggaatcatttttcactgtacattataaaccttcagaagctatttttttaagctatcagcaatactcatcagagcagctagctctttggtctattttctgcagaaatttgcaactcactgattctctacatgctctttttctgtgataactctgcaaaggcctgggctggcctggcagttgaacagagggagagactaaccttgagtcagaaaacagagaaagggtaatttcctttgcttcaaattcaaggccttccaacgcccccatcccctttactatcattctcagtgggactctgatcccatattcttaacagatctttactcttgagaaatgaataagctttctctcagaaatgctgtccctatacactagacaaaactgagcctgtataaggaataaatgggagcgccgaaaagctccctaaaaagcaa

SEQ ID NO: 108681 - DNA, 1160 bp, Artificial Sequence
  derived and/or modified sequence
tcttcctacccatctgctccccagagggctgcctgctgtgcacttgggtcctggagcccttctccacccggatagattcttcacccttggcccgcctttgccccaccctactctgcccagaagtgcaagagcctaagccgcctccatggccccaggaaggattcaggggagaggccccaaacagggagccacgccagccagacaccccggccagaatggagctgactgaattgctcctcgtggtcatgcttctcctaactgcaaggctaacgctgtccagcccggctcctcctgcttgtgacctccgagtcctcagtaaactgcttcgtgactcccatgtccttcacagcagactgagccagtgcccagaggttcaccctttgcctacacctgtcctgctgcctgctgtggactttagcttgggagaatggaaaacccagatggaggagaccaaggcacaggacattctgggagcagtgacccttctgctggagggagtgatggcagcacggggacaactgggacccacttgcctctcatccctcctggggcagctttctggacaggtccgtctcctccttggggccctgcagagcctccttggaacccagcttcctccacagggcaggaccacagctcacaaggatcccaatgccatcttcctgagcttccaacacctgctccgaggaaagacttctggattgttggagacaaacttcactgcctcagccagaactactggctctgggcttctgaagtggcagcagggattcagagccaagattcctggtctgctgaaccaaacctccaggtccctggaccaaatccccggatacctgaacaggatacacgaactcttgaatggaactcgtggactctttcctggaccctcacgcaggaccctaggagccccggacatttcctcaggaacatcagacacaggctccctgccacccaacctccagcctggatattctccttccccaacccatcctcctactggacagtatacgctcttccctcttccacccaccttgcccacccctgtggtccagctccaccccctgcttcctgacccttctgctccaacgcccacccctaccagccctcttctaaacacatcctacacccactcccagaatctgtctcaggaagggtaa

SEQ ID NO: 108682 - DNA, 1505 bp, Artificial Sequence
  derived and/or modified sequence
cctacccatctgctccccagagggctgcctgctgtgcacttgggtcctggagcccttctccacccggatagattcttcacccttggcccgcctttgccccaccctactctgcccagaagtgcaagagcctaagccgcctccatggccccaggaaggattcaggggagaggccccaaacagggagccacgccagccagacaccccggccagaatggagctgactgaattgctcctcgtggtcatgcttctcctaactgcaaggctaacgctgtccagcccggctcctcctgcttgtgacctccgagtcctcagtaaactgcttcgtgactcccatgtccttcacagcagactgagccagtgcccagaggttcaccctttgcctacacctgtcctgctgcctgctgtggactttagcttgggagaatggaaaacccagatggaggagaccaaggcacaggacattctgggagcagtgacccttctgctggagggagtgatggcagcacggggacaactgggacccacttgcctctcatccctcctggggcagctttctggacaggtccgtctcctccttggggccctgcagagcctccttggaacccagggcaggaccacagctcacaaggatcccaatgccatcttcctgagcttccaacacctgctccgaggaaaggtgcgtttcctgatgcttgtaggagggtccaccctctgcgtcaggcgggccccacccaccacagctgtccccagcagaacctctctagtcctcacactgaacgagctcccaaacaggacttctggattgttggagacaaacttcactgcctcagccagaactactggctctgggcttctgaagtggcagcagggattcagagccaagattcctggtctgctgaaccaaacctccaggtccctggaccaaatccccggatacctgaacaggatacacgaactcttgaatggaactcgtggactctttcctggaccctcacgcaggaccctaggagccccggacatttcctcaggaacatcagacacaggctccctgccacccaacctccagcctggatattctccttccccaacccatcctcctactggacagtatacgctcttccctcttccacccaccttgcccacccctgtggtccagctccaccccctgcttcctgacccttctgctccaacgcccacccctaccagccctcttctaaacacatcctacacccactcccagaatctgtctcaggaagggtaaggttctcagacactgccgacatcagcattgtctcgtgtacagctcccttccctgcagggcgcccctgggagacaactggacaagatttcctactttctcctgaaacccaaagccctggtaaaagggatacacaggactgaaaagggaatcatttttcactgtacattataaaccttcagaagctatttttttaagctatcagcaatactcatcagagcagctagctctttggtctattttctgc

SEQ ID NO: 108683 - DNA, 1620 bp, Artificial Sequence
  derived and/or modified sequence
atggtgctgcagaagctgggcaaagccgtggagacgaaagacgaaaggtttgagcagtccgcatcgaacttttaccagcaacaggcagagggccacaaactttacaaggaccttaaaaatttcctgagcgctgtcaaagtgatgcacgagagctcgaaacgggtgtctgagactttgcaggagatttactcgtctgaatgggatgggcatgaggaacttaaggctatcgtatggaacaatgaccttctctgggaagattacgaggagaaactcgccgaccaggcggtgagaactatggaaatttatgtagcccaattctccgaaatcaaagagaggatcgctaaaagaggacgcaagctggttgattacgactctgcccgccaccacctcgaagccgtgcaaaacgcaaagaaaaaagacgaagcaaaaactgctaaagcagaagaggaatttaataaggcccagacagtgttcgaagacctgaatcaggaacttctggaggaattgccgattctctacaacagccggatcggctgctatgtgaccatctttcagaacataagcaacctcagagacgtattttaccgggagatgagcaagctcaaccacaacctgtacgaggtaatgagcaagctggaaaaacagcatagtaataaagtgttcgtcgtgaagggcctgagttcaagctctagaagatccctggtgatttcacctccagtgcgcactgctaccgtgagcagccccttaacttccccaacctccccttccacactatctcttaaaagtgagagtgaatcggtatcagcaacagaggatttggcccctgatgcagcccagggcgaggacaactcagagataaaggaactcctggaggaagaggagatcgagaaggaaggttctgaggcatctagttctgaagaggatgagccacttccggcctgcaatggacctgcccaagcccagccctctcccaccactgagagggccaagtcccaagaagaggttctcccgagttcgaccacgccttctcctggcggcgccctatcacctagtggtcagccatcctcttctgctactgaggtggtgttgaggacccggaccgcctccgaaggtagtgaacagccgaagaagcgtgcatctatccagaggacatctgcacctccttctcgtcctcctcccccacgcgccacggcctcacctcggccctcctccggaaatattccatctagcccaacagcctcgggtggaggctcgccaactagcccccgggctagtctgggcacagggactgcatcccctcggacttccctagaagtcagtcccaacccggagcctcccgagaaaccggtgcgcacccctgaggccaaagaaaatgaaaatattcacaaccaaaatccggaagagctgtgtaccagtccaaccctcatgaccagccaggtggcatctgagcctggcgaagcaaaaaagatggaagataaggagaaagataataaactcattagtgctaattcaagcgagggacaggaccagctgcaggtttccatggtccctgaaaataacaatctgaccgcccccgaaccccaggaggaagttagtactagcgaaaatcctcagctgtag

SEQ ID NO: 108684 - DNA, 1620 bp, Artificial Sequence
  derived and/or modified sequence
atggtgctgcagaagctgggcaaggctgtggagaccaaggatgaaagatttgagcagagcgccagcaacttctaccagcagcaggccgagggccacaagctgtacaaggacctgaagaacttcctgtctgctgtgaaggtgatgcatgagagcagcaagagggtgtctgagaccctgcaggagatctacagcagcgagtgggatggccacgaggagctgaaggccatcgtgtggaacaatgacctgctgtgggaggactatgaggagaagctggccgaccaggccgtgaggaccatggagatctacgtggcccagttcagcgagatcaaggagagaattgccaagaggggcaggaagctggtggactatgattctgcccggcaccacctggaggccgtgcagaatgccaagaagaaggatgaggccaagacagccaaggccgaggaggagttcaacaaggcccagacagtgtttgaggacctgaaccaggagctgctggaggagctgcccatcctgtacaacagcagaattggctgctacgtgaccatcttccagaacatcagcaacctgagagatgtgttctaccgggagatgagcaagctgaaccacaacctgtatgaggtgatgagcaagctggagaagcagcacagcaacaaggtgtttgtggtgaagggcctgagcagcagcagcagaagaagcctggtgatcagcccccctgtgaggacagccaccgtgagcagccccctgaccagccccaccagccccagcaccctgagcctgaagtctgagagcgagagcgtgtctgccacagaggacctggccccagatgctgcccagggcgaggacaacagcgagatcaaggagctgctggaggaggaggagattgagaaggagggcagcgaggccagcagcagtgaagaagatgagcccctgcctgcctgcaatggacctgcccaggcccagcccagccccaccacagagcgggccaagagccaggaggaggtgctgcccagcagcaccacccccagccctgggggcgccctgagccccagcggccagcccagcagcagcgccacagaggtggtgctgcggaccaggacagccagcgagggcagcgagcagcccaagaagagggccagcatccagaggaccagcgccccacccagcaggcctcctccaccccgggccacagccagcccccggcccagcagcggcaacatccccagcagccccacagccagcggcggcggcagccccaccagcccccgggccagcctgggcaccggcacagccagccccaggaccagcctggaggtgagccccaaccctgagcccccagagaagcctgtgaggaccccagaggccaaggaaaatgaaaacatccacaaccagaaccctgaggagctgtgcaccagccccaccctgatgaccagccaggtggccagcgagcccggggaggccaagaagatggaggacaaggagaaggacaacaagctgatcagcgccaacagcagcgagggccaggaccagctgcaggtgtccatggtgcctgagaacaacaacctgacagcccctgagccccaggaggaggtgtccaccagcgagaacccccagctgtag

SEQ ID NO: 108685 - DNA, 1620 bp, Artificial Sequence
  derived and/or modified sequence
atggtgctgcagaagctgggcaaggccgtggagaccaaggacgagagattcgagcagtccgcctccaacttttaccagcagcaagctgaggggcataagctgtacaaagatctcaagaatttcctgtctgctgtgaaagtaatgcacgaatcctctaagcgggtctcagaaacccttcaggagatctatagcagcgagtgggacggccatgaagagctcaaagcaatagtgtggaataacgatttactttgggaggattatgaggagaagttggccgaccaagcagtgcgcactatggaaatctacgtggcccaattttcagagataaaggagcgtatagcgaagcgggggagaaaactcgtggattacgacagcgctcgtcatcacttggaggctgtgcagaacgcaaagaaaaaggacgaagcgaagaccgccaaagctgaagaagagtttaacaaggcccaaaccgtgttcgaagacctcaaccaggaactgcttgaggaacttccgatcctctacaacagcaggattgggtgttacgtgaccatctttcaaaatatttccaatctgcgggatgttttttatagggaaatgagcaagctcaatcacaatctttacgaagttatgtcaaaattggagaagcaacattccaataaagtgttcgtggtgaaaggcctgtcctctagtagcagacggagtctggtcatcagtcctccagttcggacggcgacagtttcgtctccccttacatctccaacgagcccgtccaccctgtccctcaaatccgagtcagaatccgtcagcgcgactgaagacctggccccggacgcagcccagggagaggataatagcgagattaaggaactacttgaggaggaagaaattgagaaagagggatctgaagcctcaagctcagaggaggacgagccgcttccagcctgcaatggccctgcacaggcccagcccagtcccaccaccgaaagggccaagagccaagaagaagtgcttccatcttctactactcctagccctggcggggccctgagcccttccggacagccttcgtccagtgccaccgaagttgtgcttcgcactcgcacagcctcagagggcagtgaacagcccaagaaaagagcaagtatccagagaacatcagcaccccccagcaggccacccccaccccgggctaccgcttccccgcgtccatcatcgggcaacattcccagctcccctactgcctccggcgggggcagcccaaccagccctagggctagcttaggaaccgggactgctagtcctagaacatcactagaagtaagcccaaatcctgaacctccggaaaagccagtgcgcacacctgaggccaaggagaatgagaacattcataaccagaatccggaggaactgtgcacctccccaactcttatgaccagtcaggtcgccagcgaacctggcgaagcaaagaaaatggaggacaaggaaaaggataacaaactcataagcgccaactcctcagagggacaagatcagctgcaggtctctatggtgcccgaaaataataatttaaccgctcccgagcctcaagaggaagtgagcaccagtgagaatccacagctttag

SEQ ID NO: 108686 - DNA, 1620 bp, Artificial Sequence
  derived and/or modified sequence
atggttctccagaagctggggaaggctgtggaaacgaaggacgaaagatttgagcagtctgcatctaatttttaccaacaacaggctgagggtcacaaactgtacaaggacctcaagaactttctgagcgccgtgaaggtgatgcatgagagttccaaacgagtgtcagagaccctgcaagagatttattctagtgaatgggacggccacgaagaactcaaggccatcgtttggaacaatgatctgctatgggaagactatgaagagaaactggcagaccaggctgtgagaaccatggagatttatgtggcgcagttcagtgaaatcaaggaacggatcgccaagcggggaagaaaactcgttgattatgactccgctaggcaccatctggaagctgtgcagaacgccaaaaagaaggacgaagcgaaaaccgccaaggctgaagaagaattcaataaggcccagactgtcttcgaggatcttaaccaggaacttttagaggagctccccattctatataactcacgtatcgggtgctatgttaccatcttccagaacatctccaacctgcgagatgtgttttacagggaaatgagcaagctgaatcataacctgtatgaggtcatgtcaaagctggagaagcagcattcaaataaagtcttcgttgtcaaagggctcagttcatcatccagacggtctctcgtcatatctccaccagtgagaactgccacagttagttctcccctgacttccccaacgagcccctccaccctaagtctgaagtcagaatccgagtctgtgtccgcaaccgaggacctcgccccagatgcggctcagggcgaggataactctgaaatcaaagagctcctggaagaggaggagatcgaaaaagaagggtcagaggcaagtagttcagaagaggacgagcccctgccggcttgcaacgggcctgctcaggcccagcccagtccaactacagagagagccaaatctcaagaggaagtgttaccctcttctaccaccccgagcccgggaggcgcattatcgcctagcggccagccctcttcgtccgccaccgaggtggtcctgagaacaagaaccgcaagtgaagggtccgaacagcctaaaaaaagagcctcgatacaaaggacatcagcacccccttcccgcccacccccacctcgagccaccgcttcacctaggcccagcagtggtaatatcccaagttctcccaccgcttcaggaggcggaagtcccaccagccctcgcgctagtctgggtactgggacagcatcgccgagaacatccctcgaagtgtctccgaatccggagccacccgagaaacctgtaaggactcctgaggccaaagaaaatgagaatatccataatcagaacccagaggaattgtgtacttctcccacccttatgacaagtcaggtcgctagcgagcccggagaagctaagaaaatggaggacaaggaaaaggacaataagttgatatcagccaattctagcgaagggcaggaccaactccaggtgagcatggtgcccgagaataataacttgacagcccctgagccgcaggaggaggtctctacttctgaaaacccccagctttag

SEQ ID NO: 108687 - DNA, 1990 bp, Artificial Sequence
  derived and/or modified sequence
ctgtttctctctttcaagcccggctcgggtgtcctgcctgctttctgcactctatccctaccagttccaggcttagagcctacctggagcaagaaacgcagtgtacatggcggcttcgcatgcatactcagagaacctaaacgtgttttcgatatggtgctgcagaaattggggaaagctgtagaaaccaaagatgaacgatttgaacaaagcgctagcaacttctaccaacaacaggcagaaggccacaagctgtacaaggacctgaagaacttccttagtgcagtcaaagtgatgcatgaaagttcaaaaagagtgtcagaaaccctgcaggagatctacagcagcgagtgggacggtcatgaggagctgaaggccatcgtatggaataatgatctcctttgggaagactacgaggagaaactggctgaccaggctgtaaggaccatggaaatctatgttgcccagttcagtgaaattaaggagagaattgccaagcggggtcggaaactcgtggactatgacagtgcccgacaccacctggaggcagtgcagaatgccaagaagaaagatgaggccaagactgccaaggcagaggaagagttcaacaaagcccagactgtgtttgaagatctgaaccaagaactactagaggagctgcctattctttataatagtcgtattggctgctatgtgaccatcttccaaaacatttccaacttgagggatgtcttctacagggaaatgagcaagctgaaccacaatctctacgaggtgatgagcaaactggagaagcaacattccaataaagtctttgtggtgaagggactgtcaagcagcagcaggcgctctttagtcatttctcccccagttcgaacagctacagtctccagtcctcttacctcacctactagtccctctacactttccttgaagagtgagagtgaatctgtctcagcaactgaagatctggcacctgatgcagcccaaggggaagacaattctgagatcaaggagctcttagaagaggaggaaatagagaaggaaggatctgaagcaagctcctctgaggaagatgagcctctaccagcctgcaatggccccgcccaggcccagccctctcctaccactgaaagggccaagtcccaggaggaagttctccccagctccacaactccatcaccaggcggagccctgagcccttcagggcagccttcatcatctgccacagaagtagtcctccgaacccgcaccgcaagtgaaggatctgaacaaccaaagaagagagcctctatccagaggacctcagcaccccctagtaggcctcctccacccagagccactgcaagccccaggccctcctcagggaacataccttccagccctacagcctctggagggggttcacccaccagccctagggcctccttggggactgggactgcaagtcctaggacctccctagaggtctctcctaatccagaaccaccagagaagccagtaagaactcctgaggccaaagaaaatgaaaacatccacaatcagaaccctgaagaactttgtacttcccccaccttaatgacatctcaggttgcttcagagcctggagaggcaaagaagatggaagacaaggaaaaggataataagcttatctcagctaactcctcggagggccaagaccagcttcaagtctccatggtaccagaaaacaacaacctcacagcacctgaacctcaagaagaggtatccacaagtgaaaatccacaactctgaagagaaactaccaagactcctcctgccccaaacctcgccagagaagctcttcaaccagagggtataggtcagagggatataagagccagcatccatccctgggttctcagtaggaatgctggtgctgtctaaagacctggcattaatggaggcggaggagcagccttacgggagggatggagggaggcaggctggggagaagagaacattagactca

SEQ ID NO: 108688 - DNA, 1620 bp, Artificial Sequence
  derived and/or modified sequence
atggtgctgcagaagctgggcaaggccgtggagaccaaggacgagagattcgagcagagcgccagcaacttctaccagcagcaggccgagggccacaagctgtacaaggacctgaagaacttcctgagcgccgtgaaggtgatgcacgagagcagcaagagagtgagcgagaccctgcaggagatctacagcagcgagtgggacggccacgaggagctgaaggccatcgtgtggaacaacgacctgctgtgggaggactacgaggagaagctggccgaccaggccgtgagaaccatggagatctacgtggcccagttcagcgagatcaaggagagaatcgccaagagaggcagaaagctggtggactacgacagcgccagacaccacctggaggccgtgcagaacgccaagaagaaggacgaggccaagaccgccaaggccgaggaggagttcaacaaggcccagaccgtgttcgaggacctgaaccaggagctgctggaggagctgcccatcctgtacaacagcagaatcggctgctacgtgaccatcttccagaacatcagcaacctgagagacgtgttctacagagagatgagcaagctgaaccacaacctgtacgaggtgatgagcaagctggagaagcagcacagcaacaaggtgttcgtggtgaagggcctgagcagcagcagcagaagaagcctggtgatcagcccccccgtgagaaccgccaccgtgagcagccccctgaccagccccaccagccccagcaccctgagcctgaagagcgagagcgagagcgtgagcgccaccgaggacctggcccccgacgccgcccagggcgaggacaacagcgagatcaaggagctgctggaggaggaggagatcgagaaggagggcagcgaggccagcagcagcgaggaggacgagcccctgcccgcctgcaacggccccgcccaggcccagcccagccccaccaccgagagagccaagagccaggaggaggtgctgcccagcagcaccacccccagccccggcggcgccctgagccccagcggccagcccagcagcagcgccaccgaggtggtgctgagaaccagaaccgccagcgagggcagcgagcagcccaagaagagagccagcatccagagaaccagcgccccccccagcagaccccccccccccagagccaccgccagccccagacccagcagcggcaacatccccagcagccccaccgccagcggcggcggcagccccaccagccccagagccagcctgggcaccggcaccgccagccccagaaccagcctggaggtgagccccaaccccgagccccccgagaagcccgtgagaacccccgaggccaaggagaacgagaacatccacaaccagaaccccgaggagctgtgcaccagccccaccctgatgaccagccaggtggccagcgagcccggcgaggccaagaagatggaggacaaggagaaggacaacaagctgatcagcgccaacagcagcgagggccaggaccagctgcaggtgagcatggtgcccgagaacaacaacctgaccgcccccgagccccaggaggaggtgagcaccagcgagaacccccagctgtag

SEQ ID NO: 108689 - protein, 533 aa, Artificial Sequence
  derived and/or modified sequence
MAEGKAGGAAGLFAKQVQKKFSRAQEKVLQKLGKAVETKDERFEQSASNFYQQQAEGHKLYKDLKNFLSAVKVMHESSKRVSETLQEIYSSEWDGHEELKAIVWERIAKRGRKLVDYDSARHHLEAVQNAKKKDEAKTAKAEEEFNKAQTVFEDLNQELLEELPILYNSRIGCYVTIFQNISNLRDVFYREMSKLNHNLYEVMSKLEKQHSNKVFVVKGLSSSSRRSLVISPPVRTATVSSPLTSPTSPSTLSLKSESESVSATEDLAPDAAQGEDNSEIKELLEEEEIEKEGSEASSSEEDEPLPACNGPAQAQPSPTTERAKSQEEVLPSSTTPSPGGALSPSGQPSSSATEVVLRTRTASEGSEQPKKRASIQRTSAPPSRPPPPRATASPRPSSGNIPSSPTASGGGSPTSPRASLGTGTASPRTSLEVSPNPEPPEKPVRTPEAKENENIHNQNPEELCTSPTLMTSQVASEPGEAKKMEDKEKDNKLISANSSEGQDQLQVSMVPENNNLTAPEPQEEVSTSENPQL

SEQ ID NO: 108690 - DNA, 1602 bp, Artificial Sequence
  derived and/or modified sequence
atggccgagggtaaagcaggcggagccgcgggtctgttcgctaagcaagtccagaagaagttttcgagagcccaggaaaaggtgcttcagaaactcggaaaagccgtggaaacaaaagacgagagattcgagcaatccgcaagcaacttctaccaacagcaagcagaggggcataagctatacaaggacttaaagaatttcctttcggccgtgaaggtaatgcacgagtcctccaaacgcgtgagcgaaacactacaggaaatatacagttccgagtgggatggtcacgaagaactgaaggcaatcgtgtgggaacgtatcgccaaaagggggaggaaacttgttgattatgactcagcccggcatcatctcgaggctgtgcagaacgccaagaaaaaggatgaggccaaaactgcaaaggcagaagaagagtttaacaaggctcagaccgtcttcgaggaccttaatcaggagttgctggaggaactgcctatactctacaactcccggatcgggtgttacgttactatctttcagaacatttctaacctgcgggacgtgttttatcgagagatgagcaagctcaatcacaatctttacgaggtgatgtccaagctggaaaaacagcattcaaacaaagtgtttgttgttaaggggctgagtagtagcagccgccgaagcctcgtgatcagccctcccgtgagaaccgccaccgtctcttcccccttgaccagcccaacaagtccatcaacactctctctgaaatccgagagcgagtccgtgtcagctacggaggatcttgccccagatgctgcacaaggcgaggataacagtgagattaaggaactccttgaggaggaagagatcgaaaaggagggctctgaggcctcatcctcagaagaggacgagcctttgcccgcctgtaatggcccagcacaggcacaaccaagtcccacgactgagcgggctaaaagccaagaagaggtgctgcccagcagcactactccatctccaggcggcgccctgagtccaagcgggcaaccttcgtcttctgccacagaggtggttctgaggactcgcacagcttcggagggcagcgaacagcccaaaaaacgggctagcattcaacgcacctccgctcccccctcacgaccgcctcctcccagagctaccgctagccctagaccttctagtgggaacataccatcttcccctaccgcttccggaggcggctcaccaacctctccacgcgcatcactggggaccggaaccgcgagcccacggactagcctggaagtgagtcctaatccagagccaccggaaaagccagtacgtaccccagaagctaaggagaatgaaaacatccacaaccaaaatcccgaggagttgtgtacgtcgcctacactcatgaccagccaagtggcatcagaaccaggcgaagccaagaagatggaagataaggagaaggataacaagctgatatccgcaaattccagcgaggggcaggaccaactgcaagtgagcatggtccctgaaaacaataacctcacagctcctgaaccacaagaggaagttagcaccagcgagaaccctcaactttag

SEQ ID NO: 108691 - DNA, 1602 bp, Artificial Sequence
  derived and/or modified sequence
atggccgagggcaaggccggcggggccgccggcctgtttgccaagcaggtgcagaagaagttcagccgggcccaggagaaggtgctgcagaagctgggcaaggctgtggagaccaaggatgaaagatttgagcagagcgccagcaacttctaccagcagcaggccgagggccacaagctgtacaaggacctgaagaacttcctgtctgctgtgaaggtgatgcatgagagcagcaagagggtgtctgagaccctgcaggagatctacagcagcgagtgggatggccacgaggagctgaaggccatcgtgtgggagagaattgccaagaggggcaggaagctggtggactatgattctgcccggcaccacctggaggccgtgcagaatgccaagaagaaggatgaggccaagacagccaaggccgaggaggagttcaacaaggcccagacagtgtttgaggacctgaaccaggagctgctggaggagctgcccatcctgtacaacagcagaattggctgctacgtgaccatcttccagaacatcagcaacctgagagatgtgttctaccgggagatgagcaagctgaaccacaacctgtatgaggtgatgagcaagctggagaagcagcacagcaacaaggtgtttgtggtgaagggcctgagcagcagcagcagaagaagcctggtgatcagcccccctgtgaggacagccaccgtgagcagccccctgaccagccccaccagccccagcaccctgagcctgaagtctgagagcgagagcgtgtctgccacagaggacctggccccagatgctgcccagggcgaggacaacagcgagatcaaggagctgctggaggaggaggagattgagaaggagggcagcgaggccagcagcagtgaagaagatgagcccctgcctgcctgcaatggacctgcccaggcccagcccagccccaccacagagcgggccaagagccaggaggaggtgctgcccagcagcaccacccccagccctgggggcgccctgagccccagcggccagcccagcagcagcgccacagaggtggtgctgcggaccaggacagccagcgagggcagcgagcagcccaagaagagggccagcatccagaggaccagcgccccacccagcaggcctcctccaccccgggccacagccagcccccggcccagcagcggcaacatccccagcagccccacagccagcggcggcggcagccccaccagcccccgggccagcctgggcaccggcacagccagccccaggaccagcctggaggtgagccccaaccctgagcccccagagaagcctgtgaggaccccagaggccaaggaaaatgaaaacatccacaaccagaaccctgaggagctgtgcaccagccccaccctgatgaccagccaggtggccagcgagcccggggaggccaagaagatggaggacaaggagaaggacaacaagctgatcagcgccaacagcagcgagggccaggaccagctgcaggtgtccatggtgcctgagaacaacaacctgacagcccctgagccccaggaggaggtgtccaccagcgagaacccccagctgtag

SEQ ID NO: 108692 - DNA, 1602 bp, Artificial Sequence
  derived and/or modified sequence
atggccgagggcaaggccggcggcgccgccggcctgttcgccaagcaagtacagaagaaattttccagagcccaggagaaggtgctccaaaagctcggtaaggctgtcgagacgaaggatgagcggttcgagcagtccgcttctaatttttaccaacagcaagcagagggacacaaattgtataaggatctgaaaaacttcctcagcgccgttaaagtcatgcacgagagtagtaagcgggtcagcgagaccctgcaggaaatctatagttcggagtgggatggacacgaggagttgaaagccatcgtgtgggaacgcattgccaagcgcggaaggaagctggtcgactatgatagcgcgcgacaccatcttgaggctgtgcagaacgctaaaaagaaagatgaggctaagacggccaaagcagaggaggagttcaacaaggcacaaaccgtgtttgaagacctgaatcaggagctgttggaggaactgccaatcttgtacaattcccgcataggctgttacgtgaccatctttcagaatatttccaacctgagggatgtgttttatcgcgaaatgtctaagttgaatcataacttgtacgaggtaatgtcgaaactcgagaaacaacattcaaataaggtgttcgtggtcaagggactatccagtagctccaggcgctcacttgttatatctccccctgtgagaacagccactgtgtcatctccactgactagtccgacgtccccaagcacactgtcgctaaagagtgaatcggagtccgtgtccgcaacagaggacctggcccctgacgccgctcagggcgaggacaacagcgaaataaaagagctacttgaggaggaggagatcgagaaggaagggagcgaggcatcgagctctgaggaggatgagcctctgccggcctgcaatggcccggcacaagcgcagccatcccccactacggagagagccaagagtcaggaagaagtcctgccaagctccacaacaccttcccctggcggagcgctgagcccaagcggccagcctagttcttccgcgacagaagttgtgctccgcactaggacagccagtgaaggatccgagcaacccaagaaacgagcgtcaatccagcgaacctccgcacctccatctcgccccccaccgccgcgggccacagcaagcccaaggccatcttccggcaacattccttcttctcctaccgcctcaggcggggggtctcccacctccccacgagcctccctcggaactggaacagcctctcctagaacatccctcgaagtgtctccaaacccagaaccccccgagaagccagtcaggacaccggaggcaaaggaaaacgaaaacatacataaccagaaccctgaagagctatgtactagccccactctcatgacatctcaggtggcatcagagcccggagaagccaagaagatggaagacaaggagaaggacaataaattgatcagcgcgaacagtagcgagggccaggatcagcttcaggtgagtatggtacccgaaaataacaatcttacagctccagagcctcaggaagaagtctcaacgagtgagaacccgcagctctag

SEQ ID NO: 108693 - DNA, 1602 bp, Artificial Sequence
  derived and/or modified sequence
atggcagagggcaaggccggtggcgctgctgggttgtttgctaagcaagtccagaaaaagttctcacgtgcgcaagaaaaggtcttgcagaaattggggaaggcagtagagaccaaggatgaaaggtttgaacaatccgccagcaacttctaccagcagcaggccgagggccacaagctttataaggacttgaagaactttctgagcgcagtcaaagtgatgcatgagtccagcaaacgcgtcagcgaaactctgcaggaaatctattcgtccgaatgggacggacacgaggagctgaaagccatagtatgggaaagaatagctaagcgtgggaggaaattggtcgattacgatagcgcccgtcatcacctcgaggctgtccaaaacgccaaaaagaaggacgaagcgaaaactgccaaggccgaggaagagttcaataaggcacaaactgtgtttgaggatttgaaccaagagttacttgaggagctgcctatcctgtacaatagccgcattggctgctacgtaaccatctttcagaatattagcaatctgcgggacgtgttttatagggagatgtctaagttgaaccacaatttgtatgaagtgatgagcaagctagaaaaacagcactcaaacaaagtgttcgtcgtgaaaggcctaagcagctcttcccgcaggtcattggtgatctcaccacctgttcggaccgctactgtttccagccctttgacctctcccacctctcccagcactctttcacttaaatccgaatctgaatcggtgagtgcaaccgaagatctagcaccagacgccgcacagggagaggacaactctgagatcaaggaacttctggaggaggaagagatcgaaaaagaagggagcgaagctagctctagcgaggaagacgagcctctgcctgcatgtaatggccctgcccaggcccagccttcgcccacaaccgagagggcaaagagccaggaagaggtgctgccatcatctaccactcccagccccggaggcgcactgtctccttctggacaaccctctagttcagcgacggaagtggtgctgaggaccagaactgcctcagaaggatcagagcaacccaagaagcgcgcttccatacagcggacaagtgctcccccttcgcgccctccgccaccaagagccaccgctagcccaagaccaagcagtggaaatatcccgtcaagcccaactgcctcaggcggtggaagcccgaccagccccagagcatctttgggaaccggaaccgccagcccaaggaccagcctcgaagtctcacccaatccggagccccctgaaaaacccgtacggacgcccgaagcgaaggagaacgagaacatccacaaccagaacccagaagaattgtgtaccagcccaacactcatgacctctcaagttgcttccgagcctggtgaggccaagaaaatggaggataaagagaaagataataaattgatctcagccaatagcagcgagggccaggaccaactgcaggtgtcaatggtgccagaaaataacaacctgaccgcccctgagccacaagaggaagtctccacgtctgaaaatcctcagctttag

SEQ ID NO: 108694 - DNA, 2124 bp, Artificial Sequence
  derived and/or modified sequence
cgggggcctcagaaaaccacagggcgcggggccagggcggcggcccccagggagttggcaggatggcagagggcaaggcaggcggcgcggccggcctcttcgccaagcaggtgcagaagaagtttagcagggcccaggagaaggtgctgcagaaattggggaaagctgtagaaaccaaagatgaacgatttgaacaaagcgctagcaacttctaccaacaacaggcagaaggccacaagctgtacaaggacctgaagaacttccttagtgcagtcaaagtgatgcatgaaagttcaaaaagagtgtcagaaaccctgcaggagatctacagcagcgagtgggacggtcatgaggagctgaaggccatcgtatgggagagaattgccaagcggggtcggaaactcgtggactatgacagtgcccgacaccacctggaggcagtgcagaatgccaagaagaaagatgaggccaagactgccaaggcagaggaagagttcaacaaagcccagactgtgtttgaagatctgaaccaagaactactagaggagctgcctattctttataatagtcgtattggctgctatgtgaccatcttccaaaacatttccaacttgagggatgtcttctacagggaaatgagcaagctgaaccacaatctctacgaggtgatgagcaaactggagaagcaacattccaataaagtctttgtggtgaagggactgtcaagcagcagcaggcgctctttagtcatttctcccccagttcgaacagctacagtctccagtcctcttacctcacctactagtccctctacactttccttgaagagtgagagtgaatctgtctcagcaactgaagatctggcacctgatgcagcccaaggggaagacaattctgagatcaaggagctcttagaagaggaggaaatagagaaggaaggatctgaagcaagctcctctgaggaagatgagcctctaccagcctgcaatggccccgcccaggcccagccctctcctaccactgaaagggccaagtcccaggaggaagttctccccagctccacaactccatcaccaggcggagccctgagcccttcagggcagccttcatcatctgccacagaagtagtcctccgaacccgcaccgcaagtgaaggatctgaacaaccaaagaagagagcctctatccagaggacctcagcaccccctagtaggcctcctccacccagagccactgcaagccccaggccctcctcagggaacataccttccagccctacagcctctggagggggttcacccaccagccctagggcctccttggggactgggactgcaagtcctaggacctccctagaggtctctcctaatccagaaccaccagagaagccagtaagaactcctgaggccaaagaaaatgaaaacatccacaatcagaaccctgaagaactttgtacttcccccaccttaatgacatctcaggttgcttcagagcctggagaggcaaagaagatggaagacaaggaaaaggataataagcttatctcagctaactcctcggagggccaagaccagcttcaagtctccatggtaccagaaaacaacaacctcacagcacctgaacctcaagaagaggtatccacaagtgaaaatccacaactctgaagagaaactaccaagactcctcctgccccaaacctcgccagagaagctcttcaaccagagggtataggtcagagggatataagagccagcatccatccctgggttctcagtaggaatgctggtgctgtctaaagacctggcattaatggaggcggaggagcagccttacgggagggatggagggaggcaggctggggagaagagaacattagactcagggaatatttaattctggttttagcattattagaataagactttatacattaactaaagtggagctttaatcactataaaaagcaaaagtatctatagacacagacacttgcctatacagagacataaccacacacactcagaggatagtgaacaaatctgtctttgacttacgacccattttgcaagacttaaagccggaagaacacattttcagattgttaaataaagtctgattctgact

SEQ ID NO: 108695 - DNA, 1602 bp, Artificial Sequence
  derived and/or modified sequence
atggccgagggcaaggccggcggcgccgccggcctgttcgccaagcaggtgcagaagaagttcagcagagcccaggagaaggtgctgcagaagctgggcaaggccgtggagaccaaggacgagagattcgagcagagcgccagcaacttctaccagcagcaggccgagggccacaagctgtacaaggacctgaagaacttcctgagcgccgtgaaggtgatgcacgagagcagcaagagagtgagcgagaccctgcaggagatctacagcagcgagtgggacggccacgaggagctgaaggccatcgtgtgggagagaatcgccaagagaggcagaaagctggtggactacgacagcgccagacaccacctggaggccgtgcagaacgccaagaagaaggacgaggccaagaccgccaaggccgaggaggagttcaacaaggcccagaccgtgttcgaggacctgaaccaggagctgctggaggagctgcccatcctgtacaacagcagaatcggctgctacgtgaccatcttccagaacatcagcaacctgagagacgtgttctacagagagatgagcaagctgaaccacaacctgtacgaggtgatgagcaagctggagaagcagcacagcaacaaggtgttcgtggtgaagggcctgagcagcagcagcagaagaagcctggtgatcagcccccccgtgagaaccgccaccgtgagcagccccctgaccagccccaccagccccagcaccctgagcctgaagagcgagagcgagagcgtgagcgccaccgaggacctggcccccgacgccgcccagggcgaggacaacagcgagatcaaggagctgctggaggaggaggagatcgagaaggagggcagcgaggccagcagcagcgaggaggacgagcccctgcccgcctgcaacggccccgcccaggcccagcccagccccaccaccgagagagccaagagccaggaggaggtgctgcccagcagcaccacccccagccccggcggcgccctgagccccagcggccagcccagcagcagcgccaccgaggtggtgctgagaaccagaaccgccagcgagggcagcgagcagcccaagaagagagccagcatccagagaaccagcgccccccccagcagaccccccccccccagagccaccgccagccccagacccagcagcggcaacatccccagcagccccaccgccagcggcggcggcagccccaccagccccagagccagcctgggcaccggcaccgccagccccagaaccagcctggaggtgagccccaaccccgagccccccgagaagcccgtgagaacccccgaggccaaggagaacgagaacatccacaaccagaaccccgaggagctgtgcaccagccccaccctgatgaccagccaggtggccagcgagcccggcgaggccaagaagatggaggacaaggagaaggacaacaagctgatcagcgccaacagcagcgagggccaggaccagctgcaggtgagcatggtgcccgagaacaacaacctgaccgcccccgagccccaggaggaggtgagcaccagcgagaacccccagctgtag

SEQ ID NO: 108696 - protein, 612 aa, Artificial Sequence
  derived and/or modified sequence
MRDFSLAQETCQLAIRDVGGLEVLINLLETDEVKCKIGSLKILKEISHNPQIRQNIVDLGGLPIMVNILDSPHKSLKCLAAETIANVAKFKRARRVVRQHGGITKLVALLDCAHDSTKPAQSSLYEARDVEVARCGALALWSCSKSHTNKEAIRKAGGIPLLARLLKTSHENMLIPVVGTLQECASEENYRAAIKAERIIENLVKNLNSENEQLQEHCAMAIYQCAEDKETRDLVRLHGGLKPLASLLNNTDNKERLAAVTGAIWKCSISKENVTKFREYKAIETLVGLLTDQPEEVLVNVVGALGECCQERENRVIVRKCGGIQPLVNLLVGINQALLVNVTKAVGACAVEPESMMIIDRLDGVRLLWSLLKNPHPDVKASAAWALCPCIKNAKDAGEMVRSFVGGLELIVNLLKSDNKEVLASVCAAITNIAKDQENLAVITDHGVVPLLSKLANTNNNKLRHHLAEAISRCCMWGRNRVAFGEHKAVAPLVRYLKSNDTNVHRATAQALYQLSEDADNCITMHENGAVKTESRHVARLECSDNDLGSLQPPPPGFKRFSCLSLLSSWDYSFYWIWLGPLTRISRKLQLVVYPISAGWLLLQRRQDTLEI

SEQ ID NO: 108697 - DNA, 1839 bp, Artificial Sequence
  derived and/or modified sequence
atgagagacttcagcctggcccaggagacctgccagctggccatcagagacgtgggcggcctggaggtgctgatcaacctgctggagaccgacgaggtgaagtgcaagatcggcagcctgaagatcctgaaggagatcagccacaacccccagatcagacagaacatcgtggacctgggcggcctgcccatcatggtgaacatcctggacagcccccacaagagcctgaagtgcctggccgccgagaccatcgccaacgtggccaagttcaagagagccagaagagtggtgagacagcacggcggcatcaccaagctggtggccctgctggactgcgcccacgacagcaccaagcccgcccagagcagcctgtacgaggccagagacgtggaggtggccagatgcggcgccctggccctgtggagctgcagcaagagccacaccaacaaggaggccatcagaaaggccggcggcatccccctgctggccagactgctgaagaccagccacgagaacatgctgatccccgtggtgggcaccctgcaggagtgcgccagcgaggagaactacagagccgccatcaaggccgagagaatcatcgagaacctggtgaagaacctgaacagcgagaacgagcagctgcaggagcactgcgccatggccatctaccagtgcgccgaggacaaggagaccagagacctggtgagactgcacggcggcctgaagcccctggccagcctgctgaacaacaccgacaacaaggagagactggccgccgtgaccggcgccatctggaagtgcagcatcagcaaggagaacgtgaccaagttcagagagtacaaggccatcgagaccctggtgggcctgctgaccgaccagcccgaggaggtgctggtgaacgtggtgggcgccctgggcgagtgctgccaggagagagagaacagagtgatcgtgagaaagtgcggcggcatccagcccctggtgaacctgctggtgggcatcaaccaggccctgctggtgaacgtgaccaaggccgtgggcgcctgcgccgtggagcccgagagcatgatgatcatcgacagactggacggcgtgagactgctgtggagcctgctgaagaacccccaccccgacgtgaaggccagcgccgcctgggccctgtgcccctgcatcaagaacgccaaggacgccggcgagatggtgagaagcttcgtgggcggcctggagctgatcgtgaacctgctgaagagcgacaacaaggaggtgctggccagcgtgtgcgccgccatcaccaacatcgccaaggaccaggagaacctggccgtgatcaccgaccacggcgtggtgcccctgctgagcaagctggccaacaccaacaacaacaagctgagacaccacctggccgaggccatcagcagatgctgcatgtggggcagaaacagagtggccttcggcgagcacaaggccgtggcccccctggtgagatacctgaagagcaacgacaccaacgtgcacagagccaccgcccaggccctgtaccagctgagcgaggacgccgacaactgcatcaccatgcacgagaacggcgccgtgaagaccgagagcagacacgtggccagactggagtgcagcgacaacgacctgggcagcctgcagccccccccccccggcttcaagagattcagctgcctgagcctgctgagcagctgggactacagcttctactggatctggctgggccccctgaccagaatcagcagaaagctgcagctggtggtgtaccccatcagcgccggctggctgctgctgcagagaagacaggacaccctggagatctag

SEQ ID NO: 108698 - DNA, 1839 bp, Artificial Sequence
  derived and/or modified sequence
atgcgggatttcagtctggcccaggagacctgtcagcttgccattcgggacgtcggtggcctagaagtgctaattaatcttctcgaaaccgacgaagttaaatgcaagataggctccctcaagattttaaaggagatttctcacaatccccagatcagacaaaacatcgtagatttgggcgggttgccgatcatggtgaacattctggacagtccgcataaatccttgaagtgcctagcggccgaaacgatcgccaacgttgccaagtttaagagggctcggcgagtggttcggcaacatggaggaatcaccaagctcgtagctcttctagactgtgctcacgatagcactaaacctgctcagtcatccttgtacgaggccagagatgtggaggtggctcggtgcggtgcgctcgccctctggtcgtgttctaagagccacactaataaggaggccatccggaaggctgggggaatacctctcttggcaaggctcttgaaaacatcgcacgaaaacatgctgatccctgtcgtgggcaccctgcaggaatgcgctagtgaggagaattaccgagccgcaatcaaggccgagagaatcatcgagaatctcgtgaagaacttgaacagtgaaaatgagcagttgcaggagcactgtgcgatggccatctatcaatgtgcagaggataaggagacgcgcgatttagtcagacttcacgggggcctgaagcctctggcaagcctcttgaataatacagacaacaaggaaaggctggctgccgtgaccggtgccatttggaagtgtagtatatcgaaagagaatgttactaagtttagggagtataaggccattgagactttggtcggactgttaactgaccaacccgaggaggtattagtgaacgtggtgggtgccttgggagaatgctgccaggagcgcgaaaatagagtgattgtcagaaagtgcgggggtattcagcctctggtgaatctgcttgtgggaatcaaccaggcgctcttggtgaacgtcacgaaggccgtgggcgcctgtgccgtggagcccgagtctatgatgattattgaccgactggacggcgttcgattactgtggtccttacttaaaaatccccacccggacgtaaaggcctcagctgcctgggcattgtgcccttgcatcaaaaacgctaaggatgccggggaaatggtccggtcattcgtgggcggtttagaattgattgtcaaccttcttaaatcagacaataaagaagttctggcctcagtgtgcgccgcaatcacaaacatcgcaaaggatcaggaaaacctcgccgttataactgaccacggagtggttcccctgctcagcaagctggcaaatactaacaataacaagcttaggcatcatcttgcagaggcaatcagtcggtgctgcatgtggggtaggaaccgtgtggcattcggggaacataaagccgtcgcccctttagtccgatacctcaagagtaatgatacaaatgtccacagggccactgcccaggcattgtaccagctgtcagaggacgcggacaattgcattacgatgcatgagaatggcgctgttaaaacagagtccaggcacgtggctagactagagtgctcggataatgatctcggttctcttcaacccccccccccaggctttaaacggttcagctgcctgagtttattgtcatcttgggactattcattctactggatttggttgggccctttgacccgaatctctagaaaactgcagctggtggtatacccgatatctgcgggttggttgctgctgcaacggagacaagacacactggagatatag

SEQ ID NO: 108699 - DNA, 1839 bp, Artificial Sequence
  derived and/or modified sequence
atgagggacttcagcctggcccaggagacctgccagctggccatcagagatgtgggcggcctggaggtgctgatcaacctgctggagacagatgaggtgaagtgcaagattggcagcctgaagatcctgaaggagatcagccacaacccccagatccggcagaacatcgtggacctgggcggcctgcccatcatggtgaacatcctggacagcccccacaagagcctgaagtgcctggccgctgagaccatcgccaacgtggccaagttcaagagggcccggcgggtggtgcggcagcacggcggcatcaccaagctggtggccctgctggactgtgcccatgacagcaccaagccagcccagagcagcctgtatgaggccagagatgtggaggtggcccgctgtggggccctggccctgtggagctgcagcaagagccacaccaacaaggaggccatcaggaaggccggcggcatccccctgctggcccggctgctgaagaccagccatgagaacatgctgatccctgtggtgggcaccctgcaggagtgtgccagcgaggagaactaccgggccgccatcaaggccgagcgcatcatcgagaacctggtgaagaacctgaacagtgaaaatgagcagctgcaggagcactgtgccatggccatctaccagtgtgccgaggacaaggagacccgggacctggtgcggctgcacggcggcctgaagcccctggccagcctgctgaacaacacagacaacaaggagcggctggccgctgtgactggagccatctggaagtgcagcatcagcaaagaaaatgtgaccaagttccgggagtacaaggccatcgagaccctggtgggcctgctgacagaccagcctgaggaggtgctggtgaatgtggtgggcgccctgggggagtgctgccaggagagagaaaatagagtgattgtgaggaaatgtggcggcatccagcccctggtgaacctgctggtgggcatcaaccaggccctgctggtgaatgtgaccaaggctgtgggcgcctgtgctgtggagcctgagagcatgatgatcatcgaccggctggatggagtgcggctgctgtggagcctgctgaagaacccccacccagatgtgaaggccagcgctgcctgggccctgtgcccctgcatcaagaatgccaaggatgctggggagatggtgcgcagctttgtgggcggcctggagctgattgtgaacctgctgaagagtgacaacaaggaggtgctggcctctgtgtgtgccgccatcaccaacatcgccaaggaccaggagaacctggccgtcatcacagaccacggcgtggtgcccctgctgagcaagctggccaacaccaacaacaacaagctgcggcaccacctggccgaggccatcagccgctgctgcatgtggggcaggaacagagtggccttcggggagcacaaggctgtggcccccctggtgcgctacctgaagagcaatgacaccaacgtgcaccgggccacagcccaggccctgtaccagctgtctgaagatgctgacaactgcatcaccatgcatgaaaatggagctgtgaagacagagagcagacatgtggcccggctggagtgcagcgacaatgacctgggcagcctgcagcccccacctcctggcttcaagcgcttcagctgcctgagcctgctgagctcctgggactacagcttctactggatctggctgggccccctgacccgcatcagcaggaagctgcagctggtggtgtaccccatctctgctggctggctgctgctgcagaggcggcaggacaccctggagatctag

SEQ ID NO: 108700 - DNA, 1839 bp, Artificial Sequence
  derived and/or modified sequence
atgcgggacttcagcctggcccaggagacctgccagctggccatccgggatgttgggggcctggaagtactgattaatctgctggagaccgatgaagtaaaatgtaagattggctccctgaagatccttaaagaaatctcccataatccacagattcgccaaaatatcgtggacctgggcggcttgccgatcatggtcaacatcctggattcaccccacaaaagtctgaagtgtctggccgcagaaaccattgccaacgtcgctaagtttaagcgggcgaggcgggtagtcaggcaacacggcgggataactaagctggtcgctttgctggactgtgcgcatgattccactaagcccgctcagtccagtctatatgaggccagagacgttgaagtagccaggtgtggggctctggctctgtggagttgttcaaagtcgcataccaacaaggaagcaatacgtaaagcaggcggtattccccttttggccaggctcctcaagacctcccacgagaacatgctgatcccagtggtgggaacactccaggagtgcgcatctgaggagaattatcgcgccgccatcaaagctgaacggatcatcgagaacctggtgaagaatctgaatagcgaaaatgagcagctgcaggagcattgcgcaatggctatctaccaatgcgcagaggacaaagaaacacgggatctggtgcggctccacgggggcctaaaacctctggccagccttctgaacaacacagacaataaggagcggctggctgccgttaccggggccatttggaaatgcagcatcagtaaggaaaatgtgaccaaattcagggaatataaagctattgagacactggtgggcctcttaaccgaccaaccggaggaggtgctggtgaacgtcgtgggcgcgttaggggaatgctgtcaggagcgggaaaatcgcgtgattgtccgcaagtgtggaggcattcagccgctagtgaatctactggtgggcattaatcaagccttgttggtcaacgtgaccaaagccgtaggcgcctgcgcagtagagccggaatccatgatgatcattgacagactggatggagtgcgtcttttatggagtttactgaaaaaccctcaccctgatgtaaaagcatccgccgcatgggctctatgtccgtgcatcaagaatgccaaagatgctggagagatggtgagaagctttgtaggtggtcttgagttaatcgtgaacctgttgaaatccgataataaagaagtgctcgcatccgtgtgtgcagctattacgaacattgctaaagaccaggagaacttggctgtgatcactgaccacggcgtcgttccactgctgtcgaaactggccaacacaaacaataacaagctccggcaccacttagctgaggctatttcgagatgctgcatgtggggaaggaatagggtggctttcggggagcacaaggccgttgccccccttgtccgatacctgaaaagtaacgataccaacgtgcacagagcgactgcacaggctttgtaccagttaagtgaggacgcagacaattgcatcactatgcatgaaaacggcgccgtaaagacagagtctcgacacgtggctagattagaatgctccgataatgacctagggtcccttcagccccctccacccgggtttaaaagattttcatgtctgtccctcctctccagttgggattattccttttactggatttggctgggaccactcacacgtatcagtcgtaaactacagctggtcgtttaccccatcagtgcaggatggctgttactccagagaagacaagacacactagagatatag

SEQ ID NO: 108701 - DNA, 1839 bp, Artificial Sequence
  derived and/or modified sequence
atgagggacttcagcctggctcaggagacctgtcaactggccatccgggatgtgggcggactcgaggtgctcatcaacctgttggaaaccgatgaggttaagtgcaagatcggatccctgaagattctaaaggagatttcccacaatccccagatccggcagaacatcgtagatctcgggggactccccatcatggttaacattctcgacagtccccacaagagtctgaaatgcctcgctgccgaaacaattgctaatgtcgcaaagtttaaaagggcacgacgggtagtgcgtcaacacggtggtatcacaaagctcgtggccctcctggactgtgctcacgattcaacgaaaccagcccaatcatccctgtatgaggcacgggatgtggaagtggccagatgtggggctttagcactctggagttgcagtaaatcacatacgaacaaagaggccataaggaaagctggcggtatccctctgttggcccgacttttgaagacctcacatgaaaatatgttaatcccagtggtggggactctccaggaatgcgcatcggaagagaattatagagccgcaatcaaggcagagcggataatcgagaacctggtgaagaacctaaactcagaaaacgagcaattgcaggagcactgtgctatggcaatttaccagtgcgccgaggataaggaaactagggatcttgtgaggctccacggaggactcaagcctctagcctccttgctgaataatacagacaataaagagcgactcgctgccgtcaccggagccatttggaagtgctcaatctccaaggagaacgtaaccaagttcagggagtacaaggcgattgaaacactcgtgggactgctgacagaccagcctgaagaggtcttggtgaatgtcgtgggagctctgggggaatgctgtcaggaaagggagaatagagtcatcgtgcgcaaatgcggcggaatccagcccctggttaatctcctcgtgggcatcaaccaggccctcttggtgaatgtgacaaaagccgtcggtgcgtgtgctgtggagcccgagtctatgatgataattgatagacttgacggagttaggctgctgtggtccctgcttaagaatccccacccagatgtcaaggccagcgccgcatgggcactgtgcccttgtatcaaaaatgctaaggacgccggtgagatggtaaggtcatttgtcggaggcttggagttgatcgtgaatttactcaagagcgataataaggaggtgctggcaagcgtgtgtgccgcaatcacaaacatagctaaggaccaggaaaatctggcggttatcacagatcacggggtcgttcccttactctccaaattagccaataccaataacaataagctgcgccaccacctggctgaagctatatcccgctgctgtatgtggggccgaaatcgggtggcctttggcgaacataaggctgtggctcccctggtgcgatacctgaaatctaatgacaccaatgttcatagagctactgcccaagccttgtatcagctgagcgaagatgctgacaactgcattaccatgcacgagaatggcgctgtaaagaccgagtctcgccacgtcgctcgccttgagtgtagcgacaatgatcttgggagcttgcagcctccacctccaggtttcaagagattctcctgtctgtctctactgtcgtcatgggactactcgttttactggatttggttgggccctctcactcggatttcgcgaaaattgcagttagtggtgtacccaatctcagccggttggctgcttctgcagcggaggcaggacactctggagatctag

SEQ ID NO: 108702 - DNA, 2521 bp, Artificial Sequence
  derived and/or modified sequence
acttctctgctgaacagcagagtgccttacatgcatataggagggcaaaacagatgatgaaggggacgttaattatgagagaaaaggttcaatttataaaaaccttgtcacatttttaagagaaaaatcaccaaaattttcagaaaatatgtctaaattggaagagtgctgaaaagattgaggaaactgttagcgatagctcctcagaaagtgaggaagatgaagaaccacctgaccatcgtcaggaagcaagtgcagatttgccatcagaatattggcaaattcagaagctggtgaaatatttaaagggaggaaatcaaacagctacagtgattgcgttgtgttcaatgagggatttcagcttagctcaagaaacctgccagttggccatcagagatgttggaggcctggaagtgctgataaatttgcttgaaaccgatgaagtcaaatgtaagattggttcattaaaaatactgaaggaaatcagtcataatcctcaaatcagacagaatattgttgaccttgggggcttaccaattatggtgaatatacttgattctccacacaagagtctaaaatgtttggcagccgagactatcgcgaatgttgccaagtttaaaagagcacggcgggtggtgaggcagcacgggggtatcaccaaactggttgctctactagactgtgcacatgattccacaaaacctgcccaatcgagtctgtatgaggccagagacgtggaagtggctcgctgtggggcactggccctgtggagctgcagtaagagtcatacgaataaagaagccatccgcaaagctgggggcattcctctgttggctcggctgctgaagacttctcatgaaaacatgctaattccagtggtggggacattgcaagagtgtgcatcagaggaaaactaccgggctgcaatcaaagcagaaaggatcattgaaaaccttgtcaagaacctaaatagtgagaatgagcagctgcaggagcactgcgccatggccatttaccagtgtgctgaagataaggaaacccgggacctcgttaggctgcacggaggacttaagcccttggccagtctactcaataacactgacaataaagagcggttagctgctgtcacaggggctatatggaaatgttccatcagcaaagagaatgttaccaagtttcgggaatacaaagccattgaaaccttggtgggacttctaacagatcagcctgaagaagtacttgtgaatgtggttggggccttgggagaatgctgccaagaacgtgaaaaccgagtcattgtccggaaatgtggtggcattcaaccacttgtgaacctccttgttggaataaaccaagctcttcttgtgaatgttacaaaagcagttggtgcttgtgcagtagaacctgaaagtatgatgataattgatcgcttagatggagttcgtttgttgtggtccctgctgaaaaatcctcacccagacgtgaaggccagcgcagcatgggcactctgtccatgcatcaaaaatgcaaaggatgctggggaaatggttcgttcctttgttggtggtttggaacttattgtcaatttactgaaatcagataacaaagaagttctggcaagtgtatgtgctgccattaccaacatagcaaaagatcaagaaaatttagctgttatcacagatcatggagttgttcctttattgtccaaactggcaaatacaaataacaataaattgagacatcatctagcagaagctatttcacgttgctgtatgtggggcaggaatagagtggccttcggtgagcacaaagcagtggctccactagtgcgttatctgaaatcaaatgacaccaacgtgcatcgggcgacagctcaggccttgtaccaactctcagaagacgccgataactgcatcaccatgcatgagaatggtgcagtaaagacagagtctcgccatgtcgccaggctagagtgcagtgacaacgatcttggctcactgcaacctccacctcccggattcaagcgattctcctgcctcagcctcctgagtagctgggattacagcttctactggatatggttgggtcccctgaccaggatctccaggaagctgcagctggttgtatatccaatatccgcaggctggctcttgctacagagaaggcaagatacacttgaaatttaaatggacattacaagctatcaaattctacatgacacaggacatgtcactcccatggccagaaagcctaaattgggaaacagttgttagcaaaccctttcaaccatctaaatgaaaacacacaaattgaaaatgcacagaatgtttttcatctgaaaattgcatggagacttttgtttctatttaatgttttcgagatatgacatgtgataagatggaaagccaataaacctgtgataagtttctaagaatatgagaatatacgtatatgatgtatttttagttcagtgatgcttttgtatttgtggcgattttaataaaaaggatatggccttccc

SEQ ID NO: 108703 - protein, 349 aa, Artificial Sequence
  derived and/or modified sequence
MELTELLLVVMLLLTARLTLSSPAPPACDLRVLSKLLRDSHVLHSRLSQCPEVHPLPTPVLLPAVDFSLGEWKTQMEETKAQDILGAVTLLLEGVMAARGQLGPTCLSSLLGQLSGQVRLLLGALQSLLGTQGRTTAHKDPNAIFLSFQHLLRGKVRFLMLVGGSTLCVRRAPPTTAVPSRTSLVLTLNELPNRTSGLLETNFTASARTTGSGLLKWQQGFRAKIPGLLNQTSRSLDQIPGYLNRIHELLNGTRGLFPGPSRRTLGAPDISSGTSDTGSLPPNLQPGYSPSPTHPPTGQYTLFPLPPTLPTPVVQLHPLLPDPSAPTPTPTSPLLNTSYTHSQNLSQEG

SEQ ID NO: 108704 - DNA, 1047 bp, Artificial Sequence
  derived and/or modified sequence
atggagctgaccgagctgctgctggtggtgatgctgctgctgaccgcccgcctgaccctgagcagccccgccccccccgcctgcgacctgcgcgtgctgagcaagctgctgcgcgacagccacgtgctgcacagccgcctgagccagtgccccgaggtgcaccccctgcccacccccgtgctgctgcccgccgtggacttcagcctgggcgagtggaagacccagatggaggagaccaaggcccaggacatcctgggcgccgtgaccctgctgctggagggcgtgatggccgcccgcggccagctgggccccacctgcctgagcagcctgctgggccagctgagcggccaggtgcgcctgctgctgggcgccctgcagagcctgctgggcacccagggccgcaccaccgcccacaaggaccccaacgccatcttcctgagcttccagcacctgctgcgcggcaaggtgcgcttcctgatgctggtgggcggcagcaccctgtgcgtgcgccgcgccccccccaccaccgccgtgcccagccgcaccagcctggtgctgaccctgaacgagctgcccaaccgcaccagcggcctgctggagaccaacttcaccgccagcgcccgcaccaccggcagcggcctgctgaagtggcagcagggcttccgcgccaagatccccggcctgctgaaccagaccagccgcagcctggaccagatccccggctacctgaaccgcatccacgagctgctgaacggcacccgcggcctgttccccggccccagccgccgcaccctgggcgcccccgacatcagcagcggcaccagcgacaccggcagcctgccccccaacctgcagcccggctacagccccagccccacccacccccccaccggccagtacaccctgttccccctgccccccaccctgcccacccccgtggtgcagctgcaccccctgctgcccgaccccagcgcccccacccccacccccaccagccccctgctgaacaccagctacacccacagccagaacctgagccaggagggc

SEQ ID NO: 108705 - DNA, 1050 bp, Artificial Sequence
  derived and/or modified sequence
atggagctgaccgagctgctgctggtggtgatgctgctgctgaccgccagactgaccctgagcagccccgccccccccgcctgcgacctgagagtgctgagcaagctgctgagagacagccacgtgctgcacagcagactgagccagtgccccgaggtgcaccccctgcccacccccgtgctgctgcccgccgtggacttcagcctgggcgagtggaagacccagatggaggagaccaaggcccaggacatcctgggcgccgtgaccctgctgctggagggcgtgatggccgccagaggccagctgggccccacctgcctgagcagcctgctgggccagctgagcggccaggtgagactgctgctgggcgccctgcagagcctgctgggcacccagggcagaaccaccgcccacaaggaccccaacgccatcttcctgagcttccagcacctgctgagaggcaaggtgagattcctgatgctggtgggcggcagcaccctgtgcgtgagaagagccccccccaccaccgccgtgcccagcagaaccagcctggtgctgaccctgaacgagctgcccaacagaaccagcggcctgctggagaccaacttcaccgccagcgccagaaccaccggcagcggcctgctgaagtggcagcagggcttcagagccaagatccccggcctgctgaaccagaccagcagaagcctggaccagatccccggctacctgaacagaatccacgagctgctgaacggcaccagaggcctgttccccggccccagcagaagaaccctgggcgcccccgacatcagcagcggcaccagcgacaccggcagcctgccccccaacctgcagcccggctacagccccagccccacccacccccccaccggccagtacaccctgttccccctgccccccaccctgcccacccccgtggtgcagctgcaccccctgctgcccgaccccagcgcccccacccccacccccaccagccccctgctgaacaccagctacacccacagccagaacctgagccaggagggctag

SEQ ID NO: 108706 - DNA, 1050 bp, Artificial Sequence
  derived and/or modified sequence
atggaactgaccgagctgttactcgtcgttatgttgctcctgacagccaggctgactctcagctcgccggctccgccagcttgtgatctgagagtgctgtctaagctgctgagagactctcacgtcttgcattccagactgtcacagtgcccagaagttcaccctctccccacaccagtcttgttgccggcggttgacttcagcctgggggagtggaagactcagatggaggagacaaaggcccaggatattctgggggctgtgaccctcttgctcgaaggtgtgatggcagcgcgtggtcagctgggcccgacatgtctatcctctctgctcgggcagttgagcggtcaagtgcggctcctactgggtgccctccagtctcttctcggtactcagggaaggacaactgcccacaaggaccctaacgcaatatttctttcttttcagcacttgctgagagggaaagtgcgcttcctaatgctcgtggggggctctaccttgtgcgtgaggcgggctcctccaacaacagccgtgccctctcggacgtccttggtcttgacactcaacgaactgcctaatagaacctcaggactgcttgagactaatttcactgcttccgcccgtaccacagggtccggcctcttgaagtggcagcaaggttttcgggccaaaataccaggactgcttaaccagacgtcacgcagcctagatcagatccctggatacctgaatcggatccatgaacttctcaatggaactcgcggcctttttcccggccccagcagacgaacattgggagccccagacataagttccggcacgagtgacaccggaagtctcccccctaacctgcaacctggctacagcccatccccaacgcacccacctacggggcagtacaccctcttcccactcccacccacacttcccactcccgtcgtgcagctgcaccctctgctgcccgacccatctgcgccaaccccaacaccgacatcacccctgttgaacacgtcctatacccacagccaaaatttatctcaggagggctag

SEQ ID NO: 108707 - DNA, 1050 bp, Artificial Sequence
  derived and/or modified sequence
atggagctgacagagctgctgctggtggtgatgctgctgctgacagcccggctgaccctgagcagccctgcccccccagcctgtgacctgcgggtgctgagcaagctgctgcgggacagccacgtgctgcacagccggctgagccagtgcccagaggtgcaccccctgcccacccctgtgctgctgcctgctgtggacttcagcctgggggagtggaagacccagatggaggagaccaaggcccaggacatcctgggcgctgtgaccctgctgctggagggcgtgatggccgcccggggccagctgggccccacctgcctgagcagcctgctgggccagctgagcggccaggtgcggctgctgctgggcgccctgcagagcctgctgggcacccagggccgcaccacagcccacaaggaccccaatgccatcttcctgtccttccagcacctgctgcggggcaaggtgcgcttcctgatgctggtgggcggcagcaccctgtgtgtgcggcgggccccacccaccacagctgtgcccagcaggaccagcctggtgctgaccctgaatgagctgcccaacagaaccagcggcctgctggagaccaacttcaccgccagcgcccggaccaccggcagcggcctgctgaagtggcagcagggcttccgggccaagatccctggcctgctgaaccagaccagccgcagcctggaccagatccctggctacctgaaccgcatccacgagctgctgaatggcacccggggcctcttccctggccccagcaggaggaccctgggcgccccagacatcagcagcggcaccagtgacaccggcagcctgccccccaacctgcagcccggctacagccccagccccacccaccccccaacaggccagtacaccctcttccccctgccccccaccctgcccacccctgtggtgcagctgcaccccctgctgcctgaccccagcgcccccacccccacccccaccagccccctgctgaacaccagctacacccacagccagaacctgagccaggagggctag

SEQ ID NO: 108708 - DNA, 1050 bp, Artificial Sequence
  derived and/or modified sequence
atggagctgaccgagctgctgctggtggtgatgctgctgctgaccgccagactaacattgtcttctcccgcacctccagcctgcgatcttagagtgcttagcaagttgctgcgcgactctcacgtgctgcactcaaggctgagccagtgccctgaagtgcaccccttgccaaccccagttctgttgccagccgtggacttctcccttggcgagtggaagacccagatggaggaaaccaaggctcaagacattctgggcgcagtcactttactattagagggagtgatggccgctcgaggacagctcgggcccacctgtctgtcttccctgctgggacagctgtctggccaggtgcgtctgctgttgggagcactgcagtcgcttcttggaacgcagggacgcacaactgcgcataaagaccccaatgccatcttcctctccttccagcacctgctacgcgggaaagtgcgcttcttgatgctcgttggcgggtctaccttgtgtgtgaggagggctcctcccacaacagcagtgcccagccgtacttctctcgtgctgacgcttaacgagttgcctaaccgtacatctggccttctggaaactaattttacagccagtgcccgtaccaccggctccggactgctgaagtggcaacaaggatttcgagctaagatccccggcctgctgaatcagaccagccggtccctggatcagatccctggctacctcaataggatccacgagctcctaaacggcacaaggggcctcttccccgggcccagtcgcagaactttgggggctccagatattagcagcggaacctctgatacgggttctttgccgcctaacctgcagcccggatattcaccgagcccgacccacccacctacagggcagtacacccttttcccactgcccccaactttgccaacaccggtcgtgcagcttcatcctctgctgccggatccatccgctcccacccccacaccgacttcccctctcctaaacacttcttatactcatagccaaaacttgtcacaggaagggtag

SEQ ID NO: 108709 - DNA, 1050 bp, Artificial Sequence
  derived and/or modified sequence
atggaacttactgagctgttgctggtggttatgctcttacttaccgctcggctcactctgagctcaccagcccctcctgcctgcgacttgagagtcctcagcaagctgctgcgcgacagccatgtactgcatagccggcttagtcaatgtccagaggtccaccctctcccaactcctgtcctccttcccgctgttgattttagcctcggggagtggaaaactcagatggaagagaccaaggctcaggacattctaggtgctgtcaccctgctcctggagggcgtgatggccgctagaggccagctcgggcctacatgcctatcatctctcctcgggcagctgagtggtcaagtgaggctcctgttaggcgctctgcaatcactgctggggacgcaggggagaacgaccgcgcataaggaccccaatgccatattcttgtccttccagcatttactgagaggaaaggtacggtttcttatgttggtcgggggaagcaccctgtgcgtgcggcgtgccccaccaactactgctgtcccaagtcgcacctccctggtcctgaccctgaatgagctgcctaacaggaccagcggactactggaaacaaactttaccgcgtcggccagaaccacaggcagcggactactgaaatggcaacagggttttcgcgcaaaaatacctggactcctaaaccagacaagcagaagtcttgaccagatccctggatatctcaatcggatccacgaactgctcaatggcactcgcggactcttccctggaccgagtagaaggactctaggagcacccgatatcagttctggtacctcagacactggcagccttcccccaaacctgcagcctggctattcccctagccctactcatccacccaccggtcagtataccctgtttccactcccgcctactctgcctacccctgtggtgcagctccacccattactccccgatcctagtgcccctacgccaacacctacctcccctttgctcaacaccagttacacccatagccagaacctttctcaggagggatag

SEQ ID NO: 108710 - DNA, 1050 bp, Artificial Sequence
  derived and/or modified sequence
atggagctcacggagctgctgcttgtagtcatgttactgctcaccgcgaggcttacactctcaagtcctgccccacctgcctgtgatcttcgggtacttagtaagctcctgagagattcccacgttctgcattcaaggctctcacagtgcccagaagtacacccattacctacaccagtgttactgcccgccgtggacttttcgctcggggaatggaagacccagatggaagagaccaaggcccaagatatcctgggtgccgtgaccctgctgctcgaaggcgtgatggcagcaagaggacagctgggccctacatgcctgagtagtttgctgggccaactctccgggcaggtgagactgctgctcggcgccctgcagtccctcttaggaacccagggacgtactactgcgcacaaagaccctaacgcgatttttttatcattccagcatctgctccgtggcaaggttagattcctaatgctagtgggcggcagtacactctgtgtgcggagggcccctcctaccaccgccgtgccgtcacgcaccagtctcgtgcttacactcaacgaactccctaacagaacatccggcctgctcgaaacaaattttacggcttctgctaggacaacgggatccggcttattgaagtggcagcagggcttcagggccaaaatacccggactcctcaaccaaacatcacgcagtctggatcagatccccggctacctaaaccggatccatgagctcctgaatggcacaagaggcttatttcccggaccttccaggaggaccctcggtgctcctgacatatcctccggcacctccgataccgggtctctgccccccaatctgcagcccggttactctccctccccaacccacccgccgacaggccagtacacccttttcccactgcctccaaccttaccgacccccgttgtgcaactgcatccattgctgccagacccaagtgcaccaacccctacaccaacatctcctttactgaatacgtcctatacccactctcagaatttatcccaggagggttag

SEQ ID NO: 108711 - DNA, 1050 bp, Artificial Sequence
  derived and/or modified sequence
atggaactgactgaactactcctggtggttatgctcctacttaccgcccgtctgacactgtcatcacccgcaccaccagcatgcgatctaagagtcttaagcaaattactccgcgattcccacgttctgcactcccgtctgtcgcagtgtccagaggtgcaccccctacctacaccagtcctcctgccagctgtggatttttctctgggagaatggaagacccagatggaagagaccaaagctcaagatattctaggggccgtcacactcctgctggagggagtgatggccgctcgtggccagctcggaccaacctgcttatcctcactactaggccagctgtcggggcaggtgaggctgttacttggagccctgcaaagtttgcttggaacacagggccgcactactgcacacaaggatccaaatgctattttcttatcttttcagcacttgcttcgtggtaaagtacgcttcttgatgttagttggcgggtcaacattgtgcgtccggcgggctccacccactaccgccgttccctctcggacatccctagtactgacccttaacgaactgccaaatcgcacatcaggcctgctcgagacgaactttaccgccagcgcacgaactacaggctctggcctactgaagtggcagcaaggctttcgggccaaaattccaggcctgctcaaccagacatcccgctcgttagaccagatacctggctatctcaatcggatacatgaactccttaacggtacgcggggcttgttccccggaccgagccgacgcactctcggggcaccagatatttcaagcggcaccagcgacacgggttcactcccacctaacctccaacccggctattccccttcccctacgcaccctcccacgggccagtacacgctgtttcctctgcctccaacactgcctaccccggtcgtgcaactacacccccttcttccagatcctagcgctcccactccaactccaacatcccccctgctgaacacatcatatactcattctcaaaatctaagccaagaaggttag

SEQ ID NO: 108712 - RNA, 1050 nt, Artificial Sequence
  derived and/or modified sequence
auggagcucacggagcugcugcuuguagucauguuacugcucaccgcgaggcuuacacucucaaguccugccccaccugccugugaucuucggguacuuaguaagcuccugagagauucccacguucugcauucaaggcucucacagugcccagaaguacacccauuaccuacaccaguguuacugcccgccguggacuuuucgcucggggaauggaagacccagauggaagagaccaaggcccaagauauccugggugccgugacccugcugcucgaaggcgugauggcagcaagaggacagcugggcccuacaugccugaguaguuugcugggccaacucuccgggcaggugagacugcugcucggcgcccugcagucccucuuaggaacccagggacguacuacugcgcacaaagacccuaacgcgauuuuuuuaucauuccagcaucugcuccguggcaagguuagauuccuaaugcuagugggcggcaguacacucugugugcggagggccccuccuaccaccgccgugccgucacgcaccagucucgugcuuacacucaacgaacucccuaacagaacauccggccugcucgaaacaaauuuuacggcuucugcuaggacaacgggauccggcuuauugaaguggcagcagggcuucagggccaaaauacccggacuccucaaccaaacaucacgcagucuggaucagauccccggcuaccuaaaccggauccaugagcuccugaauggcacaagaggcuuauuucccggaccuuccaggaggacccucggugcuccugacauauccuccggcaccuccgauaccgggucucugccccccaaucugcagcccgguuacucucccuccccaacccacccgccgacaggccaguacacccuuuucccacugccuccaaccuuaccgacccccguugugcaacugcauccauugcugccagacccaagugcaccaaccccuacaccaacaucuccuuuacugaauacguccuauacccacucucagaauuuaucccaggaggguuag

SEQ ID NO: 108713 - RNA, 1050 nt, Artificial Sequence
  derived and/or modified sequence
auggaacugacugaacuacuccuggugguuaugcuccuacuuaccgcccgucugacacugucaucacccgcaccaccagcaugcgaucuaagagucuuaagcaaauuacuccgcgauucccacguucugcacucccgucugucgcaguguccagaggugcacccccuaccuacaccaguccuccugccagcuguggauuuuucucugggagaauggaagacccagauggaagagaccaaagcucaagauauucuaggggccgucacacuccugcuggagggagugauggccgcucguggccagcucggaccaaccugcuuauccucacuacuaggccagcugucggggcaggugaggcuguuacuuggagcccugcaaaguuugcuuggaacacagggccgcacuacugcacacaaggauccaaaugcuauuuucuuaucuuuucagcacuugcuucgugguaaaguacgcuucuugauguuaguuggcgggucaacauugugcguccggcgggcuccacccacuaccgccguucccucucggacaucccuaguacugacccuuaacgaacugccaaaucgcacaucaggccugcucgagacgaacuuuaccgccagcgcacgaacuacaggcucuggccuacugaaguggcagcaaggcuuucgggccaaaauuccaggccugcucaaccagacaucccgcucguuagaccagauaccuggcuaucucaaucggauacaugaacuccuuaacgguacgcggggcuuguuccccggaccgagccgacgcacucucggggcaccagauauuucaagcggcaccagcgacacggguucacucccaccuaaccuccaacccggcuauuccccuuccccuacgcacccucccacgggccaguacacgcuguuuccucugccuccaacacugccuaccccggucgugcaacuacacccccuucuuccagauccuagcgcucccacuccaacuccaacauccccccugcugaacacaucauauacucauucucaaaaucuaagccaagaagguuag

SEQ ID NO: 108714 - DNA, 2906 bp, Artificial Sequence
  derived and/or modified sequence
gactgggtcaggcgcctccttcacttgctgtgagtcccttatcacaactgatcactccgtggggtcaccgctgctctggcgtctacctcccccaacaggttggggtttctaggagggcagctccagaggttgcagaacactccgctgcctctccagagccaggcacacagcaggcgctccataaatgttcgttggtcttttctccttgctcagcttcaatgtgttccggagtggggacggggtggctgaacctcgcaggtggcagagaggctcccctggggctgtggggctctacgtggatccgatggagccgctggtgacctgggtggtccccctcctcttcctcttcctgctgtccaggcagggcgctgcctgcagaaccagtgagtgctgttttcaggacccgccatatccggatgcagactcaggctcggcctcgggccctagggacctgagatgctatcggatatccagtgatcgttacgagtgctcctggcagtatgagggtcccacagctggggtcagccacttcctgcggtgttgccttagctccgggcgctgctgctacttcgccgccggctcagccaccaggctgcagttctccgaccaggctggggtgtctgtgctgtacactgtcacactctgggtggaatcctgggccaggaaccagacagagaagtctcctgaggtgaccctgcagctctacaactcagttaaatatgagcctcctctgggagacatcaaggtgtccaagttggccgggcagctgcgtatggagtgggagaccccggataaccaggttggtgctgaggtgcagttccggcaccggacacccagcagcccatggaagttgggcgactgcggacctcaggatgatgatactgagtcctgcctctgccccctggagatgaatgtggcccaggaattccagctccgacgacggcagctggggagccaaggaagttcctggagcaagtggagcagccccgtgtgcgttccccctgaaaaccccccacagcctcaggtgagattctcggtggagcagctgggccaggatgggaggaggcggctgaccctgaaagagcagccaacccagctggagcttccagaaggctgtcaagggctggcgcctggcacggaggtcacttaccgactacagctccacatgctgtcctgcccgtgtaaggccaaggccaccaggaccctgcacctggggaagatgccctatctctcgggtgctgcctacaacgtggctgtcatctcctcgaaccaatttggtcctggcctgaaccagacgtggcacattcctgccgacacccacacagaaccagtggctctgaatatcagcgtcggaaccaacgggaccaccatgtattggccagcccgggctcagagcatgacgtattgcattgaatggcagcctgtgggccaggacgggggccttgccacctgcagcctgactgcgccgcaagacccggatccggctggaatggcaacctacagctggagtcgagagtctggggcaatggggcaggaaaagtgttactacattaccatctttgcctctgcgcaccccgagaagctcaccttgtggtctacggtcctgtccacctaccactttgggggcaatgcctcagcagctgggacaccgcaccacgtctcggtgaagaatcatagcttggactctgtgtctgtggactgggcaccatccctgctgagcacctgtcccggcgtcctaaaggagtatgttgtccgctgccgagatgaagacagcaaacaggtgtcagagcatcccgtgcagcccacagagacccaagttaccctcagtggcctgcgggctggtgtagcctacacggtgcaggtgcgagcagacacagcgtggctgaggggtgtctggagccagccccagcgcttcagcatcgaagtgcaggtttctgattggctcatcttcttcgcctccctggggagcttcctgagcatccttctcgtgggcgtccttggctaccttggcctgaacagggccgcacggcacctgtgcccgccgctgcccacaccctgtgccagctccgccattgagttccctggagggaaggagacttggcagtggatcaacccagtggacttccaggaagaggcatccctgcaggaggccctggtggtagagatgtcctgggacaaaggcgagaggactgagcctctcgagaagacagagctacctgagggtgcccctgagctggccctggatacagagttgtccttggaggatggagacaggtgcaaggccaagatgtgatcgttgaggctcagagagggtgagtgactcgcccgaggctacgtagcacacacaggagtcacatttggacccaaataacccagagctcctccaggctccagtgcacctgcctcctctctgccccgtgcctgttgccacccatcctgcgggggaaccctagatgctgccatgaaatggaagctgctgcaccctgctgggcctggcatccgtggggcaggagcagaccctgccatttacctgttctggcgtagaatggactgggaatgggggcaaggggggctcagatggatccctggaccctgggctgggcatccacccccaggagcactggatggggagtctggactcaagggctccctgcagcattgcggggtcttgtagcttggaggatccaggcatatagggaagggggctgtaaactttgtgggaaaaatgacggtcctcccatcccaccccccaccccaccctcacccccctataaaatgggggtggtgataatgaccttacacagctgttcaaaatcatcgtaaatgagcctcctcttgggtatttttttcctgtttgaagcttgaatgtcctgctcaaaatctcaaaacacgagccttggaattca

SEQ ID NO: 108715 - DNA, 2100 bp, Artificial Sequence
  derived and/or modified sequence
ggtggctgaacctcgcaggtggcagagaggctcccctggggctgtggggctctacgtggatccgatggagccgctggtgacctgggtggtccccctcctcttcctcttcctgctgtccaggcagggcgctgcctgcagaaccagtgagtgctgttttcaggacccgccatatccggatgcagactcaggctcggcctcgggccctagggacctgagatgctatcggatatccagtgatcgttacgagtgctcctggcagtatgagggtcccacagctggggtcagccacttcctgcggtgttgccttagctccgggcgctgctgctacttcgccgccggctcagccaccaggctgcagttctccgaccaggctggggtgtctgtgctgtacactgtcacactctgggtggaatcctgggccaggaaccagacagagaagtctcctgaggtgaccctgcagctctacaactcagttaaatatgagcctcctctgggagacatcaaggtgtccaagttggccgggcagctgcgtatggagtgggagaccccggataaccaggttggtgctgaggtgcagttccggcaccggacacccagcagcccatggaagttgggcgactgcggacctcaggatgatgatactgagtcctgcctctgccccctggagatgaatgtggcccaggaattccagctccgacgacggcagctggggagccaaggaagttcctggagcaagtggagcagccccgtgtgcgttccccctgaaaaccccccacagcctcaggtgagattctcggtggagcagctgggccaggatgggaggaggcggctgaccctgaaagagcagccaacccagctggagcttccagaaggctgtcaagggctggcgcctggcacggaggtcacttaccgactacagctccacatgctgtcctgcccgtgtaaggccaaggccaccaggaccctgcacctggggaagatgccctatctctcgggtgctgcctacaacgtggctgtcatctcctcgaaccaatttggtcctggcctgaaccagacgtggcacattcctgccgacacccacacagaaccagtggctctgaatatcagcgtcggaaccaacgggaccaccatgtattggccagcccgggctcagagcatgacgtattgcattgaatggcagcctgtgggccaggacgggggccttgccacctgcagcctgactgcgccgcaagacccggatccggctggaatggcaacctacagctggagtcgagagtctggggcaatggggcaggaaaagtgttactacattaccatctttgcctctgcgcaccccgagaagctcaccttgtggtctacggtcctgtccacctaccactttgggggcaatgcctcagcagctgggacaccgcaccacgtctcggtgaagaatcatagcttggactctgtgtctgtggactgggcaccatccctgctgagcacctgtcccggcgtcctaaaggagtatgttgtccgctgccgagatgaagacagcaaacaggtgtcagagcatcccgtgcagcccacagagacccaagttaccctcagtggcctgcgggctggtgtagcctacacggtgcaggtgcgagcagacacagcgtggctgaggggtgtctggagccagccccagcgcttcagcatcgaagtgcaggtttctgattggctcatcttcttcgcctccctggggagcttcctgagcatccttctcgtgggcgtccttggctaccttggcctgaacagggccgcacggcacctgtgcccgccgctgcccacaccctgtgccagctccgccattgagttccctggagggaaggagacttggcagtggatcaacccagtggacttccaggaagaggcatccctgcaggaggccctggtggtagagatgtcctgggacaaaggcgagaggactgagcctctcgagaagacagagctacctgagggtgcccctgagctggccctggatacagagttgtccttggaggatggagacaggtgcaaggccaagatgtgatcgttgaggctcagagagggtgagtgactcgcccgaggctacgtagc

SEQ ID NO: 108716 - protein, 286 aa, Artificial Sequence
  derived and/or modified sequence
MELTELLLVVMLLLTARLTLSSPAPPACDLRVLSKLLRDSHVLHSRLSQCPEVHPLPTPVLLPAVDFSLGEWKTQMEETKAQDILGAVTLLLEGVMAARGQLGPTCLSSLLGQLSGQVRLLLGALQSLLGTQLPPQGRTTAHKDPNAIFLSFQHLLRGKDFWIVGDKLHCLSQNYWLWASEVAAGIQSQDSWSAEPNLQVPGPNPRIPEQDTRTLEWNSWTLSWTLTQDPRSPGHFLRNIRHRLPATQPPAWIFSFPNPSSYWTVYALPSSTHLAHPCGPAPPPAS

SEQ ID NO: 108717 - DNA, 858 bp, Artificial Sequence
  derived and/or modified sequence
atggagctgaccgagctgctgctggtggtgatgctgctgctgaccgcccgcctgaccctgagcagccccgccccccccgcctgcgacctgcgcgtgctgagcaagctgctgcgcgacagccacgtgctgcacagccgcctgagccagtgccccgaggtgcaccccctgcccacccccgtgctgctgcccgccgtggacttcagcctgggcgagtggaagacccagatggaggagaccaaggcccaggacatcctgggcgccgtgaccctgctgctggagggcgtgatggccgcccgcggccagctgggccccacctgcctgagcagcctgctgggccagctgagcggccaggtgcgcctgctgctgggcgccctgcagagcctgctgggcacccagctgcccccccagggccgcaccaccgcccacaaggaccccaacgccatcttcctgagcttccagcacctgctgcgcggcaaggacttctggatcgtgggcgacaagctgcactgcctgagccagaactactggctgtgggccagcgaggtggccgccggcatccagagccaggacagctggagcgccgagcccaacctgcaggtgcccggccccaacccccgcatccccgagcaggacacccgcaccctggagtggaacagctggaccctgagctggaccctgacccaggacccccgcagccccggccacttcctgcgcaacatccgccaccgcctgcccgccacccagccccccgcctggatcttcagcttccccaaccccagcagctactggaccgtgtacgccctgcccagcagcacccacctggcccacccctgcggccccgcccccccccccgccagc

SEQ ID NO: 108718 - DNA, 861 bp, Artificial Sequence
  derived and/or modified sequence
atggagctgaccgagctgctgctggtggtgatgctgctgctgaccgccagactgaccctgagcagccccgccccccccgcctgcgacctgagagtgctgagcaagctgctgagagacagccacgtgctgcacagcagactgagccagtgccccgaggtgcaccccctgcccacccccgtgctgctgcccgccgtggacttcagcctgggcgagtggaagacccagatggaggagaccaaggcccaggacatcctgggcgccgtgaccctgctgctggagggcgtgatggccgccagaggccagctgggccccacctgcctgagcagcctgctgggccagctgagcggccaggtgagactgctgctgggcgccctgcagagcctgctgggcacccagctgcccccccagggcagaaccaccgcccacaaggaccccaacgccatcttcctgagcttccagcacctgctgagaggcaaggacttctggatcgtgggcgacaagctgcactgcctgagccagaactactggctgtgggccagcgaggtggccgccggcatccagagccaggacagctggagcgccgagcccaacctgcaggtgcccggccccaaccccagaatccccgagcaggacaccagaaccctggagtggaacagctggaccctgagctggaccctgacccaggaccccagaagccccggccacttcctgagaaacatcagacacagactgcccgccacccagccccccgcctggatcttcagcttccccaaccccagcagctactggaccgtgtacgccctgcccagcagcacccacctggcccacccctgcggccccgcccccccccccgccagctag

SEQ ID NO: 108719 - DNA, 861 bp, Artificial Sequence
  derived and/or modified sequence
atggagcttacagagctcctgctggtggtaatgctcctcctgactgcgcgtcttacattgagcagtccggcacctccagcttgcgacctccgggtgttgagcaaactgctcagagactcgcacgtactgcacagtagactgtcccagtgccccgaggtgcacccgctgcctacgcccgtgttgttaccggcagtggacttctctcttggggaatggaaaacccagatggaagagactaaggcccaggacatattgggcgctgtaaccctgttgctcgagggcgtgatggcagctcgaggccaactgggccccacttgtctgtctagcctgctggggcagttgtccggacaggtgagactgctgctcggagcactgcagtccctgctgggtacccagctgcccccacagggtcggacaactgcacacaaggacccaaacgctatttttctctcctttcagcacctgctgagagggaaggacttctggatcgttggcgacaagctgcactgcctctcacagaattactggctctgggcttcagaagtggctgccggtattcagagccaagatagctggtccgcagagcccaacctccaggtgcctggccccaatccaagaattccggagcaggataccaggacccttgagtggaatagttggactctgtcttggacattaactcaggatccacgttcacccggacactttctacgaaatatcaggcacaggcttcccgcaacgcaacctcctgcctggatcttcagttttcccaatcccagctcatactggaccgtgtacgctcttccctcatcaacgcacctggctcacccttgcgggcccgctccaccacccgcatcctag

SEQ ID NO: 108720 - DNA, 861 bp, Artificial Sequence
  derived and/or modified sequence
atggagctgacagagctgctgctggtggtgatgctgctgctgacagcccggctgaccctgagcagccctgcccccccagcctgtgacctgcgggtgctgagcaagctgctgcgggacagccacgtgctgcacagccggctgagccagtgcccagaggtgcaccccctgcccacccctgtgctgctgcctgctgtggacttcagcctgggggagtggaagacccagatggaggagaccaaggcccaggacatcctgggcgctgtgaccctgctgctggagggcgtgatggccgcccggggccagctgggccccacctgcctgagcagcctgctgggccagctgagcggccaggtgcggctgctgctgggcgccctgcagagcctgctgggcacccagctgcccccccagggccgcaccacagcccacaaggaccccaatgccatcttcctgtccttccagcacctgctgcggggcaaggacttctggatcgtgggggacaagctgcactgcctgagccagaactactggctgtgggccagcgaggtggccgccggcatccagagccaggacagctggagcgctgagcccaacctgcaggtgcccggccccaacccccgcatccctgagcaggacaccaggaccctggagtggaacagctggaccctgtcctggaccctgacccaggaccccaggagccctggccacttcctgaggaacatccgccaccggctgcctgccacccagcccccagcctggatcttctccttccccaaccccagcagctactggacagtgtatgccctgcccagcagcacccacctggcccacccctgtggccctgcccctcctccagccagctag

SEQ ID NO: 108721 - DNA, 861 bp, Artificial Sequence
  derived and/or modified sequence
atggagctgaccgagctgctgctggtggtgatgctgctgctgaccgctcgattaacccttagctcccccgccccacctgcctgcgacctccgggtcctgagtaagctactccgggacagccatgtgctccacagtcgcctgagtcagtgtccagaggtgcatcccctcccgacacctgtattgctgcccgccgtcgacttctccctgggagagtggaaaacgcagatggaagaaacgaaggctcaagatatcctgggagccgtaacactgctgctagaaggggtgatggccgccaggggccaactcggccctacctgcttaagtagtctcctcggacagttaagcggccaggtgagattactgctcggcgccctccagtctctcttggggactcagctcccacctcagggtcgcacaacagcccataaagatccaaatgccatcttcttatcttttcagcacctgctccgagggaaggacttctggattgtcggcgataagctacattgcctgtcccaaaattattggctctgggcaagcgaggtcgcagctggaatccagagccaggattcttggtccgcagagccgaacttgcaggtgcctggccctaacccacgaattccagaacaggatactcgcacactggagtggaactcatggacactctcgtggactctgacccaggacccaagaagtccaggacattttctaagaaatattagacaccgtcttcctgccacgcaacctccagcatggattttcagcttcccaaatccctcttcatattggacagtgtacgccctgcccagttctacccacctggcacatccctgtggaccagcccctccccctgcttcttag

SEQ ID NO: 108722 - DNA, 861 bp, Artificial Sequence
  derived and/or modified sequence
atggaactgacagagctcctactagtagtcatgttactgcttactgcccgtttgaccctatcttcgcccgcacctcctgcttgtgatctccgggtgctatcaaagctgctgagagatagccacgtgctgcactcccgcctgtcacaatgcccagaagtgcaccctctgcctactcctgtgctgttgccagctgtggattttagcttaggcgaatggaagacgcagatggaggaaaccaaggctcaggatatcctcggggctgtgactctgcttctggagggggtaatggccgctcggggacaacttggcccaacttgtctatcctctctcttggggcagctgtccggacaggtgcggctgctacttggtgccctgcagagcctcctgggcactcagctcccacctcaggggagaactaccgctcataaagaccccaatgcaattttcctgtcattccaacatctgttgcgcggaaaagacttctggattgttggtgacaagctccattgcctgagccaaaactactggctgtgggctagcgaagttgctgcaggcatccaatcgcaagattcttggtcagctgaacccaacctacaggtgcccggtccgaatccccgaatccctgagcaagatacacggacactcgagtggaactcttggacactgagctggacactcactcaggaccctcggagtcccggacacttcttgcggaatattcgccatcgcctgcctgcaactcagccccctgcttggatttttagctttcccaatccttcgtcttattggacagtctacgccctcccatcgtctactcacctggctcacccctgcggtcccgcaccgcctcccgcttcttag

SEQ ID NO: 108723 - DNA, 861 bp, Artificial Sequence
  derived and/or modified sequence
atggagttgaccgaactccttttagttgtcatgctcctgcttaccgcaagattaacactgtcttcacccgcaccgcctgcatgcgatctgcgcgtgctatccaaattactgagggattctcacgtgctgcattcaagactgtcgcagtgccccgaagtccatcccctacctactcctgtgttgctgccagcagtagactttagcctgggggaatggaagacccagatggaagagacaaaagcacaggacattctaggagcggtgacgctgctgctagaaggcgttatggccgcccgtggccagttgggccccacctgcttgtccagcctcctggggcaactctcaggacaggtacgcctcctactgggtgctctgcaatcgctgctcgggacccagcttcctccccagggcagaacaacagcccacaaagaccctaacgctatattcttgtcttttcagcacttactccgcggcaaggacttctggatcgtgggcgataagctgcattgtctaagccagaattactggctgtgggcatctgaagttgccgcaggcattcagtcccaggactcttggagtgctgaacccaatctgcaagtgcccggccccaacccacgaatccccgagcaggatacgcgaactctcgagtggaattcatggaccctttcgtggacactgacacaggatccacggtctcctggacatttcctacgtaacattaggcacagactacctgccacccaaccgcctgcatggatcttctcttttcccaacccgtcaagttactggaccgtgtacgcactgccatcatcaacacacctcgcccacccttgtgggcccgccccaccacctgcctcatag

SEQ ID NO: 108724 - DNA, 861 bp, Artificial Sequence
  derived and/or modified sequence
atggaactgacagagctactcctggtggtcatgctgctcctcacagctcgcttaaccctcagctccccagctccacccgcctgcgaccttagagtcctctccaagctactgcgagactctcacgtgttacactctcgactgtcacagtgcccagaagtgcacccccttcctactcccgtgcttttgcccgcggtggattttagcctcggcgaatggaagacccaaatggaagaaaccaaggcccaggacattctcggagccgtgaccttacttcttgagggtgtgatggcggcgcgtgggcaacttggacctacgtgtctgtccagcctgttagggcaactgagtgggcaggtacggcttctgctgggtgccctccagagcctgctcggaacacagctacccccccagggacgaacaacggcacataaggaccctaacgctatttttctaagtttccagcatttactccgtgggaaagacttttggatcgtgggagataaattgcactgcctgtcacagaactattggttatgggccagcgaggtggcagccggaatacagagccaggatagctggtcggccgaaccaaacttacaggttcctggaccaaatccgagaatcccagaacaagatactagaaccctggagtggaattcatggaccctgagctggacccttacacaagatccacgttctcctgggcacttcctgcgcaacatccgccaccgcctccctgccacccaaccgcctgcatggatctttagtttccctaacccatcctcatattggactgtgtacgctttgccttcctccacccatctggcccacccctgtggacccgctcctccaccagcatcttag

SEQ ID NO: 108725 - DNA, 1132 bp, Artificial Sequence
  derived and/or modified sequence
atggagctgactgaattgctcctcgtggtcatgcttctcctaactgcaaggctaacgctgtccagcccggctcctcctgcttgtgacctccgagtcctcagtaaactgcttcgtgactcccatgtccttcacagcagactgagccagtgcccagaggttcaccctttgcctacacctgtcctgctgcctgctgtggactttagcttgggagaatggaaaacccagatggaggagaccaaggcacaggacattctgggagcagtgacccttctgctggagggagtgatggcagcacggggacaactgggacccacttgcctctcatccctcctggggcagctttctggacaggtccgtctcctccttggggccctgcagagcctccttggaacccagcttcctccacagggcaggaccacagctcacaaggatcccaatgccatcttcctgagcttccaacacctgctccgaggaaaggacttctggattgttggagacaaacttcactgcctcagccagaactactggctctgggcttctgaagtggcagcagggattcagagccaagattcctggtctgctgaaccaaacctccaggtccctggaccaaatccccggatacctgaacaggatacacgaactcttgaatggaactcgtggactctttcctggaccctcacgcaggaccctaggagccccggacatttcctcaggaacatcagacacaggctccctgccacccaacctccagcctggatattctccttccccaacccatcctcctactggacagtatacgctcttccctcttccacccaccttgcccacccctgtggtccagctccaccccctgcttcctgacccttctgctccaacgcccacccctaccagccctcttctaaacacatcctacacccactcccagaatctgtctcaggaagggtaaggttctcagacactgccgacatcagcattgtctcgtgtacagctcccttccctgcagggcgcccctgggagacaactggacaagatttcctactttctcctgaaacccaaagccctggtaaaagggatacacaggactgaaaagggaatcatttttcactgtacattataaaccttcagaagctat

SEQ ID NO: 108726 - RNA, 861 nt, Artificial Sequence
  derived and/or modified sequence
auggaguugaccgaacuccuuuuaguugucaugcuccugcuuaccgcaagauuaacacugucuucacccgcaccgccugcaugcgaucugcgcgugcuauccaaauuacugagggauucucacgugcugcauucaagacugucgcagugccccgaaguccauccccuaccuacuccuguguugcugccagcaguagacuuuagccugggggaauggaagacccagauggaagagacaaaagcacaggacauucuaggagcggugacgcugcugcuagaaggcguuauggccgcccguggccaguugggccccaccugcuuguccagccuccuggggcaacucucaggacagguacgccuccuacugggugcucugcaaucgcugcucgggacccagcuuccuccccagggcagaacaacagcccacaaagacccuaacgcuauauucuugucuuuucagcacuuacuccgcggcaaggacuucuggaucgugggcgauaagcugcauugucuaagccagaauuacuggcugugggcaucugaaguugccgcaggcauucagucccaggacucuuggagugcugaacccaaucugcaagugcccggccccaacccacgaauccccgagcaggauacgcgaacucucgaguggaauucauggacccuuucguggacacugacacaggauccacggucuccuggacauuuccuacguaacauuaggcacagacuaccugccacccaaccgccugcauggaucuucucuuuucccaacccgucaaguuacuggaccguguacgcacugccaucaucaacacaccucgcccacccuugugggcccgccccaccaccugccucauag

SEQ ID NO: 108727 - RNA, 861 nt, Artificial Sequence
  derived and/or modified sequence
auggaacugacagagcuacuccugguggucaugcugcuccucacagcucgcuuaacccucagcuccccagcuccacccgccugcgaccuuagaguccucuccaagcuacugcgagacucucacguguuacacucucgacugucacagugcccagaagugcacccccuuccuacucccgugcuuuugcccgcgguggauuuuagccucggcgaauggaagacccaaauggaagaaaccaaggcccaggacauucucggagccgugaccuuacuucuugagggugugauggcggcgcgugggcaacuuggaccuacgugucuguccagccuguuagggcaacugagugggcagguacggcuucugcugggugcccuccagagccugcucggaacacagcuacccccccagggacgaacaacggcacauaaggacccuaacgcuauuuuucuaaguuuccagcauuuacuccgugggaaagacuuuuggaucgugggagauaaauugcacugccugucacagaacuauugguuaugggccagcgagguggcagccggaauacagagccaggauagcuggucggccgaaccaaacuuacagguuccuggaccaaauccgagaaucccagaacaagauacuagaacccuggaguggaauucauggacccugagcuggacccuuacacaagauccacguucuccugggcacuuccugcgcaacauccgccaccgccucccugccacccaaccgccugcauggaucuuuaguuucccuaacccauccucauauuggacuguguacgcuuugccuuccuccacccaucuggcccaccccuguggacccgcuccuccaccagcaucuuag

SEQ ID NO: 108728 - protein, 353 aa, Artificial Sequence
  derived and/or modified sequence
MELTELLLVVMLLLTARLTLSSPAPPACDLRVLSKLLRDSHVLHSRLSQCPEVHPLPTPVLLPAVDFSLGEWKTQMEETKAQDILGAVTLLLEGVMAARGQLGPTCLSSLLGQLSGQVRLLLGALQSLLGTQLPPQGRTTAHKDPNAIFLSFQHLLRGKVRFLMLVGGSTLCVRRAPPTTAVPSRTSLVLTLNELPNRTSGLLETNFTASARTTGSGLLKWQQGFRAKIPGLLNQTSRSLDQIPGYLNRIHELLNGTRGLFPGPSRRTLGAPDISSGTSDTGSLPPNLQPGYSPSPTHPPTGQYTLFPLPPTLPTPVVQLHPLLPDPSAPTPTPTSPLLNTSYTHSQNLSQEG

SEQ ID NO: 108729 - protein, 314 aa, Artificial Sequence
  derived and/or modified sequence
MELTELLLVVMLLLTARLTLSSPAPPACDLRVLSKLLRDSHVLHSRLSQCPEVHPLPTPVLLPAVDFSLGEWKTQMEETKAQDILGAVTLLLEGVMAARGQLGPTCLSSLLGQLSGQVRLLLGALQSLLGTQLPPQGRTTAHKDPNAIFLSFQHLLRGKTSGLLETNFTASARTTGSGLLKWQQGFRAKIPGLLNQTSRSLDQIPGYLNRIHELLNGTRGLFPGPSRRTLGAPDISSGTSDTGSLPPNLQPGYSPSPTHPPTGQYTLFPLPPTLPTPVVQLHPLLPDPSAPTPTPTSPLLNTSYTHSQNLSQEG

SEQ ID NO: 108730 - DNA, 1062 bp, Artificial Sequence
  derived and/or modified sequence
atggagctgaccgagctgctgctggtggtgatgctgctgctgaccgccagactgaccctgagcagccccgccccccccgcctgcgacctgagagtgctgagcaagctgctgagagacagccacgtgctgcacagcagactgagccagtgccccgaggtgcaccccctgcccacccccgtgctgctgcccgccgtggacttcagcctgggcgagtggaagacccagatggaggagaccaaggcccaggacatcctgggcgccgtgaccctgctgctggagggcgtgatggccgccagaggccagctgggccccacctgcctgagcagcctgctgggccagctgagcggccaggtgagactgctgctgggcgccctgcagagcctgctgggcacccagctgcccccccagggcagaaccaccgcccacaaggaccccaacgccatcttcctgagcttccagcacctgctgagaggcaaggtgagattcctgatgctggtgggcggcagcaccctgtgcgtgagaagagccccccccaccaccgccgtgcccagcagaaccagcctggtgctgaccctgaacgagctgcccaacagaaccagcggcctgctggagaccaacttcaccgccagcgccagaaccaccggcagcggcctgctgaagtggcagcagggcttcagagccaagatccccggcctgctgaaccagaccagcagaagcctggaccagatccccggctacctgaacagaatccacgagctgctgaacggcaccagaggcctgttccccggccccagcagaagaaccctgggcgcccccgacatcagcagcggcaccagcgacaccggcagcctgccccccaacctgcagcccggctacagccccagccccacccacccccccaccggccagtacaccctgttccccctgccccccaccctgcccacccccgtggtgcagctgcaccccctgctgcccgaccccagcgcccccacccccacccccaccagccccctgctgaacaccagctacacccacagccagaacctgagccaggagggctag

SEQ ID NO: 108731 - DNA, 1062 bp, Artificial Sequence
  derived and/or modified sequence
atggagctgaccgagcttctgctagtggtcatgctgctgttgacagcccgactgacgctgagctctccagctccacctgcctgtgacctccgggtactgtctaagctgctccgagattctcacgttttacactctagactgagccagtgcccagaggtacaccccctacctactcccgtcctcctgccagccgtcgacttcagtctaggcgaatggaagactcagatggaagagacaaaagcacaagatattctgggcgccgtgactttgctgctagagggcgtcatggctgctagaggccagttaggacctacatgcctttcaagcctccttggccagctgtcagggcaggtcagattgctcttgggcgcactgcaatcactactcggaacccagctgccgcctcaggggcggaccaccgcccataaagaccccaacgctatattcttgagcttccaacatctcttgcggggaaaggtcaggtttctgatgttggtaggagggtcaaccctctgtgttagacgggcaccacctaccacggccgtcccctccagaacctccctggtcctgaccctaaatgaactccctaataggactagtggattgctggagaccaatttcacggccagtgcgcggacaacggggagcggactgttgaagtggcaacagggatttcgggctaagattcctggactgctgaaccagacctccaggtccctcgaccaaatacctgggtatctgaatcggattcacgaactcctcaatggaacacgcgggctattccctggaccctctcgacgcacattgggagctcccgacatctcttcaggtacctccgacacagggtccctcccacccaaccttcagcctgggtattcaccctccccgactcaccctcccacagggcagtatacactttttcctttgcctcccaccttgccaacccctgtcgtccagctacaccccctcttgcctgatccatctgcgcccacaccaacacccacatctcccctccttaacactagttacacacattcacaaaatcttagccaagaaggatag

SEQ ID NO: 108732 - DNA, 1062 bp, Artificial Sequence
  derived and/or modified sequence
atggagctgacagagctgctgctggtggtgatgctgctgctgacagcccggctgaccctgagcagccctgcccccccagcctgtgacctgcgggtgctgagcaagctgctgcgggacagccacgtgctgcacagccggctgagccagtgcccagaggtgcaccccctgcccacccctgtgctgctgcctgctgtggacttcagcctgggggagtggaagacccagatggaggagaccaaggcccaggacatcctgggcgctgtgaccctgctgctggagggcgtgatggccgcccggggccagctgggccccacctgcctgagcagcctgctgggccagctgagcggccaggtgcggctgctgctgggcgccctgcagagcctgctgggcacccagctgcccccccagggccgcaccacagcccacaaggaccccaatgccatcttcctgtccttccagcacctgctgcggggcaaggtgcgcttcctgatgctggtgggcggcagcaccctgtgtgtgcggcgggccccacccaccacagctgtgcccagcaggaccagcctggtgctgaccctgaatgagctgcccaacagaaccagcggcctgctggagaccaacttcaccgccagcgcccggaccaccggcagcggcctgctgaagtggcagcagggcttccgggccaagatccctggcctgctgaaccagaccagccgcagcctggaccagatccctggctacctgaaccgcatccacgagctgctgaatggcacccggggcctcttccctggccccagcaggaggaccctgggcgccccagacatcagcagcggcaccagtgacaccggcagcctgccccccaacctgcagcccggctacagccccagccccacccaccccccaacaggccagtacaccctcttccccctgccccccaccctgcccacccctgtggtgcagctgcaccccctgctgcctgaccccagcgcccccacccccacccccaccagccccctgctgaacaccagctacacccacagccagaacctgagccaggagggctag

SEQ ID NO: 108733 - DNA, 1062 bp, Artificial Sequence
  derived and/or modified sequence
atggagctgaccgagctgctgctggtggtgatgctgctgctgaccgccaggctgacattatcatcacctgcgccgcctgcctgcgacttgagagtgctgtctaagttgctgcgggactcccacgttctgcacagccgcctctcccaatgtcctgaggttcacccccttccaacccccgtgctactgcctgccgtggactttagtctgggagaatggaagacacagatggaggaaacgaaggcacaggatatcttaggcgccgtgaccctcctgctggagggagtgatggccgcccgaggccaactcggtccaacttgcctgtcctcactgctcggccagctgagcggccaagtccgcttgctccttggggctctccagagtctgctcgggacgcagctccccccccagggtcgaaccactgcccataaggatcctaatgccatttttctgtcatttcagcatcttctgagaggtaaagtcagattcctgatgttggttggtggcagcacactgtgcgtgaggcgggccccgcctaccacggccgttcctagtcggacctccctggtgctcacgttgaatgagctaccaaatcgtacatcagggctccttgaaacaaatttcaccgccagcgctagaactacaggcagcggcctcctcaaatggcagcagggttttagagctaaaatccccggactgttgaatcagacctcccgctccctcgaccagatcccaggttacctgaataggatacatgagctcttgaatggaactagaggtctgtttccagggccaagtagacggacactgggagcccctgacatctcttctggaacttcagatacggggagcctcccgccaaatcttcagcccggctattctccctctcctacgcaccccccaaccggacagtacacattattcccgctgcctccgaccctaccaaccccagtggtccagctccaccccctactcccagatccttcagcccccaccccgacacctacgtcccccctgctgaacacctcatacactcactcacagaatcttagtcaggaagggtag

SEQ ID NO: 108734 - DNA, 1062 bp, Artificial Sequence
  derived and/or modified sequence
atggagttgaccgaactgctgttagtcgtgatgctgctgttgacagctcggctgacattgagctctccagcaccccctgcttgcgaccttcgcgtgctgtctaaactgctacgggatagtcatgttttgcactctcgcctgagccaatgtcctgaggtccatcccctgccaaccccagtcctgctccccgctgtcgatttttccctgggtgagtggaaaacccagatggaggagactaaggcgcaggatatcctcggtgccgtaacccttctacttgaaggggttatggccgcaaggggacagctcggcccaacttgtctgtcttctctgttaggacaattgagtggacaggtgagactgctactgggcgctctgcagtcattgcttgggacccagttgccgccacagggccgaaccaccgcccataaggaccctaacgccatttttctgtcttttcagcacctactcagaggcaaggtcaggtttttgatgctggtcgggggtagcaccctgtgcgtgcgcagagcacctccgactacagcggtgccctcccggacttccctggtgctcacactgaacgaactaccaaatagaacctcgggcctccttgaaacaaacttcacggccagcgcacgaaccactggctccggattattgaagtggcaacagggattcagagcaaaaatacctgggctgctgaaccagacgagtaggtccctggaccagatacctgggtatctgaaccgcatccacgagctattgaatggcacacggggtctctttcccggacctagccgcaggacgttgggagcccctgatatatcctctggcacatcagatacaggctccttgccacctaacctacagccgggttattccccgtcacccactcaccctcctaccggccagtacaccttgttccccttaccacccactctcccaacaccagtggtccaattacaccctctcctcccagacccatcagcccctacccccacaccgacttctcctctgctcaacacctcttacacccattctcaaaacctctctcaggagggctag

SEQ ID NO: 108735 - DNA, 1062 bp, Artificial Sequence
  derived and/or modified sequence
atggagctcactgagttacttcttgtggtgatgctgttgttaacggcgagattgaccctctcatctccagccccacccgcctgcgaccttagggtgctgagtaagcttcttagagactcccatgtactacacagccgtctctcccaatgtcccgaggtgcatcctcttcctacaccggtcctgctgccagctgtcgacttcagtctgggagaatggaagactcagatggaggaaacgaaagcccaggatatactcggggctgtgacccttctgctggagggagtcatggccgctcgaggccagctggggcctacctgtttatccagcctcctcggccaattgtccggacaagtaagattattgcttggagccttacagagtctcctgggtacacagctacctccacaaggccgcactaccgctcataaagaccccaatgctatttttctgtcattccagcatctgttaagaggaaaggtcaggttcttgatgctcgtggggggctccactctgtgcgtaaggcgagccccccctaccacagcagtgccatctcggacctccctggtgcttaccctcaatgaactgcctaacagaacatccggtctcttggagacaaactttactgcctctgctcggacaaccggatcgggactgctgaagtggcagcagggctttcgggccaaaattcccggactactcaatcagacatcaaggagtttggaccaaatcccggggtacctgaatcgtatacatgagcttttaaacggcactcggggtctgttccccggcccctctcgtcgtacactcggcgcccccgacatatcgtctggcacgtctgacacaggttccctgccccctaacttgcagcctggctactctccctccccgactcaccccccaaccggacagtatacccttttccctctgccacccacactgccaactccagtggtacaactacacccattgttgccagatcctagtgcacccacccccacccccacttcccctctgctaaacacgagttatacacactctcagaacctttcccaagaaggttag

SEQ ID NO: 108736 - DNA, 1062 bp, Artificial Sequence
  derived and/or modified sequence
atggaacttaccgaactgctactagtagtaatgttacttctgaccgctaggcttactctgtcatccccagccccccccgcctgtgatctgagggtcctttccaaactcctccgggatagtcacgtgctgcacagtcgactctcccagtgcccagaagtgcatcccctgcctactcccgttctccttcccgccgtggatttctccctgggagaatggaagacccagatggaggagactaaagcccaagacatcctgggtgccgtaactctgctgttagaaggggtgatggccgcgagagggcagctgggtcccacttgtttgagtagtctgttaggtcagctgagcggtcaagtccgtctgctactgggcgctctccagagtcttctaggcacccaactaccacctcaaggacgcacaactgctcacaaagatcctaatgcaatttttctctcatttcaacacctccttcgggggaaggttaggtttcttatgctcgtcggcggcagcaccctgtgcgtgagaagagcgccacctacgaccgctgtcccttcgaggacatcccttgtattaaccctgaacgaattacctaaccggactagcgggctgcttgaaaccaacttcacagcatctgctagaactactgggtccgggctgctgaaatggcaacaaggcttccgcgccaagattcctggcctgttaaatcaaacctcccgctccctcgaccagatccctggctacttgaaccgcattcacgaactgttaaacggcactagaggcctgttccccggaccttcacgcagaaccttaggagcccctgatatctcctcaggcacttccgatactggctcgctcccacctaatttacaaccgggctactccccaagccccacacacccacctaccggccaatacactctttttccactgcctccaacgctccccactcctgtcgtgcagcttcaccccttattacccgacccctctgctcccactcctacccccacaagccccctgctcaatacctcctatacacattctcagaatctcagccaggaaggctag

SEQ ID NO: 108737 - DNA, 1059 bp, Artificial Sequence
  derived and/or modified sequence
atggagctgaccgagctgctgctggtggtgatgctgctgctgaccgcccgcctgaccctgagcagccccgccccccccgcctgcgacctgcgcgtgctgagcaagctgctgcgcgacagccacgtgctgcacagccgcctgagccagtgccccgaggtgcaccccctgcccacccccgtgctgctgcccgccgtggacttcagcctgggcgagtggaagacccagatggaggagaccaaggcccaggacatcctgggcgccgtgaccctgctgctggagggcgtgatggccgcccgcggccagctgggccccacctgcctgagcagcctgctgggccagctgagcggccaggtgcgcctgctgctgggcgccctgcagagcctgctgggcacccagctgcccccccagggccgcaccaccgcccacaaggaccccaacgccatcttcctgagcttccagcacctgctgcgcggcaaggtgcgcttcctgatgctggtgggcggcagcaccctgtgcgtgcgccgcgccccccccaccaccgccgtgcccagccgcaccagcctggtgctgaccctgaacgagctgcccaaccgcaccagcggcctgctggagaccaacttcaccgccagcgcccgcaccaccggcagcggcctgctgaagtggcagcagggcttccgcgccaagatccccggcctgctgaaccagaccagccgcagcctggaccagatccccggctacctgaaccgcatccacgagctgctgaacggcacccgcggcctgttccccggccccagccgccgcaccctgggcgcccccgacatcagcagcggcaccagcgacaccggcagcctgccccccaacctgcagcccggctacagccccagccccacccacccccccaccggccagtacaccctgttccccctgccccccaccctgcccacccccgtggtgcagctgcaccccctgctgcccgaccccagcgcccccacccccacccccaccagccccctgctgaacaccagctacacccacagccagaacctgagccaggagggc

SEQ ID NO: 108738 - DNA, 1205 bp, Artificial Sequence
  derived and/or modified sequence
gggaaataagagagaaaagaagagtaagaagaaatataagagccaccatggagcttacggagctgctccttgtcgtcatgttgctgctgacggcgcgattgacactctcatcccctgcacctcccgcgtgcgacttgcgggtcctgtcgaagttgttgcgagactcgcatgtgctccactcacggttgtcgcagtgtccagaggtgcacccattgcccaccccggtgttgctcccggctgtggatttctcgcttggagagtggaaaacgcaaatggaagaaactaaggcccaagacatcttgggagcggtgacacttctcctcgaaggggtgatggctgcaaggggtcaattgggtcccacatgcctctccagcctcttggggcagctttccggtcaggtgcggcttctgcttggtgcgctgcagagcctgcttggaactcagttgccaccgcaggggcgcactaccgcgcacaaagaccccaacgccatctttctttcctttcagcacttgttgcgcggtaaagtacgatttctcatgctcgtcggtggctcgacactttgtgtcagaagagcacctcccacaaccgcagtgccctcccggacaagccttgtactgacgctcaacgagcttccgaataggacaagcgggctcctcgaaactaactttacggcgtcggccaggacgacgggatcaggccttctcaagtggcagcagggattccgcgccaagatccctggtttgttgaaccagacatcgaggtcattggatcagattcccgggtatcttaataggattcacgagcttctgaatggaacgagagggctgttcccgggaccatccagacggacgctcggagcccccgatatctcgtcggggacgagcgacacagggtcactgcctcccaatctgcagccaggttactcgccttcccccacgcatcccccgacgggacaatacacgctcttcccccttccgcctacactgcctaccccggtagtacagctccatccgttgctgcccgatccatcagcgccgacccccacacccaccagcccgcttctcaacacttcatatacgcatagccagaacctctcgcaagaaggataatgagctgccttctgcggggcttgccttctggccatgcccttcttctctcccttgcacctgtacctcttggtctttgaataaagcctgagtaggaag

SEQ ID NO: 108739 - DNA, 1059 bp, Artificial Sequence
  derived and/or modified sequence
atggagctgaccgagctgcttctggtcgtaatgctgctgttgactgccagactgactctctcctcacccgccccaccagcttgtgatcttcgcgtgctgagcaagctccttagggactctcatgtattgcattctcgattgagccaatgcccggaggtccacccacttcctacgccggtgctgctgccagcagtggacttctccttgggcgagtggaaaacacaaatggaggagacaaaggcgcaggacattctaggagcagtgacactattgttggaaggcgtgatggccgcacgcggccaacttggcccgacctgtctgtccagcctgttgggacaactctctgggcaggtgagactgttactcggggccctgcagtccttactgggcacccagctcccacctcagggcagaaccacggcacacaaagatcccaatgcaatattcctgagctttcagcacctgctgcggggaaaagttcgctttctgatgctggtgggcggctcaacgctgtgcgttcggagagccccgcccactaccgctgtcccgagcaggacgtccctggtgctaaccttaaacgaactgcctaaccgcaccagcgggctgctggagacaaatttcaccgcaagtgccagaaccactggctcaggcctcctgaagtggcaacagggcttccgggccaagatccccggcctgttgaaccagaccagcaggagcctggaccagatacctggttacctgaacaggatacacgagctcctgaatgggacccgcgggttgttcccagggcctagcagacgtacgttgggcgctccagacatctcttcaggcacctccgacaccggatccctgcctccgaatctacaacccggttactcacccagtcccacacacccaccgaccggacaatatacactcttcccactgcccccgacactgcccaccccagttgtgcagttacacccgctcttgcccgatccctctgcccccactcccacccccacgagtccactgctcaatacctcctatactcattcacagaacctctcacaagagggt

SEQ ID NO: 108740 - DNA, 1059 bp, Artificial Sequence
  derived and/or modified sequence
atggagctcaccgaactgctgctcgtagtcatgttactactgactgcacggctcacactctcatctcccgcaccaccggcatgtgacttgagagttttatccaaattgctgcgggatagtcatgtactgcactcgagactgagtcagtgcccagaggtgcatcccttaccgacccctgtgttactgcctgccgttgatttttcattgggcgaatggaagacacagatggaagagaccaaggcccaggatattttgggagccgtgactctgttgctggaaggcgtcatggccgccagagggcagctcggcccaacgtgtctctcctcgctactgggccaactttcgggacaagtgcgattgctgttaggagccttgcagtccttactgggaacccagctgcccccccagggaaggacaactgcccacaaggaccctaatgcgatatttttgtctttccaacatcttctgcggggaaaggtgcggttcctgatgttggtcggtggatccactctgtgtgtcaggcgcgctcctccaaccactgctgtgccctcgcggacctcactggtgttgacccttaatgagttacctaacagaacttccggtctgctggagactaattttaccgccagtgcccggacaacagggagcggtttgctaaagtggcagcagggattcagggccaaaattccaggactcctgaaccagacctctcgctccctcgaccagatcccaggttatctcaaccgcatacacgaactgcttaatggaacgaggggtctctttccaggcccaagtcgacgcactcttggagccccagatatctcttcaggtacatctgatacaggctcactccctccaaacctgcaacctggctattccccctcacctactcacccacccacaggccagtacacactgttccctctgccccccaccctgcccacacccgtggttcaactgcacccccttcttccagacccaagtgcacctacaccaactcccacgtctccccttttgaatacgagttatacacatagtcagaatctctcgcaggaaggt

SEQ ID NO: 108741 - DNA, 1059 bp, Artificial Sequence
  derived and/or modified sequence
atggagctcacagagttgcttctggtggtgatgttgctgctgacagcacgactgacgttgtcctcccccgcgcccccagcctgcgatttacgtgtgctgagcaagctgctccgggacagccacgtactgcacagcagactcagtcaatgtccagaggttcacccactgcctacacccgtcctgctgcccgcggtcgatttcagcctgggagagtggaagacacagatggaggagactaaagctcaggatatcttgggggctgtaaccctacttctggagggcgttatggccgcccggggccagctggggcccacctgtctgtccagtctgctagggcagttaagtggccaggtgaggctccttttgggggcccttcaatccctgctcgggacacagttgcccccccagggaaggactactgcacacaaggatcctaacgctatctttctgagcttccagcacctacttcgtggaaaggttcgcttcctgatgctggtgggcgggtcaactctctgtgtgaggagagcaccgcccaccaccgcggtgccaagtcgcacctcccttgtcttgaccctcaacgagttgcctaatcgaacaagcggactcctggagacaaatttcacagcctctgctcgaacaacgggaagcggcttgttgaagtggcagcaaggctttagggctaagattcctgggttgctgaatcaaacttcacggtccctggatcagatcccgggttacctcaataggatacacgagcttctgaacggaaccagggggttgtttcccgggccatcacggcgcacactgggcgcccctgatatcagttccgggacatcagacacaggaagtttaccgccaaacctgcagccaggatatagcccttcaccaacccatccgcctacagggcagtacactttattcccacttccccccacattgcccaccccggtggtgcagctgcaccctctcctccccgacccatccgccccaacacctacacccacatctccacttttaaacacttcctatacccactctcaaaacctttcccaggaaggc

SEQ ID NO: 108742 - DNA, 1059 bp, Artificial Sequence
  derived and/or modified sequence
atggaattaactgagctgttgcttgtggtgatgttgcttttaactgccaggctaacattgagcagtcctgctcctcctgcttgtgatttgcgggtgctatccaaactgttgagggattctcacgtgcttcatagtcgcctgtcacagtgtcccgaggttcacccacttccgactcctgtacttctccccgccgttgacttcagcttgggcgagtggaaaacccagatggaagagaccaaagcacaagatatactgggggctgtaaccctgctgctcgaaggcgtgatggccgccagggggcagcttggtcctacatgtttgtcttcattgctcggccagctgagtggccaggtacgactgttgctgggagcattgcagtcgctactaggcactcagttgcccccccagggtcgtacaactgcgcataaggaccccaatgcgatcttcctctcgtttcagcatctcctccgagggaaggtccggttccttatgctggtgggcggatctacactgtgcgtacgccgagccccacccacaaccgctgtccccagtaggacaagcctagtactgaccctgaatgaactgccgaatagaaccagcggcctgctggagacgaattttacagctagtgcacggactaccggctccgggctgctcaaatggcagcagggcttccgggctaaaatccccggactgttaaatcagacctccagatctctggatcagattcctggctacctgaatcgaatccatgagcttttaaatggcacccgaggtttgttccccgggccatcccgaaggacgctaggagcacccgatataagtagcggaacctccgacaccggaagtctgccccctaacctgcagcccgggtatagtccctcacccacacatcccccaacaggacagtacacgctctttcccttacccccaacgcttcccacaccagtagtgcagctacatccactgctccctgatccgtctgccccgaccccaactcctacaagcccacttcttaatactagctacactcactctcagaatctgagccaggagggg

SEQ ID NO: 108743 - DNA, 1059 bp, Artificial Sequence
  derived and/or modified sequence
atggagctgactgagctgctcctagttgtgatgctgttgctgactgctcggctgactctcagtagtcctgccccgcccgcatgcgaccttagagttctcagtaagctgctcagagatagccatgtgctccactcaagactgtcacagtgccctgaggtgcaccctctgccaactccagtgctcctgcctgcggtcgacttctcattgggggagtggaagacgcagatggaagaaactaaagcccaagacattctgggggccgtcacattacttctggagggcgtaatggctgcccgagggcagctcggaccgacctgcctgtcttcactgttaggtcagctcagcggccaggtcaggctactactaggagcactgcaaagcctcttgggaactcagctgcctcctcagggaagaactacggcccacaaagatccgaatgctatttttctgagcttccagcacctattgaggggaaaggtcaggttcctgatgctggtgggaggctcgacactgtgcgtcagacgagcccctccgaccaccgcggtgccctcccggacctcactggtgctcaccctgaatgagttaccaaacaggacatcgggtttattggaaaccaattttactgctagcgcccgcacaacaggcagtggcctcctgaaatggcagcagggcttccgggccaaaatccccgggctgctgaatcagactagccgatcattggatcagatccccggatatctaaatcgcatccacgagctcctcaacggcaccaggggtctgtttcccggaccctcgcgacggactctgggggctcccgacatctcaagcggcacgagcgacacaggcagtttgcctccaaacttgcagcccgggtactcaccctcacccactcacccacctaccgggcagtacaccttgtttccgcttcctcctacacttcccacacccgtggttcaattgcacccactgctcccagatcccagtgcgccgactcccaccccgacatcgccacttctgaatacttcctacacgcacagccagaatctctcgcaggagggg

SEQ ID NO: 108744 - DNA, 1059 bp, Artificial Sequence
  derived and/or modified sequence
atggaacttactgagctgttgctggtggtcatgctcctgctgaccgccaggctgactctttcttcaccagccccaccagcctgtgatcttcgcgtgctgtccaagttgcttagggattcccatgtcctccactcacggctgagtcagtgtcctgaggtgcatccactgccaacgccagtgcttcttcctgcagtggatttttcactgggcgaatggaaaacgcagatggaggaaaccaaggctcaggatattcttggtgctgtgacccttctgttggagggcgtgatggcagccaggggccaacttggcccaacttgtctgtcatcgctccttggacagctgtcgggacaagtgcggctgctcctgggcgcacttcagtcactcctcggaacccagttgccgcctcagggtcgaaccacggcccataaggaccctaatgcaatattcctgagctttcaacatctgctgcgaggaaaggtcagatttctgatgctggtgggaggatcaaccctttgcgtgagacgggcacctcccactactgcagtgccctccaggacctcgctggtgctgactcttaacgaactgccaaacagaacttcgggtctgctggaaaccaatttcaccgcctcggctagaaccactggatccggactgttgaagtggcaacaaggctttcgtgccaaaattcctggccttctcaatcaaacttcgcgatcgttggaccagattcccgggtaccttaatcggatccacgaactgctgaatggtactagaggacttttccctggaccgagcagaagaactctcggtgcaccagatatctcctccggtaccagcgacaccggaagccttcctcctaaccttcagcccggatactccccgagccctactcacccgcctaccggacaatacacgctgtttccacttcctccaaccctccccacccctgtggtccaactccatcctctgctgcccgacccctcagcacctacccctaccccaacctcgcctctgctgaacaccagctacactcactcccaaaatctctcacaagaaggt

SEQ ID NO: 108745 - DNA, 1059 bp, Artificial Sequence
  derived and/or modified sequence
atggaacttaccgagttgcttctcgtcgtgatgcttctccttaccgcacgcctgactctttcgtcaccagcccctccagcatgtgatctgagggtgctgagcaagctgcttagagattcacatgtcttgcactcccgactctctcaatgccccgaggtccacccgctccctactcccgtgttgctgcctgctgtcgacttctctctgggagaatggaaaacccagatggaggaaaccaaggcacaggacattctcggagcggtgactctcctcctcgagggtgtgatggcggcccgtggccaacttggacctacttgcctgtcgagcctcctcggtcagctttccggccaggtgagattgctgctcggtgctctgcagtcactgctcggaacccagctgcctccacaaggaagaacgacggcccataaggacccgaacgccatctttctgtcctttcaacatttgctgagggggaaggtccgttttcttatgctggtgggcgggtcaaccttgtgtgtgagacgggcacccccgactactgcagtaccatccagaacttccctggtgctgacgctgaacgaacttccaaatcgaaccagcggcctgctggaaactaatttcaccgcaagcgcacgcactaccggaagcggattgctgaagtggcaacagggattccgggccaaaatcccaggactgcttaaccaaacctcacggtccctcgatcaaattcctggctaccttaatcgaattcacgaactgctgaatggtaccagaggtctgtttcccggtccgagccgcaggaccttgggggctcctgatataagctcgggcacgtcagatactgggagccttcccccaaaccttcaaccgggttattcgccatccccaactcatcctccgaccgggcagtacactctttttccgttgccgcctaccctcccaacgccagtggtacaactgcatccactgctccccgatccctccgcacctacgccaactcctacctcgcctcttctcaacacctcatacacccatagtcagaacctttcccaagaagga

SEQ ID NO: 108746 - DNA, 1059 bp, Artificial Sequence
  derived and/or modified sequence
atggagcttaccgagttgcttttggtagtcatgctcctgctgactgccaggctcaccttgagcagtccagcacctcctgcttgcgatctcagggtgctgtcaaagcttctccgcgactctcatgtcctccattccagactcagccagtgtcccgaagtccatcccctccctacaccggtgctcctgcccgcagttgactttagccttggcgagtggaagactcagatggaggagacgaaggctcaggacatcctgggggcggttaccttgttgttggaaggtgtgatggctgctagggggcagctggggcccacctgccttagctccctccttggtcagcttagcggtcaggttcgattgctgctcggcgctctgcagagtctgctgggcactcagctccctccccagggacgcacaacggcacacaaagatcctaacgcaatttttcttagcttccagcacttgctccggggtaaagtgcgatttctcatgctcgtcgggggcagtacactgtgtgtaagacgcgccccccccaccaccgcagtgccatcaaggacatcactggtgctgacgctgaatgagctgcccaatcgaacaagtggtttgctggagacgaattttaccgccagcgcaagaacaacaggctctgggctgctgaagtggcagcaggggtttagggctaagatccctggccttctgaatcaaacttctaggtccctggaccaaattcctggctatctcaacaggattcacgaactgctgaatggtacacgagggctgttccccggcccgtcccggagaactctgggggccccggacataagcagcggtacgtctgatacaggctccttgcctccaaacctgcagcccggatactcacctagcccaacacaccctccgaccgggcaatacacccttttccccctgccgccgactcttcccaccccagttgtccagcttcaccccttgttgccagacccctccgcccccacgccaactcctacctccccactccttaacacgagctacacccattcacagaacctgagccaggaggga

SEQ ID NO: 108747 - DNA, 1059 bp, Artificial Sequence
  derived and/or modified sequence
atggagctgaccgagttattgctggtggtaatgctgctcttaacagcaagacttactctaagctctccagcccccccagcttgtgaccttcgcgttctgtctaaactgctgagggattcccacgtgctccactctaggctttcccagtgtccagaggtccaccctttgccgactcccgttttactccctgccgtggacttctctctcggcgagtggaaaacacagatggaggaaacaaaagcacaggacattctaggcgctgtcacactgctgctggagggcgtcatggcggcccgagggcagcttgggcctacgtgtctcagcagcttgcttggacaactgtccggtcaggtccggctcctgctgggagctctccaaagtctgctgggaacccagctgccacctcagggcaggaccacagcccacaaggatcctaacgccatcttcctgagcttccaacacctcttaagagggaaggtccgattcctgatgctggtcggtggatccacactgtgtgtgcggcgggcaccccccactacggccgtccctagcaggacctctttagtcttgactctaaacgagctgcccaatcggacttccggattacttgagacaaattttacagcgagcgctcggacaacaggttctggactcttgaagtggcagcagggattcagggcgaaaataccgggcctactgaatcagacgtcccggagccttgatcagattccagggtatcttaatcggatccacgaactcctgaacgggacacgcggattgttccctggtccctctcgccggactctgggtgctccagatatctcttctggcacgtcagacaccgggtcgttgcctcctaatttacagcctggctattcaccatcacctactcaccctcccactggacagtacacccttttccctctgcccccaactctaccaaccccagttgtccagctccatccgttactgccggatccctccgctcccacacccaccccaacatcacctctgttgaacacatcatacacacactcacaaaacctctcccaagaaggc

SEQ ID NO: 108748 - DNA, 1059 bp, Artificial Sequence
  derived and/or modified sequence
atggaactcaccgaacttctgctggtcgtgatgctcctccttactgccagactgactctttcatctcccgctccaccggcgtgtgacctgagggtgctcagcaagctgcttcgcgactcccacgttctgcactcccggctttcgcaatgcccggaagtgcacccgctgcccactccagtcctccttccggccgtcgacttctcactgggagaatggaaaacccagatggaagaaactaaagcgcaggacatcctcggcgctgtgactctcttgctggagggagtgatggcggcgagaggacaactgggcccaacgtgcttgtcgtcactgttgggacaactcagcggccaggtgcggctgctgctcggagcactgcagtcgctcttgggaacccagctgccgcctcagggacgcaccaccgcccataaggatccgaacgcaattttcctgtcattccaacatctgctgcggggaaaggtgcgcttcctcatgctggtgggcggttccactctttgcgttaggagagcgccccccaccacggctgtgccatcacggacctcactggtgctgacgctcaatgagctcccgaaccgcacctccggcttgttggaaaccaactttaccgcatcggctcggaccaccggcagcggtctgctgaagtggcagcaaggtttccgcgcaaaaatcccgggacttttgaaccagacttccagatccttggatcagatccctggctaccttaatcggatacacgagctgctgaatgggacccggggattgttcccgggaccgtcgaggaggactctcggagcgccagatatctcctccggcacgtccgatacgggaagtttgccaccaaacctgcaaccaggatacagcccgtcccctacccacccgcctaccgggcaatacactctgttcccactcccgccgaccttgccgaccccggtcgtccagttgcatccgcttcttcccgaccctagcgccccgacgccgacccctacctccccactgctgaacacctcttacacgcattcccaaaacttgtcgcaggaggga

SEQ ID NO: 108749 - DNA, 1059 bp, Artificial Sequence
  derived and/or modified sequence
atggagctgaccgaactgctgctggtggttatgctcctactaacagctagactgaccctctcctcacctgcccctcccgcctgtgatcttcgcgtgctgagtaagctattgcgagattcgcacgtcctccactcccggctgagtcagtgtcctgaagtacaccccttgccaactcccgtgctgctccccgcggtagattttagtttgggtgaatggaagacccaaatggaggagacaaaagcacaagacatcctgggagccgtgactctgcttctggaaggggtgatggctgctcgaggacagttaggcccgacgtgtttgagctccctgctaggccagctcagtggccaggtacggctgctcttaggcgccctgcaaagcctgctcggaacccagctgcctcctcagggaagaactaccgcccacaaagacccaaatgctatcttcctgagtttccagcatttactgcgagggaaagttcgatttctgatgctcgtcggcggctctaccttatgtgtaaggagagcccctcctacaactgctgtgcctagccgcacatctcttgtgctcactctgaatgagttgccaaaccggacgagcgggctgctcgaaacaaatttcactgccagcgcgcgaactacgggaagcgggctgctgaaatggcagcaaggtttccgagccaagatccctgggctgctcaatcaaacctcacgaagtttggaccaaattcccgggtacctgaatagaattcacgagctgctcaatggcacaagaggcctgttccccggcccgagtagacggactctcggggcgcccgacataagctctggtacctctgatacaggtagcctgccaccaaatctgcagcccggttacagcccaagtccaactcacccacccaccggccagtacactctgttccctcttccacccactcttcccacacctgtggttcagctgcaccccctgctgcccgatccttcggctcccacccctacaccaacaagccccctactgaacaccagttacacccattcgcagaatttgtcccaggaggga

SEQ ID NO: 108750 - DNA, 1059 bp, Artificial Sequence
  derived and/or modified sequence
atggagcttactgaattacttctcgttgtcatgcttctgttgactgccagactcacacttagcagcccagcccctccagcctgcgatctgagagtgcttagcaagctcttgagagacagccacgtactgcacagtaggctgagccagtgtcccgaagtacatcctcttccaaccccagtcctcctgcctgcggtcgacttctcactcggggaatggaagacccagatggaagaaaccaaagcacaggacatactgggagcagttacgctgcttctggaaggggttatggccgcaaggggccagctgggccctacatgcctgagctctctgctggggcaactgagtggtcaggtccggctgcttctgggggccctgcagagtcttttagggactcaattgcccccacagggccgaaccacagcccataaagaccctaacgcgatatttctttcttttcagcacctactgcgtgggaaggttaggttcctgatgcttgttggaggtagtaccctttgcgtgcgcagggcacctcccacaaccgctgtcccatcccggacatcactagtgctcactctgaacgaacttcccaaccgcacatccggccttctggagaccaatttcaccgccagcgcgcgcactaccggcagcggattgctcaagtggcagcagggcttccgggccaagattccaggccttctgaaccagacaagcaggtcactggaccaaatcccgggctatctcaaccggatccacgagctgctcaatggaactagaggcctgttccctggtcccagtagacggaccttaggagctccagatatctcctccggaaccagcgataccggatcccttccgccgaacctgcaaccagggtatagccctagtcccactcaccctcccacaggacagtatacgttgtttccgctccccccaacattgcccactccagtagtgcagctgcacccactcttaccggacccgagtgccccaaccccaacacctactagccctctgttgaacacaagctacacccattcacaaaatttgagccaagaaggc

SEQ ID NO: 108751 - DNA, 1059 bp, Artificial Sequence
  derived and/or modified sequence
atggagctgaccgagctcctgctggtggtgatgctgctgctgaccgccagactgaccctcagctccccagcgcctcctgcttgcgatctcagagtgctgtctaaattgctgcgggattctcacgtgctgcactcccggctgtcgcagtgtcccgaggtgcacccgttgccaactccggtcctgctgcctgcagtcgacttctcccttggggagtggaaaacccaaatggaggaaactaaggctcaggacatcctcggcgcagttaccctgctcctggaaggcgtcatggccgccagaggacagctcggaccgacttgcctgtcatcgctgttgggacagctgtcaggtcaagtgcgcctcctcctgggcgcgctgcagtccttgcttggaacccagctcccaccccagggacgcacgaccgcccataaagatcccaatgcgattttcctttcttttcagcacctgctgcgcggaaaggtgagatttctcatgctcgtgggaggatccactctgtgcgtgcgtcgcgcccctccgactactgcggtgccgtcgaggacgtcgctggtgctcactctcaacgaacttcctaataggactagcggactcctggagactaacttcactgcctccgcgcgcaccaccggtagcggcttgctgaagtggcagcagggattccgggctaagatacctggcctcttgaaccagacttcgagatcattggaccagatcccggggtacctcaatcgcatccatgagctcctcaacggaacgcggggactgtttccggggccatccagaaggactctgggagcaccagatatctcatcaggaacgtcggatactggatccctgccgccgaacctgcagccgggatactccccatcaccaactcacccgccgactggacaatatactctgttcccgctccccccgacccttccgaccccagtggtccagttgcacccgctcctgccggacccttccgctccaacccccaccccgacctcgccccttctgaatacgtcgtacacccacagccaaaacctttcccaggagggc

SEQ ID NO: 108752 - DNA, 1059 bp, Artificial Sequence
  derived and/or modified sequence
atggagctcacagagctgttactggtggtgatgttgttgcttaccgctcgtctcacattatcctcaccggcgcccccagcttgcgacttgcgggttctatctaaactgcttagagatagccatgttttacactcacgactttcacagtgtcctgaagtgcacccactgcctacgcccgtgctgctgccggctgtcgattttagcctcggtgaatggaagacccagatggaggaaactaaagctcaggacatcttgggcgccgtcaccttgttattagaaggtgtcatggccgctcggggccagctggggccaacctgcttaagctctttgttgggacaattgtccggacaagtccggcttctgctgggagctctacagagtctcttggggacacagctacctcctcagggcaggaccactgctcacaaggatcccaatgccatcttccttagttttcaacaccttttacgaggaaaggttcggttcctgatgcttgtgggagggtcaacgctttgcgtgagacgcgccccccccactaccgctgtgccctcacgaacaagtttggttctgacgctaaacgaattgcctaaccggacgtctgggctgctcgagacgaatttcactgcttccgcccgcactacaggcagtggcctgctaaaatggcagcaagggttccgtgctaaaataccaggcctgttgaatcagaccagcagaagtctggaccagatacctgggtacctcaataggatccacgagcttctgaatggcactcgaggactttttcccggtccatctcggcgcacactgggggctccagacataagttcaggcactagcgatacgggcagtctgcctcccaatttgcagccaggttacagtcctagccccacccacccgccaaccgggcagtatactctgttccccctccccccaaccctccctacacctgttgtgcaactgcatcccctattacctgacccctccgcacctacacccacccctaccagtccgttgctgaacacctcatacacccacagccagaacctgagccaagagggt

SEQ ID NO: 108753 - DNA, 1059 bp, Artificial Sequence
  derived and/or modified sequence
atggaacttaccgaactgcttttggttgtcatgttgctgttgaccgcaaggctgactctgtcctctcccgcacctcccgcatgcgacctccgtgtactctctaagctgctgagagacagtcacgtgctccactcaaggctgtctcagtgcccagaggtccatccactgcccactcccgtcctcctcccagcagtggatttcagcctcggagaatggaaaacccagatggaagagactaaggctcaggatattctgggtgcagtaactttgcttcttgaaggagttatggctgccagaggccagctcggaccaacctgccttagcagcctcttgggacagctgtccggtcaggtaagactcctgcttggcgcactccagtcccttttgggcacccaattgccccctcagggacgcactacagcacacaaggatccaaatgccatctttctcagtttccagcatctgcttaggggaaaggtccgcttcttgatgctcgtgggcggatctaccctttgcgtgaggagagcacctcctactactgctgttccatccagaaccagtttggtgctcactttgaacgagctccccaaccgtacttctggtcttctggaaaccaatttcactgcctcagctcgcactactggttccggcctgctgaagtggcagcaaggatttcgcgctaagatccccggactcctcaaccagactagccgtagtcttgaccagatcccaggatatcttaaccgcatccatgagcttttgaacggaacacgcggtttgttcccaggacccagcaggaggaccctgggtgcacctgacattagttcaggcactagtgacaccggtagtctgcctcctaaccttcagccaggttattctccttcacccacccaccccccaactggtcagtatactctcttccctctgcctcctacacttccaacacccgtcgtgcaattgcacccccttcttcctgacccatcagcacctacacctactcccacttcccccttgttgaacacctcctacacccattcccagaacctttctcaagagggc

SEQ ID NO: 108754 - DNA, 1059 bp, Artificial Sequence
  derived and/or modified sequence
atggaactgaccgagctcctgctggtggtcatgctgctactgacggcccgattgacactgtcaagtccagcccctccagcctgcgatctgcgcgttctctctaagctgctcagagattcccacgtgctgcactctagactctcccagtgtcctgaggtccatcccttacccacaccggtgctcttacctgcagtggactttagccttggagagtggaaaacccagatggaggagaccaaggcacaggatatcttgggcgccgtgacattgctattggagggggtaatggctgcccgtggccaactaggacccacttgcctgtctagcctacttgggcaactttccggtcaggttaggctccttcttggggccctacagtctttactgggtacacagcttcctcctcagggacgcaccacggcccataaggacccaaacgcgatcttcctgtcctttcagcatctgcttcggggaaaagtgcgctttttaatgttggtgggcgggtctaccttgtgtgttcgtcgtgcccctccaaccacagctgtgccatctagaacttctctggtgttgaccctcaatgaacttccgaatcgaacgtctgggctcctggagactaacttcactgcaagtgcaaggaccaccggcagtggcctactgaaatggcagcagggcttcagagctaagatccccggtttactgaaccaaacatccaggtccctggaccaaattcctggctacctaaaccgcatccacgagctgctgaacgggaccaggggactgttccctgggccatcgcggcgcaccctcggtgcgcccgatatcagtagtggcacttctgacacaggctccctgccccctaacctgcagcctggctacagtccgtctcccacacaccccccaactggacagtatacactgttcccgctgcctccaaccctgccaacccctgttgtgcagctgcaccctctactccctgacccaagcgccccgactcccacaccaacctcgcccttgctgaatacgtcttacactcattcacagaacttaagccaagagggg

SEQ ID NO: 108755 - DNA, 1059 bp, Artificial Sequence
  derived and/or modified sequence
atggagctaactgaattactgctggtcgtcatgcttctcctgacagcccgcttgacgcttagttcaccagcgccacccgcatgtgacctgcgggtcctgagtaagttgctacgcgacagtcacgtgttgcactcaaggctgagtcagtgccctgaggtgcatcctctgcctacgccagtcctgctgccagccgtagacttcagtctgggggaatggaaaacacagatggaggaaaccaaggcccaggatatcctgggagcagttactctgctcctcgagggagtcatggccgcccgggggcagcttgggccaacttgcctatcgagtctgcttggccaactttcaggtcaagtgcgactgctattgggggctcttcagtcactcctgggaactcagctcccccctcaaggcaggacaaccgcccacaaggaccccaatgcgattttcctgagcttccagcacttgctcaggggtaaggtgcgcttcctcatgctcgttggagggtccactctctgtgtgaggagagcaccaccaactaccgctgtgccttctcgcacttctctggtgctcaccttaaacgagctgcccaacagaactagcggcctgctcgaaaccaatttcacagcctctgcacgcaccactggttctggcctcttaaagtggcagcagggctttagagcaaaaatccctggcctattgaatcagaccagtagatctctggatcagatcccaggttacctcaatagaattcatgaactcctcaatgggacccgtggcctgttccctggacctagtagaaggactctgggtgcacctgatatatctagtggaacaagcgacacagggagcctgcctcctaatctgcagcccgggtattccccatcccctactcaccctcccaccggtcagtacacactgttcccattgcccccgactctcccaaccccggtggtccagctgcatccactactacccgaccccagcgccccgacacccaccccaacaagcccattgttgaacacttcatacacgcactcacaaaatctctcccaggaagga

SEQ ID NO: 108756 - DNA, 1059 bp, Artificial Sequence
  derived and/or modified sequence
atggagcttacggaactgctgctggtcgttatgctgcttctgactgctcggttgactttgtcaagcccggcacccccggcctgcgacctgagggtattaagcaagctcctcagggattctcacgtgctgcatagccggctgtctcaatgccctgaggtgcacccacttcctactccggtattgcttcccgccgtggatttctctcttggagagtggaaaacacaaatggaggaaacaaaagcccaggatatccttggtgctgtgacactccttctggagggcgtgatggcggcccgggggcagctgggccctacttgcctgtccagcctgctgggacagctgagcggccaggtgaggctgctgctgggcgctctccagtccctcttaggcacacagttaccgccacagggaaggaccaccgctcacaaagatccaaacgcaatttttctgtcttttcagcatctgttaagagggaaggtgagatttctgatgctggttggtgggagcacactctgtgtgagaagggcccccccaacaacagccgtgcccagccgcacctccttggtactgacgctcaacgaacttcccaaccgaacctctggactacttgagaccaatttcactgcctccgcaaggacaaccgggagcggtctgctgaagtggcagcagggttttagagcaaaaattcccgggctgctgaaccagacgagtcgttcgctcgaccagattccaggatacctgaaccgaatacatgagcttctgaatggcacacgcgggttgtttcccgggccctccagacgtacgcttggtgcccctgacatcagttccggtaccagcgatacaggtagtctgcccccaaacctacagcccgggtactcaccttctccgacccatccccctacaggccaatataccctgtttcctcttcctcctaccctgccaacacccgttgtgcagctgcacccccttttaccagatcccagcgcaccaaccccgactcccacctcacctctgctcaacacgagctatacacattctcaaaacttatcacaggaaggc

SEQ ID NO: 108757 - DNA, 1059 bp, Artificial Sequence
  derived and/or modified sequence
atggagcttactgaattattactcgtagtgatgcttcttctaactgcacgtcttaccctttcttctcctgctcctccggcttgcgatcttagagttctttctaaacttctccgagattcacacgtgttgcattctcgtcttagccaatgcccagaagtgcatcctcttcccactccagtgctgttgccagccgttgatttctcactaggtgaatggaagacacaaatggaagagactaaggcacaagatatcctaggtgccgttactcttctccttgaaggtgtgatggcagctcgagggcaactcggaccaacttgcttgtctagtctccttgggcaactctctggccaggtccggttactgttgggtgcacttcagtccctccttgggacacagttgcctcctcaaggtaggactacagcccataaagatccaaacgcaatttttcttagcttccaacacctcctgagggggaaggttcgctttcttatgttagttggtgggagtacactctgcgttaggagagcaccacccactactgctgtgccttctcgtacatcattagttctgactctaaatgagttgcctaacaggacttctggattgttggagactaactttacagcttccgcaagaactactggttcgggtttgcttaagtggcaacagggatttagggcaaagattcctggtcttctcaaccagacttccaggtctcttgatcagatccctggatatctaaatcggatccatgaattgctcaacggcactaggggtctgtttcctggaccatctcggaggactttgggtgctcctgatatcagtagtgggacgtcggacactggtagtctccccccaaatctgcagccggggtatagcccaagtccaacccacccgcctacaggtcaatatacattgtttcctcttccgcctacattaccaactccagttgtccagcttcatcctctacttcctgatccatccgctcctacacccacccccaccagcccgctcttaaatacctcttacacccattcacagaatttatcacaggaagga

SEQ ID NO: 108758 - DNA, 1059 bp, Artificial Sequence
  derived and/or modified sequence
atggagctcaccgaactcctgctcgttgtgatgctgcttctgacggcccggctgacccttagctcgcccgcgccaccagcctgcgacttgagggtgttgtcgaagctcttgcgcgattctcatgtgctgcactcgcggctctcgcagtgtccagaagtgcacccgctcccgaccccggtcctccttcctgcggtggacttctccctgggagaatggaaaacccaaatggaggaaaccaaggcccaggacattctgggggctgtgaccctgctgctcgaaggagtgatggcagcacggggacagctcggccccacctgcctgtcatccctgctgggacaactctcagggcaggtgagactgctcctgggtgcactgcagtcactcctcggaacccagctgcctccgcagggtcgcaccactgcccacaaggatccgaacgcgatcttcctgagctttcagcacctgttgcgggggaaggtgcgctttctgatgctggtgggcggatcgaccctttgcgtccggcgcgccccacctaccactgctgtccctagccgcacctcgctcgtcctgaccctgaatgaacttccgaacaggacctcgggcctgctcgagacgaacttcaccgctagcgcacgcactactggatccgggctcttgaagtggcagcaaggtttccgagcgaaaatccctggactgttgaaccaaacgtccagatcgctggaccagatccctggctacctgaacagaatccatgagctgctcaacggcacgagaggcctgttcccgggaccgtcccggcgcactctgggagcccccgacatctcctcaggtacctcagatactggatctctgcccccaaatctccaacccggctacagcccgtccccgactcatccaccaactggacaatacaccctgttccctctgccgccaactctgccaactccggtggtccaactccatccgttgcttccggatccaagcgcccctaccccgactccgacttccccgcttctgaatactagttacactcactcgcagaatctgagccaggaggga

SEQ ID NO: 108759 - DNA, 1059 bp, Artificial Sequence
  derived and/or modified sequence
atggagctgactgagctgctcttggtcgttatgctgctgctcactgcccgtctgacattgtcatcgcctgcacctccagcctgcgacttgcgcgtgctttctaaactgctccgagattcacatgtactccattctcggctttctcagtgtcccgaagttcaccctctgccaactccagtgttgcttcctgcagtggatttctcacttggtgagtggaaaacacagatggaggaaactaaggcgcaggatatcctgggcgctgtaacccttttactggaaggagtgatggcggctcgcggccagctagggcctacttgtctgtcttcactgctgggccagctcagtggccaggttaggctgctgctgggagctctccaaagtctccttggtacccagttacccccacagggcaggaccacagcccataaggacccgaatgctattttcctaagtttccagcatctcctgcggggcaaagtgaggttcctgatgctggtaggaggctctacactgtgtgtacgccgcgccccacctactaccgctgtgccatcacgtacctcgctggttcttactctgaacgaactgcccaatcggaccagcggactgttggagactaattttaccgccagcgcacgaactactggctctggattgttgaagtggcagcagggtttcagggcaaagattcccggcctgctgaaccagacgagtcgtagtcttgatcaaattcctggatatcttaatcgcattcacgagctacttaatgggacccgcggtctgtttccaggcccttcgcggcggacgttaggcgctcccgacattagttccggtacatccgataccgggagcctccctccaaatttgcaacctggctatagtccatcccctacacacccccctacgggccaatatacgctctttcctctccctcccactttgcctacacctgtggtgcagctccatccactgcttcctgatcccagcgcacctacgcctacaccaactagccccttgcttaacaccagctatacgcacagccagaacctttctcaggaggga

SEQ ID NO: 108760 - DNA, 1059 bp, Artificial Sequence
  derived and/or modified sequence
atggagctcactgaactcttgctcgtagtcatgttgcttttgactgcccgcctcaccttgtcctcccccgcacccccagcatgcgatctgcgtgttctctccaagctcctgcgggattcgcacgtgctgcattcaagattgtcgcaatgccctgaagtccatccactgcctactcctgtgttgcttccagcagtggatttttcacttggtgaatggaaaacccagatggaggaaaccaaagcacaagacatacttggagccgtgactctgttgctcgaaggcgtcatggcagcgcgcggacaactcgggccaacctgcctgtcctcactgctcggacagctttccggacaggtgcggctgcttctcggagcccttcaatcacttctggggactcagctgccaccccaagggagaactaccgctcacaaggatccaaacgcgatatttctgtcgttccagcatcttctgcgagggaaagttcgatttctcatgctggtgggtggatcgaccctttgtgtgcgaagagcacctccaaccaccgctgtgcctagccgcaccagcctcgtcctgactcttaacgagcttcctaaccgaacttccggtctgctggaaacgaactttaccgctagcgcacggaccacgggatccgggcttcttaagtggcaacaaggctttcgggccaaaatccccggactgcttaatcaaactagcaggtcgcttgaccagattcctgggtacctgaatcgcatccacgaacttcttaacggaaccagagggcttttccctggtccttcccggaggactctgggagcgccagacatttcgagcggaacctccgatactggtagccttccacctaatctgcagccaggatacagccctagccctacccacccacccaccggtcaatacactctgtttcctctgcctcctactctgccaaccccagtggtgcaattgcatccactgcttccagacccatcagcacctactccgactcctacttcgcctctgctgaacactagctacacccactcccagaatctgtcccaggaggga

SEQ ID NO: 108761 - DNA, 1059 bp, Artificial Sequence
  derived and/or modified sequence
atggaattgacagagctgcttctggtcgtcatgctgcttctgaccgcccgacttaccctcagctcgcccgccccacccgcgtgcgacttgagggttttaagcaaactgctgagggacagccacgtcctgcactcgagactgtcccaatgcccagaagtgcatccgctccccacacctgttctgctgcctgcggtcgacttctctcttggcgagtggaaaacacaaatggaggaaactaaagcacaggacattttgggtgcggtgacattgctcctggagggggtgatggcagctagaggccagcttggccctacctgcctgtcctctctgctgggccagctgtccgggcaagtacgtttactactgggagcgctacagtcactcctggggacccagctccccccccagggaaggactactgcccacaaggaccctaatgctatctttttgagttttcagcacctcttgaggggaaaagtcagattcctgatgttagtcgggggcagcacgctgtgtgtccggagagctccacccactaccgcggtgccttcccggactagcctggtgttgacattgaacgaactgccgaatcggacttctgggctgctagaaacgaatttcactgcaagtgctaggaccacaggatccggcctgctgaagtggcaacaggggttccgagccaaaatacccggcttgctgaaccagactagtaggagcctcgaccagatccccggctatctcaaccgcatccacgagcttctgaatgggacaagggggctgttccctggcccttcacgtaggaccctgggagctcctgacatttcgagtggcacgagcgacacaggtagcctgccccccaatttgcaacctgggtatagcccctcccctacacaccctcccacaggacagtataccctattccccttacctcccaccttacccactccagtggttcagttgcatcctctgctcccggatccaagtgcgcctactcctaccccaacctcccctctcttgaatacgagctacactcactcgcagaacctgtctcaggagggc

SEQ ID NO: 108762 - DNA, 1059 bp, Artificial Sequence
  derived and/or modified sequence
atggaattgaccgaactcctgcttgtggtcatgctgcttctcaccgcacggcttacccttagctctccggcacctccagcctgtgatctgcgagtgctgtcgaagctgctgcgagattcgcatgttctgcactcccgcctctcccagtgtccagaagtccatccactgcctacgccagtgcttctgcctgccgtggatttttcactgggggagtggaaaacccagatggaagaaactaaggcgcaagacattcttggcgcagtgaccctgctgctcgagggcgttatggccgcaagagggcaattgggccccacctgcctgtcatcactgctgggtcaactgtccggtcaagtcagactgctgctcggagcactgcagtcgctccttggtacccagttgcccccacaaggaaggactacggcccataaagacccaaatgctatcttcctttcgtttcagcacttgctgaggggcaaggtccgttttctcatgcttgtgggtggctcgactctttgtgtgagacgggcaccccccaccaccgcagtgccttcgcgtacttctctggtcctcactctgaatgagctcccaaataggacctccggattgctcgaaactaactttactgcatcggcccggaccactgggtcaggacttcttaagtggcagcagggattcagagccaagattccgggacttctgaaccagaccagcagatccctggaccagattcctggatatctgaaccggatacatgaactgctcaacgggacccgagggctcttccctggcccctcaaggcgcacgctgggagcccctgatatctccagcggtacttctgataccggatcccttcccccaaacctccaaccaggatactccccttcccctacgcatccgccaactggccaatacaccttgtttccactgccacctactcttcctacccctgtggtgcaattgcatccactgttgcctgacccctccgctccgacccctactccaactagccctcttctgaatacttcatatacccactcgcaaaatcttagccaagagggc

SEQ ID NO: 108763 - DNA, 1059 bp, Artificial Sequence
  derived and/or modified sequence
atggaacttactgaattattattagttgttatgttattattaacagccagacttactcttagttcaccagcaccaccagcttgtgatcttagggttttaagtaaattacttagagattctcatgtgcttcattcacgtttatcacaatgtccagaagtacatccacttccaactccagtcttattaccagctgtagatttctcccttggagaatggaagacacaaatggaagaaacaaaagcacaagatattttaggagcagttactcttttgttagaaggtgttatggctgctagaggacaattaggaccaacatgtttgtcttctctattaggacagttatctggtcaagttcgacttttattaggagctttacaatcattgttaggaacacaattaccaccacagggacgaactacagctcataaagacccaaatgctatttttttatcatttcaacatcttttaagaggtaaggtcagatttcttatgcttgtaggagggtcaacattatgtgttagaagagcaccacctactaccgcagtaccatcacgaacatcattagttttaacacttaacgaacttccaaacagaacctctggattgttagaaactaatttcactgcatcagcaagaactacaggatctggattacttaaatggcaacaaggatttcgtgcaaaaattccaggattgcttaatcaaaccagtcgttctttagaccaaataccaggttatttaaatagaattcacgaacttttaaacggaactagaggtttatttccaggaccatctagaagaacacttggtgcaccagatattagttcaggaacatcagatacaggtagtttgccaccaaatcttcaaccaggttattctccatcaccaacacacccaccaacaggacaatacacattatttccactaccaccaacacttccaacacctgttgtacaacttcatcctcttttaccagacccttcagcaccaactccaacaccaacatcaccattgttaaatacatcatatacacattctcaaaatttatcacaagaagga

SEQ ID NO: 108764 - DNA, 1059 bp, Artificial Sequence
  derived and/or modified sequence
atggaattaactgaactgctgctagtcgtgatgctgctgctgaccgcaagactgaccctgtcctctccagcccctccagcctgtgatttaagagtgctatccaaactgctgcgggattctcacgtgctgcactcacggctgtctcaatgcccagaagttcacccattaccaaccccagttctgctgccagctgttgatttcagcctgggagagtggaagacccagatggaagaaacaaaggctcaggatattctcggagccgtgactctattactggagggggtgatggctgctcgtggccaactaggaccaacatgtctgagctccctgttgggccagctctccggccaggttcgcttactactgggcgcactgcaaagcttgcttggcacacagctaccccctcagggtaggactaccgctcataaggacccaaatgctatctttctgtccttccagcatttactgagggggaaggttcggtttctgatgctcgttggtggcagcacactgtgcgtcaggagagctccaccaactactgccgtgcctagcagaacttctttggtcttgacattaaatgaattaccaaaccggaccagtggcctgctggagaccaatttcaccgcctctgccaggaccactggatctgggctgttaaagtggcagcagggcttcagggctaagatacccggactattgaaccaaaccagccgctccctggaccagataccagggtatctgaatcggatacacgaactgctgaacggcacacggggcctgttccctggaccaagtcgccgtactctgggggccccagacattagcagtggaaccagtgacaccggttccctacccccaaatctgcagccaggctatagcccaagccccacccaccctccaacaggccaatacacactgtttcccctcccccccacactcccaaccccagtggtgcagctgcaccctctgctgcccgacccttcagcaccaacccctacaccaacatcccctctgttgaacacttcctacacccattctcaaaacctgtcacaggagggc

SEQ ID NO: 108765 - DNA, 1059 bp, Artificial Sequence
  derived and/or modified sequence
atggagctgactgaactccttctcgttgtcatgctactgcttacagcacgacttaccttgtccagtcccgcgccaccagcctgtgatctgagagttctgtccaaactgcttcgagacagccatgtcctccactctcgactgagtcagtgccctgaggttcacccgctcccgacacctgtcctgctcccagctgtggattttagcctaggagagtggaagacccagatggaagagaccaaggctcaggatattctgggcgccgtgacccttctcttagaaggggttatggcagccagaggccagttgggaccaacctgtctctctagcttgttggggcaactgtctggacaggttaggctcctgctaggtgctcttcagtccctcctggggacacagctacccccacaagggagaacaaccgcccataaggatccaaatgccatcttcctcagtttccagcacctgctgagggggaaggtacgctttttgatgctcgtcggtgggtccaccttgtgcgtgcgaagagcgcctcctactactgctgtcccctctcgaacatctctggtgctcaccctcaatgagttacccaatagaacctccggtttgctcgagacaaattttacagcctcagctcggactacaggttccgggctgcttaaatggcagcaggggttcagggcaaaaataccaggtttgctgaatcagactagtcgatccctggaccagatacccgggtatctcaatagaatccacgaattgctgaacggtacccgaggtctctttcccggcccaagtcgacgcacactgggggccccagacatatctagtggcaccagtgacaccggctcccttcctcctaacctccagccgggatattccccctcacccacacaccctccgacaggccaatacaccttatttcctttacctccgactcttcctacgccagtggttcagctgcacccgttactgccagaccccagtgctcccacccccactcccacctccccactcttgaatacatcctacacacactcacagaatctgtcccaggaaggg

SEQ ID NO: 108766 - DNA, 1059 bp, Artificial Sequence
  derived and/or modified sequence
atggaactgacagagttactcctggtggtgatgctgcttttaaccgctcgtctgacgctgagctcaccagccccccccgcctgcgacttgcgtgttctctccaagctgttgagggattctcacgttcttcacagtcgactgtctcaatgtcctgaagttcatcccctgccaacccccgtgctcttgccggcagtggattttagcttaggcgaatggaaaactcagatggaagagaccaaagcacaggatatcttgggcgcagtaacccttctgcttgaaggtgtcatggccgcgaggggccagctggggcccacttgcctttcctccctgttagggcaactgtctggtcaggtcagactgctgttgggggcactccaaagtctcctgggaacgcagttacctcctcaaggccgaactacggcccataaagatcctaacgccatattcctttcattccaacacttgctgaggggaaaggtccggttcctgatgctggtggggggttcgaccctttgtgtcagacgtgctcccccaactactgccgtaccctctaggacatcacttgtgcttacactgaacgaactccccaatagaacgagtggcctgcttgagactaacttcacagcgtcggcccgaaccaccggatccggactcctaaagtggcagcagggtttcagggctaaaattccgggtctcctcaatcagacatcgcgcagcctagaccagataccaggatatctcaaccggatccacgaattgctgaacggcacccgcgggctgttccccggaccttccagaaggacactcggcgcgccggacatatccagtggtacctctgacaccggcagccttcccccaaatctgcaacctggctattccccatctcccacgcatcctcccaccggacagtatacactctttccgctcccacccaccttgccaacgccagtggtccaactgcaccccctactacctgatccttctgctccaacacctacccctaccagccccctactgaatacatcgtacacccattcacaaaatttgagtcaggaaggt

SEQ ID NO: 108767 - DNA, 1059 bp, Artificial Sequence
  derived and/or modified sequence
atggagctgaccgaactgttgctcgtcgttatgctgctcctcacggcgcggctgaccttgtcctcgccggctccgccggcgtgcgatcttcgcgtgctctcgaagctgctccgcgattcccatgtgcttcattccaggctgtcgcaatgccctgaggtgcacccactgccgacgcccgtgctccttcctgcggtcgacttttctttgggggaatggaaaactcaaatggaggagactaaagctcaggatatactcggagccgtgactctgctccttgaaggtgtgatggccgcacgcggccagctcggccccacctgcctttcctcactgctgggacagttgagcgggcaagtccggctgttgcttggagccttgcagtcattgctcggtactcaactgccaccacagggccgcaccacggcacacaaggatcctaacgcaatcttcctgtcgttccagcacctcctgagaggaaaggtccggtttctgatgctggtcgggggatccactctgtgtgtcagacgggctccgccaaccaccgcagtgcctagtcggacgagcctcgtgttgaccctgaacgaactgccgaatagaacctcaggactgttggaaaccaacttcacggccagcgcccgcactaccggatcaggcctcctgaagtggcaacagggtttccgagccaagattcctgggctgttgaatcagacctcacggtcgctcgaccagatccctgggtacctcaacagaatccatgaactgctcaatggcaccagaggactcttccctggaccctcccgtaggaccctgggtgcgccggacatttcgagtggaacctccgacactggtagccttccgccgaacctgcaaccggggtacagcccaagcccgactcatcccccaactggccaatacaccctgttcccacttccgcctactcttcctactccagtggtgcagctccaccccctgctgcctgacccctcggcaccgaccccaactccaaccagtccgctccttaacacctcgtacacccactcgcagaatctgtcacaggaggga

SEQ ID NO: 108768 - DNA, 1059 bp, Artificial Sequence
  derived and/or modified sequence
atggaattgaccgaactcctgctggtggtgatgctgctgctcactgctcggttgaccctgagctcgccagccccgccagcttgcgacttgcgggtcctgtcaaagctgctccgcgactcgcacgttttgcatagtcggttgtcgcaatgcccagaagtgcacccgttgccgactccggttctgctcccggcggttgattttagcctcggcgagtggaaaactcagatggaagagactaaggcccaagacatcctgggagcagtgaccctcctgcttgagggagtgatggcggccagggggcagctgggaccgacgtgcctgagctcccttttgggacaactgtccggacaagtgagacttctcctgggggcacttcagagcctgctcggaacccaactgccacctcagggacggaccaccgcccataaagacccaaacgctattttcctttcattccaacacctccttcggggtaaggtcagattccttatgctggtcggaggctcaactctctgcgtgagacgggcaccacctactactgctgtgccctcgcgaaccagcctggtgttgactctgaatgaactgccgaaccgcacttcgggcctgctggaaaccaatttcaccgcctcggcacgcactactgggtcgggacttctgaagtggcagcagggatttcgcgccaagatccctggtctgctgaaccaaaccagcagaagcctcgaccagatcccgggatacttgaaccggatccacgaactgctgaatggtaccagaggactgtttccaggaccgtcacggcgcactctgggtgcgccagatatctcctccggaacttcagatacgggaagccttccgccgaacctgcagccaggatactcgccttctccaactcatccgccaaccggtcaatatactttgttccccctgccgcccactctgccgaccccggtggtgcagttgcacccccttctgccagatccgtcggcgccaactccaaccccgacctccccgttgttgaacacctcctacactcacagccagaatctgtctcaagaggga

SEQ ID NO: 108769 - DNA, 1059 bp, Artificial Sequence
  derived and/or modified sequence
atggagctgacggagctgctgcttgtggtgatgctccttttgacagccagacttaccctgtcatcacctgccccaccagcctgcgacctgagggtgctgtctaaacttctcagggactctcacgtcctgcacagcaggttgtcacagtgtcccgaagttcaccccctgcccacacccgtgcttcttccagcagtggatttcagtttgggcgagtggaagacccagatggaagagaccaaagcacaggacattctgggtgcagttacactcctgctggaaggtgtcatggcggctcgaggacagctggggcctacctgcttgagttccttgctcggccagctgtcaggccaggtgcgcctgctgctgggggccctgcaaagtctgcttgggacccagttgcctcctcaggggagaaccacagcccacaaggaccctaacgctatttttttgagtttccagcatctgctgcggggtaaggtgcggtttctcatgctggtcggagggtccacgctctgcgtcagaagagcccccccgacaacagccgtcccatccaggacatccttggttcttactctgaatgagctgcctaacaggacttccgggctgttggagacgaatttcacggcatccgccaggacaacagggagtgggttgctgaagtggcagcaggggtttcgggcaaaaatccccgggctgctcaatcagacatcaagaagcctcgatcaaatccccggatatctgaatagaatccatgagttgctcaatggcacgaggggtctgttccccggcccctcccggaggactctgggagcccctgatatttccagcggcacatccgatacagggagcctgccgccgaatctgcagccaggttacagcccgagcccgactcaccctccaaccgggcagtacacactgttccccctgccaccgacgttgcccacacccgtggttcaattgcacccacttttgccagaccctagcgctccaacaccgacacctacttctccgctgctgaataccagctacacccattctcagaacctttcccaagagggc

SEQ ID NO: 108770 - DNA, 1059 bp, Artificial Sequence
  derived and/or modified sequence
atggaactgactgaactgcttcttgtcgtgatgctgcttctgactgcgcgcctgactctgtcatcgccagcaccgccagcttgcgatctgcgggtcctgtccaagctgctgcgcgattcacatgtgctgcactcgcgcctgtcccaatgtcctgaagtgcatccgctgccgaccccggtcttgctgccagcagtcgatttctcactgggagaatggaaaacccagatggaagaaactaaggctcaggacatcctgggggcggtgactctgttgctcgagggcgtcatggctgcgagaggacaactggggccgacgtgcctcagctcactcctcgggcagctctcgggtcaggtgcgcctgctccttggagccctccagtcgctcctgggcacccagctccctccacaaggccgcaccacggctcataaggatccgaacgccatctttctgtccttccaacacttgctgcggggaaaagtgaggttcctgatgctggtgggcggcagcacgctgtgcgtcagacgcgcgccccctacgaccgcggtcccttcaaggactagcttggtgctgactctcaatgaactgccgaaccggacctctggactgttggaaacgaacttcaccgcgagcgcacgcactaccggctcgggcctccttaagtggcagcaaggattccgcgctaagattcctggcctgctgaaccagacctcacgcagcctggaccagatcccggggtacctcaatagaatccacgaactgctcaacgggactcggggactgtttccaggaccgtcccgccggactctcggagcaccagatatctcctcggggacttccgatactggttcgctgccccctaacttgcaaccaggctactcgccgtcgccaactcatccgccaaccggacaatacactttgtttccgcttccaccaaccctgccgacccctgtggtgcaactgcaccctctgttgccggacccgagcgctccgacgccgacccctactagcccgctgctcaatacttcctacactcactcacagaacctgtcgcaggaggga

SEQ ID NO: 108771 - DNA, 1059 bp, Artificial Sequence
  derived and/or modified sequence
atggaactcacagagctgttgttggtcgtgatgctgctactgacagccagactaacattatcctcacccgcccctcccgcctgcgatttgcgagtgctgagtaagctcctgcgggatagccacgtgctccattcccgtcttagccagtgtcctgaggttcaccccctgcctactccagtgctactgccagctgtagactttagccttggagaatggaaaacccagatggaggaaacgaaggcccaagacatcctcggagctgtgacattattgctcgaaggcgtgatggcggcaagggggcagctgggtcctacttgcctgtctagccttctcggccagttatcaggccaggtgcgcctcctgctaggtgctctccaatccctcttgggaacacaattgccacctcagggcagaaccaccgcccacaaggatcccaatgctatcttcctgtcctttcagcacctgctgcgggggaaagtgcgattcctgatgctcgtcggaggatccactctctgtgtaagacgcgccccaccaaccactgctgtgccaagccgcacatccctggtgctgacactgaacgaattgcctaatcgcactagtggcctgctggagaccaacttcacagcatcagccagaacgaccggtagcggcttgctcaagtggcaacagggattccgggctaaaatccctgggcttctgaatcaaactagtagaagtctcgatcagatccctggctatctgaataggatccacgagcttctaaacggaactcgcgggctctttcccgggccttccagaaggacactgggcgctcccgacatatctagcggtacctccgatactggctccctgccgcctaacctgcagcctgggtacagcccttcccctacccatcctcccaccggccagtatacactattccccctcccacccacactcccaacgcctgttgtgcagctgcaccccctcctgccggatccctccgctccaacacctacacctactagtccactcctgaacacatcatacacacactcgcagaacctatcccaggagggc

SEQ ID NO: 108772 - DNA, 1059 bp, Artificial Sequence
  derived and/or modified sequence
atggaattaaccgaactgctgttggtggtgatgctgctgttgacggctcgattgaccttgtcttccccagcgccacctgcctgtgacctccgagtattatccaaacttttgagagatagccatgtactccacagtcggctctcacagtgtccagaggtgcatccgctcccgactcccgtgctacttcctgccgtggatttcagcttgggggagtggaagacgcagatggaggagaccaaggcgcaggacatacttggcgctgtcaccttgttactggaaggcgtgatggctgcgcggggccagctgggcccaacatgcctatccagtctgctgggacagctgtctggccaggttcgccttctgttgggcgcactccaatctctgctcggaacacaattgcccccccagggcaggacaactgctcacaaggatccaaacgctattttcctaagctttcagcacctgctgagaggaaaggttaggttcctgatgctggtgggtggctcgaccctatgtgtgaggagggctccccctaccacagccgtaccctccagaacatctctggtgctgaccctaaacgagttgcccaatcggacctctggactgctcgaaactaattttacagcctccgctcgtaccactggttcgggacttctgaagtggcagcagggctttagagccaagataccaggattactcaatcagacttctcgaagcctggaccagatccctgggtacctgaatagaattcatgagctcctgaacggcactagaggtctgttccctggaccttctcgtcgtactctcggagccccggacatcagctccggtacgtccgataccggaagtctgccacctaatctccagccagggtattcaccgagccccacccatccccccactggtcagtacactctattccctctgccgcctaccctgccaacacctgtagttcagctgcaccctcttctccccgaccccagcgctcctaccccaacgcctacatctcccttgctgaacacctcatacactcactcccagaatttatcccaggagggt

SEQ ID NO: 108773 - DNA, 1059 bp, Artificial Sequence
  derived and/or modified sequence
atggaactgacggagctcctgctggtcgtgatgctgctcctcaccgcaagacttactcttagcagcccagcacctcctgcctgtgatttgagagtgctgtcgaagctgcttagagactctcatgtgcttcattcccggctgtcccaatgcccagaggtgcacccactgcctactccagttctccttcctgccgtggacttttcgctgggcgaatggaaaactcaaatggaggagactaaagcccaggatatactgggagcagttactcttttgctcgaaggggtcatggcagcccgcggtcaattgggacctacctgtctctcctcactccttggacaactttctggtcaagtgcgtttgcttctgggtgcactgcagtcgctgctgggtacgcagctgccgccacagggacgcactacggctcataaggatccaaacgccatcttcctgtcgtttcagcatcttcttcggggtaaggtgcgattccttatgcttgtgggtggttcaaccctgtgcgtgagaagggctcctccgactaccgccgtgcctagccgcactagcctggtgctgaccctgaacgaactgccaaatcggacttcgggacttttggaaaccaactttaccgccagcgccagaaccactggttcgggactgcttaagtggcagcagggttttcgagcaaagattcccggacttcttaaccaaacgtcgcgatcactcgaccagatccccgggtatctcaaccggatccatgaactgctgaatggcaccagggggctgtttcccggaccttcgagacggacgcttggagcacccgatatctctagcggcacttcggatactggaagcctgccacccaacctgcaaccaggctacagcccaagccccactcatccgccaactggacagtacactcttttccctctgcctcccactcttccaaccccagtggtgcaactgcatcctctgttgccagatccttccgcgccaacccctacccccacttccccactgcttaatacttcatatacgcactcacagaacctttcacaggaagga

SEQ ID NO: 108774 - DNA, 1059 bp, Artificial Sequence
  derived and/or modified sequence
atggaactgactgaactgctgctggtcgtcatgttgctgctgaccgctagattgaccttgtcaagtccggctcctcctgcctgtgaccttagggttctgtctaagctgctcagagacagccacgtccttcacagccgcttgagtcagtgtccagaggtccatcctctgcctacccctgttctgctccctgcagtcgactttagcttgggagagtggaagactcagatggaggagaccaaggctcaagacatcctgggcgctgtgacccttctcctcgaaggtgtgatggccgcaagagggcagttgggaccaacctgccttagttccttgctcggtcagctctcaggacaagtgaggctgctcttaggggcattgcagagtctcctcggaacacagcttccccctcagggacgcactacagcacacaaggatccgaacgccatcttcctgtcatttcagcaccttctcagaggtaaggtgaggttcctgatgctcgtcggagggagcaccctgtgcgtccgtcgcgctccacccactacagcagtaccaagtcggacgtctctggtgctgacactcaatgagttgcctaacaggaccagcggcttgttggaaaccaattttaccgcttcagctcgcacaaccggctcaggattgcttaaatggcaacagggtttcagggcaaagatcccaggactgttgaaccagacctcacggtccctcgaccaaatccctgggtacttgaacaggattcacgaactgctgaacggcacccgtggtctgttccctggcccatcccggaggacgctaggagcacccgatatcagcagtggcacttctgatacaggatcgctgccacccaaccttcaacccggttacagcccttctccaacccaccctccaactggacagtacacactgtttccacttccacctacccttccaacaccagtcgtccagctgcaccccttgttgccagatcccagcgctcctacccccacgccgacctctcctttgttgaatacaagctacacccatagccaaaacttatctcaagagggg

SEQ ID NO: 108775 - DNA, 1059 bp, Artificial Sequence
  derived and/or modified sequence
atggaattaacggagttactgcttgttgtgatgcttctcctgaccgcacgactgacgctgtctagtccggcacccccagcttgcgatttgcgtgtcctcagcaagctcctccgtgatagtcatgttcttcactctcgtttatcacagtgcccagaggttcacccactgccgacccccgtgctcctgccagccgtagacttttcattgggtgagtggaaaactcaaatggaagaaaccaaagctcaagatattcttggagcagtaactcttctgttagaaggagtgatggcagcaagaggacaactcggacctacatgtttatcttcactccttggccaattgtcaggtcaagtgaggctccttttaggcgctcttcaaagtcttctgggaacacagcttcccccgcaaggacgtactactgcacacaaggacccaaatgcaatcttcttgagctttcaacatttattgcgaggaaaagttcgatttttgatgctagtcggtggaagtaccctctgtgttcgacgggctccaccaaccacagcggttccgagccgtacttcacttgttctcaccttgaatgaactgccaaataggacctcaggacttttggaaacgaattttacagccagtgcccgaacaactggttcgggcctgttgaaatggcagcaaggattccgcgctaaaatcccagggcttctcaaccaaacgagtcgcagtcttgatcaaatcccaggatatctcaatcgcatccacgaactgcttaatggaacgagaggattatttccaggaccgagtcgaagaactttgggagcaccggatatatcctctgggacttctgacaccggatcccttccgcctaatttacagccaggatatagtccgagtccaacacacccaccaacaggccaatatacccttttccctttaccaccaacattgccaactcctgttgtgcaattgcacccacttcttccagatccttccgctccaactcctacaccaacatcaccactgttgaatacttcttacacacactctcagaatctcagtcaagaagga

SEQ ID NO: 108776 - DNA, 1059 bp, Artificial Sequence
  derived and/or modified sequence
atggagctgaccgagctactattagtggtgatgttgctcctgacggcccgtctgacactcagctcccccgctccccctgcctgtgatctgagagtactcagcaagcttctgcgggactcgcacgtgctgcactcgcggctttcccaatgcccagaggtgcacccgctgcctacaccagtgctgctgcccgccgtcgatttctctttgggcgaatggaaaacgcaaatggaagaaacaaaagcacaagacatcctgggagccgtgaccctgcttctcgagggggtgatggctgcccgcggacagctggggccgacctgcctatcaagcctactgggccagctgtcaggtcaggtccgcctgctgctgggagccttgcagagtctgctcggaacccagctgccaccacaaggacggacgacagcccataaagacccgaacgcaatatttttgagtttccaacacctgctgcgcggcaaagttaggttcctgatgctagtaggcggtagtactctgtgtgtcaggcgcgcccctcctactacagcggtccccagccgaaccagcttggtgctaaccctgaatgagctccctaacaggacttccggactgcttgagactaatttcactgctagtgcacgtacgactggctcaggattgctgaagtggcagcagggatttagggctaaaatcccaggactgttgaaccagacaagtcgctctcttgaccagatccccggctacctgaataggattcatgaattactgaacggtacccggggactgttccccgggccatccagacgcacccttggagcaccagacataagcagcggaactagtgacacaggatctctgcctcctaatctccagcctggctattcccctagtccgacgcacccccctacgggtcagtacactcttttcccactgccgcccactctgccgacaccagttgtccagctacatccattacttcccgacccatcagccccaactccgacccccacctctcctctgctgaacacctcatatactcacagtcagaatctgtctcaggaaggc

SEQ ID NO: 108777 - DNA, 1059 bp, Artificial Sequence
  derived and/or modified sequence
atggagcttaccgagctgttgctggttgtgatgttgctgctcactgcccgactgacactgtcttcgcctgcccctccggcgtgtgacctgcgtgtgctgtcgaagctgttgagagactcccacgtgcttcactcaagacttagccaatgtccggaagtccaccccttgccgacgccggtcttgctccctgcggtagacttctcacttggtgagtggaagacccagatggaggaaacaaaagcacaggatattctgggcgcggtgacgctgctgcttgagggcgtaatggcagctcgcggtcagctgggtccgacatgcctgtctagcctgctgggtcagctgagcggtcaggtgagactgctgctcggcgccctgcagtccttgctgggtacccaactaccgcctcaaggtcgaacgaccgctcacaaagatcctaacgctatcttcctgtccttccagcaccttctgcgcggtaaagttcgatttctgatgttggtcggcggcagcacgctgtgcgttcgccgtgcgccgcctaccactgcagtgcccagtcgcacgagcctagtgttgactctgaatgagctgcctaaccgcacttctggcctgttagaaactaactttaccgcctctgcgcgtacgacgggtagcggtctgctgaagtggcagcaaggctttcgcgctaagatccctggtctgttgaaccagacaagccggtcgctggatcaaattcctggttatttgaatcgaattcacgaattactgaatggtacgcgcggcttattccccggccctagtcgccgcaccctgggagcaccagacatctctagcgggaccagcgataccggcagcctgcccccgaacttgcagccaggatatagcccctctcctacccacccaccgaccggtcagtacaccttgtttccactgcctcccactctgccgaccccagttgtgcagctgcacccgctgctgccagaccctagcgcacctactccaaccccgacctcaccattgctgaataccagttacactcatagccagaatctctctcaggaaggc

SEQ ID NO: 108778 - DNA, 1059 bp, Artificial Sequence
  derived and/or modified sequence
atggagctgactgaactcctgttggtggtgatgctgctccttactgctagactgaccctgtccagcccggcaccgccggcgtgcgacttgcgcgtgctttcgaaactcctcagagacagccatgtgctccacagccgcttgtcgcaatgccctgaagtgcacccgctgccgactccggtgctgctccctgcggttgacttctcactgggagagtggaaaacccagatggaggaaaccaaggctcaggacattctcggtgccgtcactctgctcctggagggagtaatggccgccaggggccaactgggaccgacttgcctttcttccctgctcggacagctgtcgggccaggtgcgcctgctgctgggggccctccagtccctcctgggcacccaactgccaccccaaggtagaaccactgctcataaagatccgaacgcaatcttcctgtcatttcaacatcttcttcggggaaaagtcagattcctcatgctggtgggaggaagtactctctgcgtgagacgcgcccctccaactactgcagtgccctcgagaacttcccttgtgttgacgctcaatgaacttccaaatcgcacgtcaggcctgcttgaaacgaactttacggcgtccgctcggaccactggttccggcttgctgaaatggcagcagggattccgcgccaagatcccgggactcctgaaccagaccagccgatcactcgaccagatccctggatacctgaaccgcatccatgagctgctgaacggcaccagaggacttttcccaggtccgtcgcgccgaaccctgggcgcacccgacatctcctctgggactagcgatactgggtcgctgccgccgaatttgcaaccgggctattccccctccccgactcacccacccaccggacaatacacgctcttccctctcccgcctactcttcccactccggtcgtgcagctgcatccgctgctgcctgacccatcggcaccgacccctactcctaccagcccgttgctgaacactagctacacccattcgcaaaatctgtcgcaggagggc

SEQ ID NO: 108779 - DNA, 1059 bp, Artificial Sequence
  derived and/or modified sequence
atggagctcactgaattgctcctggtggtgatgctgcttctgactgccagactgactctgtctagcccggcgccgccagcatgtgacctgagggtgctgagcaagctgctgcgcgactcacacgtcttgcactcccggttgagccaatgtcctgaagtgcatccgttgccgaccccagtcctgctgccagccgtcgacttctcgctgggtgaatggaaaacgcaaatggaagaaaccaaagctcaggacatcctcggcgctgtcactctgctgttggagggagtgatggccgcgagaggacagctgggcccgacctgcctctcgtcattgctgggccagctgtcgggacaagtgcgcctgttgcttggtgctttgcagtcactgctggggacgcagctgcctccgcaggggagaactaccgcacacaaagatcctaacgccatcttcctctctttccagcatttgctcaggggcaaggtgagattcctcatgctcgtgggcggaagtactctgtgtgtgcggcgggcgcctcctactaccgcagtgccttcaagaacctcactggttctgactctgaacgagttgcctaatcgcacttccggactgctggaaaccaactttaccgcctcggcgcggaccaccggatccggattgctgaagtggcaacaggggttccgcgcgaagattccaggcctgctcaatcaaacttcccgctccctggatcaaattccgggatacctgaatcggatccacgaactgctcaacgggacgaggggactcttcccaggtccttcgcgcagaaccttgggagccccggatatctcgtccgggactagcgataccggatcgttgccgccgaatttgcagcctggctactcgcccagcccgacgcatccacccacgggacagtacacccttttccctctcccgccaacgctgccaacccctgtggtgcagttgcacccactcctcccagatccttcagcgccgaccccgactccaacctcaccgctcctcaacacttcatacacccactcgcagaacctgtcgcaggaggga

SEQ ID NO: 108780 - DNA, 1059 bp, Artificial Sequence
  derived and/or modified sequence
atggaacttacagaattacttctggttgtgatgctgttacttaccgcgagacttaccctttcgagtccggcgccccccgcttgcgacctaagggtgctcagtaagctcttaagggatagccatgtgctacactcaagactgtcccagtgtcctgaggttcaccccttgcccacgcctgtcctgttgcccgccgtagatttttccctaggtgagtggaagacacagatggaagagaccaaggcccaggacattctaggcgccgtcactctgctcctggaaggcgtgatggcagctcgcggacagctggggcccacttgtctgtccagcctccttgggcagctgagtggccaggttagattacttctaggggctctccaaagtctgttggggacccaactgcctccccaaggccggactactgcccataaagaccccaatgccatattcctgagtttccagcacctgcttagggggaaagtgaggtttctcatgctggtcgggggctccaccttatgcgtccgacgagcgccccctaccactgcagtcccatcgcgcaccagtctcgtactgacgctcaatgaacttcctaaccggacatcggggctgcttgaaacgaacttcaccgctagtgcccggactacgggaagcggactgcttaagtggcagcaaggcttcagagcgaagatcccaggtctgttgaaccaaacgagcaggagtttagatcagattcctggctacctcaaccgcatccatgagctgcttaacgggacacgcgggctgttcccagggccatcacggcgcacactgggggcgccagatattagttccggaaccagtgacacgggttctttacctcctaacctgcaacctggttacagtcctagccccacacatccaccaaccggccagtacacgttatttcctctccctcccacacttccaactccagtagtccaactacaccccctattgcccgatccatccgctcccacgcctacccctacgagtcccttactgaacacatcttatacacacagtcagaacctgagccaagaggga

SEQ ID NO: 108781 - DNA, 1059 bp, Artificial Sequence
  derived and/or modified sequence
atggaacttacggagctccttctcgtggtcatgctcctgctgaccgcacgtcttaccttgtcatcaccagcgcccccagcctgtgacctccgagtcttgtcaaaactcctgcgagacagccatgtgctgcattcaagactcagccaatgcccagaagtgcatccgctgcccacccccgtgctgcttcctgccgtggatttctccttgggtgagtggaaaacccagatggaggaaactaaagcacaggacattttgggtgccgtgactcttcttcttgagggcgtgatggcagcacgcggacaactcggtcctacttgtctttcgtcgctgcttggacagctgtcgggacaagtgagactgcttctgggagcactgcagagcctgctcggaacccaacttccgccccaaggtcgtactactgctcacaaggatcctaacgcaatctttctgtcgtttcaacatctgttgagggggaaggttagattccttatgcttgtcggcggatcaactctttgtgttcggagagcacctcctaccactgcggtgccttcacgcacctccttggtgctgaccctgaatgaactgcctaatcgtaccagcggcctgcttgagacgaactttaccgcgagcgcacgcaccaccggttcagggctcctgaagtggcaacaggggttccgggcaaagatccccggactgctgaatcaaacctccaggagcctcgatcagattcctgggtacctgaacaggatccatgaacttttgaacggaacccgtggcctttttcctggcccttccagaaggactttgggcgcaccagatatttcctcgggtacctcggacactggatccttgcctccaaacctgcagccgggctactccccttcacctacccacccacccactgggcagtacaccctgttcccgcttccacctactcttcccaccccagtcgtccagctgcacccccttttgccggatccttctgcaccaactccgacgccaactagccccctgcttaatacttcgtacacccattcacaaaacctctcacaggaagga

SEQ ID NO: 108782 - DNA, 1059 bp, Artificial Sequence
  derived and/or modified sequence
atggagctgactgaactcctgctcgtggttatgcttctccttacggcccgcctcaccttgtcgtctccggctcccccggcctgcgatctcagggtcctgtccaaactgttgcgtgatagccatgtcttgcactctcggctgtcccagtgtccggaagtccacccgttgcctacccctgtgctgctgcctgcagtggacttctccctcggcgagtggaaaacccaaatggaagagactaaggcccaggacatcctcggggctgtcactctcctgctcgaaggtgtcatggccgctcgcggccaactcggaccgacctgcctgtcctcactcttgggtcaactgtctggccaagtgcggctgcttttgggtgcactccagtcccttctcggcactcagctgcccccacaagggcgcaccactgctcacaaggatccaaacgcgatctttctttccttccagcacctgctgcggggcaaggtgcggtttctgatgctggtggggggatccactctctgcgttcgccgggccccgccaaccactgcagtcccgtcgcgcaccagccttgtcctgaccttgaacgagctgcctaataggacctcaggcctcctggaaaccaatttcacggcctccgcgagaactactggctcgggactgttgaagtggcagcagggatttcgcgccaagatcccaggactgcttaaccagacctcaagatcgctggaccaaatcccaggatacctgaacagaatccacgaacttctcaacggaactagaggactgttcccgggaccttcaagacgtactctcggagcgcctgatattagcagcggaaccagcgacacgggatcactgccgccaaatctccagccgggctactcgccctcgccgacgcatccgccgactggtcagtacaccctcttccccctcccaccgactttgccgacgccggtcgtacagctgcatcctcttctcccagacccatctgcacccactcctaccccgacctccccattgctgaacacttcctatacccattcacaaaatctgtctcaggaggga

SEQ ID NO: 108783 - DNA, 1059 bp, Artificial Sequence
  derived and/or modified sequence
atggaactaacggaactattactagttgtaatgctattactaacggcgcgtttaacgttatcgtcgccggcgccgccggcgtgtgatttacgagttctatcgaaattattacgagattcgcatgtattacattcgcgattatcgcaatgtccggaagtacatccgttaccgacgccggtattattaccggcggttgatttttcgctaggtgaatggaaaacgcaaatggaagaaacgaaagcgcaagatatactaggtgcggtaacgttattattagaaggtgttatggcggcgcgaggtcaattaggtccgacgtgtttatcgtcgttattaggtcaactatcgggtcaagttcgactattattaggtgcgctacaatcgttattaggtacgcaattaccgccgcaaggtcgaacgacggcgcataaagatccgaatgcgatatttttatcgtttcaacatttactacgtggtaaagttcgttttctaatgttagtaggtggttcgacgctatgtgtacgtcgagcgccgccgacgacggcggtaccgtcgcgtacgtcgctagtattaacgttaaatgaactaccgaatcgtacgtcgggtttactagaaacgaattttacggcgtcggcgcgtacgacgggttcgggtctattaaaatggcaacaaggttttcgtgcgaaaataccgggtttattaaatcaaacgtcgcgatcgttagatcaaataccgggttatttaaatcgtatacatgaactactaaatggtacgcgtggtttatttccgggtccgtcgcgtcgtacgctaggtgcgccggatatatcgtcgggtacgtcggatacgggttcgctaccgccgaatctacaaccgggttattcgccgtcgccgacgcatccgccgacgggtcaatatacgttatttccgctaccgccgacgttaccgacgccggtagtacaattacatccgttactaccggatccgtcggcgccgacgccgacgccgacgtcgccgttactaaatacgtcgtatacgcattcgcaaaatctatcgcaagaaggt

SEQ ID NO: 108784 - DNA, 1059 bp, Artificial Sequence
  derived and/or modified sequence
atggaattgactgagctactgttagtggtgatgctgttgcttacggcccggctcacgctgtccagtccagctcctcccgcatgcgacttgagggttttatctaagttgcttcgggattctcacgttctccacagtcgcctctcccagtgccccgaggtgcaccccctgccaacaccggtcctacttcccgcagtcgactttagcttgggcgagtggaagacccagatggaggaaacaaaagcgcaggacatcctgggcgcagtgactttgcttctggagggagtcatggccgcaaggggtcagctcggccctacctgcctatcaagcttactgggccagttgagcggacaggtccgcctgctgcttggggccttacagtctctgttgggcacgcagttaccgccacagggcagaactaccgcacacaaggatcccaatgcaattttcctgtctttccagcatttgctccggggaaaggtgagatttctcatgcttgttggaggttctacgctatgtgtgagaagagccccacccacgaccgccgtgccctcccgcacctctctcgtcctgactctcaatgaacttcccaaccgcacttccgggttgttagagaccaatttcaccgctagcgctaggacgacaggtagcggactgcttaaatggcagcagggcttcagggctaaaatcccaggcttgctgaatcagacaagccgaagtctggaccagattcccggctatctcaatcggattcatgagctgctgaatggcacgcgaggattgttccccgggcccagtagaaggacgctgggagctccggacatcagcagtggtacctccgacacaggaagcctgccaccaaatctacagcctggctattctcctagtccaacacacccccccaccggacagtacactctcttcccactgccacccacacttcccacaccagtggttcagctccatcccctgctgcctgacccaagcgccccaacccccacaccgacatcacctttgctaaatacttcgtacacccacagccagaatctctctcaggaggga

SEQ ID NO: 108785 - DNA, 1059 bp, Artificial Sequence
  derived and/or modified sequence
atggagctgacggaactgctcctggtggtgatgcttctactgactgccagactgactctttcttcacccgcgccgccggcttgcgacttgcgtgtgctgtctaaactgttaagggatagtcatgtgctgcacagtaggctcagtcagtgccccgaagtgcacccccttcctactccagtgcttctgcccgctgttgatttttccctaggcgaatggaaaactcagatggaggagacgaaagcacaagacatcctcggcgctgtgacactccttttagagggcgtgatggcggcaagaggacagctgggccctacctgcctaagttccctgctgggacagctgagcggtcaagtccgtctgctgttaggcgcccttcagagcctgcttggcacccagctgccgcctcaaggacgcactacagcccataaggacccgaacgctatatttctgtcttttcagcacctgctgcgggggaaagtgaggtttctgatgcttgtgggcggctctactctgtgtgtgcgtcgggcccctccaacaacggccgtcccaagtcgaacgtccctggtcttgaccttaaatgagctcccgaatcgaacctccggtctgctggaaacaaactttacggcatctgcccgcacaactggctcggggctattaaaatggcagcagggttttcgggctaaaatccctggcttactaaatcagacttctcggtcactggatcagatacctggatatcttaaccgcatccacgaactgctcaatgggacccgagggctgtttccgggaccctctcgacggacactgggcgccccagatatatcctccgggaccagcgacacaggaagcctacccccaaacctgcagcctggatactccccttcacccactcaccctcctactggccaatacaccctattcccgcttcccccaacactgcctacacccgtcgtacagctgcatccactactgccagatccctccgcccctacaccgacgccaacttccccgctgcttaatacgtcctatacacacagtcaaaatctgagtcaggaagga

SEQ ID NO: 108786 - DNA, 1059 bp, Artificial Sequence
  derived and/or modified sequence
atggagctgactgagctcttgctggtcgtgatgctcctcctgaccgctcggttgactctgtcgtccccggcacctccagcctgcgatctgagagtgttgtcgaagctgctgcgtgattcgcacgtgctccactcgcggctctcccagtgcccagaggtccacccccttccgacccctgtcctgctcccagccgtggacttttcgttgggagagtggaaaacccaaatggaagaaactaaggcacaggacatcttgggggcagtgaccctgctcctcgaaggagtgatggctgcccgaggccagctcggaccgacgtgtttgtcatccctcctggggcagctttccggccaagttcgccttctgctgggggcgctgcaatcacttctggggacgcaactgccaccgcagggaagaaccactgcccacaaggacccaaacgcaatcttcctctcattccagcatcttctgagaggaaaggtgcggttcctcatgttggtcggaggcagcaccctctgcgtgcgcagagcgcctccgaccaccgctgttccttcgcggactagcctggtgttgacccttaacgagctgccgaaccgcacttcgggattgctggaaactaacttcactgcgtcggcaaggaccaccggatctggtctgctcaagtggcagcagggctttcgggccaaaatccccggcctccttaatcaaacctcacgcagcttggaccagatcccaggatacctgaaccgcatccatgaattgcttaatggtactcgagggctgttccctggaccttcaagacgcactctcggagccccagacataagcagcggtacttcagacactggaagcctccccccgaatttgcagccgggctactccccttcgccgacccacccccctactgggcagtacactctgttccccctgcctccaaccctgccgactccggttgtgcagctgcatcctctgttgccagatccgtccgctccgaccccgaccccgacgtcacccctgctcaatacttcgtacacgcattcgcagaacctctcccaagaagga

SEQ ID NO: 108787 - DNA, 1059 bp, Artificial Sequence
  derived and/or modified sequence
atggagctgactgaacttctcctggtcgttatgctgcttctgaccgctagactgactctgtcctcgccagccccaccggcatgcgacctgcgtgtcctgtcaaagctgctgcgcgattcgcacgtgttgcatagcagactgtcccaatgcccagaggtgcacccgctccccactccggtgcttttgcccgcagtggacttctccctgggcgagtggaaaactcagatggaggaaaccaaggcccaggatatccttggagccgttaccctgttgctggaaggggtcatggcagctcggggacagctcgggccgacgtgcctctcctccctgctgggacaactgtccggtcaagtgcgcctgctcctcggagctctgcagtccctgctcggaacccagctgccacctcaaggaagaacgaccgcccacaaggatccgaacgcgatctttctctcattccaacacctgttgagaggaaaagtgcgctttctcatgcttgttggggggagcactctctgcgtgcgccgggcaccgccgaccaccgcggtgccatcgcgcaccagcctggtgctgactctgaacgaactgccgaatcggacttcggggctgctggaaaccaactttaccgcgtccgcccggaccactggctcgggactcctgaagtggcaacagggattccgcgcaaagatcccaggactcctcaaccaaaccagcaggtcgctggaccaaatcccgggatatctgaaccggatccatgagctgctgaacggaacccgcgggctgttccccggaccgtcgcggcgcactctgggtgcgccggacatcagctcaggcactagcgacactggctccttgccgcccaacctccaacctggatactctccatctcccactcatccgccaaccgggcagtacacgctgtttcctctgcctccgactctgccaactcctgtcgtccagctgcatccgctgttgcctgacccgtccgcccctaccccaaccccgacgtcacccctgctgaatacgtcgtacacgcactcgcagaatctgtcacaggaaggc

SEQ ID NO: 108788 - DNA, 1059 bp, Artificial Sequence
  derived and/or modified sequence
atggaactcaccgaacttctcctggtcgtgatgctccttctgaccgcccgccttaccctctccagcccagcacctcctgcatgcgatctcagagtcctgagcaagttgctgcgtgatagccatgtgttgcattcacgactgtcccaatgtccagaagtgcatcccctgccgactccagtgctcctgcctgcagtggacttctcactcggtgaatggaaaactcagatggaggagactaaagcccaagacattttgggtgctgtcaccctgttgctcgaaggtgtaatggcagcgcggggccaacttggccccacttgtctttcgtccctgcttgggcaactttctggccaagtgcgacttcttctcggtgcactccaatcccttctcgggacccagctgcctcctcagggacgtaccaccgcgcacaaggatcctaatgctattttcctgtcatttcaacatctgctgcgggggaaagtcagatttctcatgcttgtgggcggcagcacgttgtgtgttcggagagcgcctccaacgacggcggtcccttcacggacttccctcgtgctgactcttaacgaacttccaaatagaacttcgggacttctcgagacgaactttaccgcatccgcaagaactaccggcagtggtctgctgaagtggcagcaggggtttcgggcaaagatccccggactgcttaatcagacttcgcgctcacttgatcagataccaggataccttaaccgtatacacgagcttctgaacggaactaggggtctgtttcccggaccatcccgacgaaccctcggtgcacctgatatttcgagcggcaccagtgataccggatcacttccgccgaaccttcagcctggatatagtccttcgccaacccatccacccactggacaatacactctcttcccccttccccccaccttgccaactcctgtggtgcaacttcaccccttgctgcccgacccgagcgccccaacgcctactcctacttccccactgctgaacacctcatacacccattcgcaaaacttgtctcaggaagga

SEQ ID NO: 108789 - DNA, 1059 bp, Artificial Sequence
  derived and/or modified sequence
atggagttgactgaactgctgctggtggtgatgctgcttctgaccgcgcgtctgaccctctcgtctccagcgcctcctgcttgtgatttgcgcgtcctcagtaagctcttgcgcgattctcatgtcttgcactcgcgtctgtcccagtgcccggaggtccacccactgcctacccccgtgctgttaccggccgttgacttctcgctcggtgagtggaagacccagatggaagagacaaaggcccaggatatcctgggtgccgttacactgttgttggagggtgtgatggctgcccggggccagctggggcctacgtgtctgtcttccctgctgggccagttaagcggacaagtgcgtcttcttctcggcgcgctacagtcgctcctgggtacccagctgcctccccaaggccggaccaccgcccacaaggacccgaatgctatcttcctgtctttccagcatctcctgcgaggcaaggtgcgcttcctcatgttggtcggcggctccaccctctgcgtccgccgggccccccccacaaccgcagtaccgagccgcacttccctggtcttgacccttaatgagctgcctaaccgtacttccggattgctcgagacaaatttcaccgcttccgcccgtaccacgggcagcggattgctcaagtggcagcagggcttccgtgccaagatccccggactgttgaaccaaacgtccagatcattggatcagatcccaggttacctcaaccgaatccacgagttacttaacggtacccgcggccttttccctggtccaagtcgtaggacgctcggcgctcctgacatctcctcgggtacttccgataccggatctctgccccccaacctacagccgggctactccccctctcccacgcatccgcctacgggccagtatactctgttcccactgcctcctaccctcccaacgccggtcgtacagctgcaccccctgctccccgatcccagcgctcccacccccacaccgacgagcccgctcctgaacacgagctacacccacagccaaaacctgagccaggagggc

SEQ ID NO: 108790 - DNA, 1059 bp, Artificial Sequence
  derived and/or modified sequence
atggagctgactgagctcctgttggtggtcatgctgctcttgactgcccggctgacgctctcgagccctgccccgccagcgtgcgacctcagggtgttgtccaaactcctccgcgattcccatgtcctgcactcgagactctcccaatgcccggaagtccacccactgccgactccggtgctgctccctgctgtagacttctcgcttggcgaatggaaaactcagatggaggaaactaaagcacaagatatcctgggcgccgtgactctcctgctcgaaggcgttatggctgcgcgggggcaactgggaccgacttgtttgtccagcctcttgggacagctgtctggacaggtgcgcctcctcctcggcgccctgcaatcgttgctgggaacccagcttcctccacagggaagaaccactgctcacaaggaccccaacgccatcttcctgtcgtttcaacacctgctgcggggtaaggtgagattcctgatgctcgtcggcggttctaccctctgcgtgcgccgcgcgccgccgacgactgcggtgccgtcgagaacctcactcgtcctcactctgaatgaactccctaaccggacttcaggactcctggaaaccaacttcaccgcctccgcccgcactactggcagcggactgctgaagtggcagcaaggcttcagagccaagatcccaggacttctcaatcagacttctaggtccctggaccagatccccgggtacctgaaccgcattcatgagctgctgaatggaactcgcggcctcttccctgggccatcaaggcggacgctgggcgctcctgatatttccagcggaacctcggacactggaagcctgccgcctaacctgcagccagggtactccccttcgccgactcacccgccgaccgggcaatacaccctcttcccgctccctccaactctcccaacccctgtggtccagttgcatccgctcctgccggatccgagcgcccctacgccgacccctacgagccctcttctgaacacgagctacacccactcacagaacctgtcccaggaagga

SEQ ID NO: 108791 - DNA, 1059 bp, Artificial Sequence
  derived and/or modified sequence
atggaacttaccgagctgctgctggtggtgatgctgctcctgacggcgcgccttaccctctcgagccccgcgccacccgcgtgtgatctgcgagttctttcaaaacttcttcgggattcacatgtgcttcactcgaggctctcacaatgcccagaagttcatccacttccaacccctgtactgctgcccgcagtcgatttttcgttgggtgaatggaaaacgcaaatggaagagactaaggcacaagacatcctgggcgcagtgactctgctcctcgaaggtgtgatggcagcaaggggacaattgggacctacttgtctgtcctcgctgttgggtcagctgtcgggacaggtgagacttctgcttggggcccttcagtcactgctcgggacccaactgcctccccagggtaggactacggctcataaggaccctaatgctatattcttgtcctttcaacatcttcttaggggcaaggtccggtttctcatgctcgtgggcgggtcgaccctttgtgtgcgtcgcgctcctcctactacggcagtgccatcgagaacttcgcttgtgctcacccttaacgaattgccgaaccgcacttcggggcttctcgagactaatttcaccgcatccgcaaggactaccggctcgggccttcttaagtggcagcaaggattcagagcaaaaatccctggacttttgaaccaaacttcccggtcactggatcagatccctggttacctcaaccgcatccacgaacttcttaatggtaccagaggacttttccctggaccctccagacgaaccctgggtgctccagatatatcatccgggacctccgacaccggtagcctgccacccaatctccaaccagggtacagcccatcgccgacgcaccctccaacgggacagtacactctctttccactgccacccactcttccgactcccgtggtccaactccatcctctgctgcctgatccttccgcgccaaccccaacgccaacgtccccgctcctgaacacctcatacacgcacagccaaaacctgtcacaggagggt

SEQ ID NO: 108792 - DNA, 1059 bp, Artificial Sequence
  derived and/or modified sequence
atggaactaacagaactgctcctagtagtaatgctgctccttacagcacgattgactttgtcatcccctgctccaccagcatgcgacctgagggtgttgtcaaaacttctgcgcgattcccacgttttacatagtaggctgagtcagtgtcccgaagtacaccctctacccactcctgtcttgctccctgcagtggatttctcactaggggagtggaaaacacagatggaggagacaaaagctcaggatatcctgggggctgtgactcttcttctggaaggggtgatggctgctagaggacagcttgggccaacttgccttagttcactgttaggacaacttagtggacaggttaggttactcctgggagcactccagtcactccttgggactcagctcccaccccaggggcgaactactgctcataaagatccaaatgctatcttcctcagtttccagcacctgctacgggggaaagtgaggtttctaatgcttgtgggagggtctactttatgcgtgcggagagctccccctactacagcagtgccgtcaagaacatcgcttgtgctcactctgaatgagctacccaacaggacttcagggctcttagaaacaaacttcacagcatctgcaagaactactgggagtgggctactaaaatggcagcaggggttcagagctaaaatacccgggctactgaaccagacttccaggtccctggatcaaataccagggtatctgaatcgtatccatgaactgctaaatgggacacgggggctgttccccggaccttctagacggactctcggggctccggatatttcttctgggacatccgatactggaagtctgccaccaaacctgcagcctgggtactctccctcccctacacatcccccaactgggcaatatactctttttcctctaccaccaactctacctacacctgtagtccagctgcatccacttctccctgacccttcagcccctactccaactcctacttcccccctcctcaacactagttacacacactcacaaaatctttctcaggaagga

SEQ ID NO: 108793 - DNA, 1059 bp, Artificial Sequence
  derived and/or modified sequence
atggagctgaccgaacttctgctggtcgtgatgctgctactgacagcacgtttgacgctgagctcccctgcccctccagcctgtgacctccgggtgctttccaaactcctgcgcgactcccatgtcttacacagtcgcctttcccaatgccctgaggttcaccccctgccgactcctgtgctgctccccgcggtggacttctcactcggggagtggaagacccagatggaggaaaccaaggcacaggatatcctgggagccgtaacactattgttggagggcgtaatggctgctagaggacagctaggaccaacctgtctcagctctctcctgggtcagttgagcgggcaggtgcggctgttactgggcgccctgcagtcactactgggcacacagttacccccccagggccgcactactgcccataaagatcccaacgccatctttttaagcttccagcacttgctcagggggaaagtgcgattcttgatgctggtcgggggttccacactttgcgtgaggagagccccccccaccacggcagttcccagtcggactagcctggtgttgacattgaatgaactgcctaaccgcacttcgggcctgctggagacgaatttcacggcttcagctagaaccaccggctcggggctgctcaaatggcagcaaggctttagggccaagattcctggcctactcaaccagacgagcagatcgctggaccagatcccggggtatctgaatcgtattcacgaacttctcaacggaactaggggtcttttcccaggcccttctcgaagaaccctcggcgctcccgatatcagttccggcacgagcgatacgggttcacttcctccgaatctgcagccaggctactctcccagtcctacgcaccccccgaccggacagtataccctttttcctctgccgcccactctgccaacccctgttgttcagttgcacccactccttcctgatcccagcgcacccacacctacccccacttctccactgctgaacacaagctacacgcactcccaaaatctatctcaggaggga

SEQ ID NO: 108794 - DNA, 1059 bp, Artificial Sequence
  derived and/or modified sequence
atggagctcactgagcttctgctggtggtgatgctgctcctgaccgcacggctgactctctcttcgccggcaccaccagcgtgcgacctccgggtcctctccaagctgcttcgggactcccacgtcctccactcccgcctgtcacagtgtcctgaagtgcatcctctcccgacgcctgtcctgctgccagccgtcgacttctccctcggagagtggaaaacgcagatggaagagactaaggctcaagacattctgggagcggttactctgctgcttgaaggagtcatggccgcgcgcggacagctcggaccaacctgcctctcgtccttgctggggcagctgtcgggacaagttcgccttctgctgggggctctgcaatcgctgctcggcacccagttgcccccgcaggggagaaccaccgcgcacaaggatccaaacgcgatattcctctcattccagcacctgctgcgcggaaaggtgcgcttcctcatgctggtgggaggctcgactctgtgcgtgcggcgcgcgcctccaactaccgcagtgccgagccgtacctcactcgttctgactcttaacgagctgcctaatcgcacgtccgggctgctcgagactaactttaccgcctcggcaagaaccaccggctccggattgctgaagtggcagcagggatttcgggccaagatcccaggcctcttgaatcagacttcgcggtcgctcgatcaaatccccggatacctgaaccggatccatgagctgttgaacggtactcggggactcttccccggaccgtcccgccgcactctgggagcgccggacatcagcagcggtaccagcgatacgggatcgctgccgccaaatctccagccgggctacagcccgtcaccgactcatccgcccaccgggcagtacaccctgtttcctctcccgcccactctgcccactcctgtcgtgcagctgcatccactgttgccggacccgtcagcgccgaccccaacgccaacgtcaccgctccttaatacttcatacacccactcgcagaatctctcccaagagggg

SEQ ID NO: 108795 - DNA, 1059 bp, Artificial Sequence
  derived and/or modified sequence
atggagttgaccgaactgctgttggtagttatgctcttgctaactgccaggttgacactgagctcccccgctccccccgcgtgtgacctgcgagtactctccaaattattgcgtgactcccacgtccttcacagccggttgtcccagtgccctgaggttcatcccctaccgacgccagtgttgctacctgccgtagacttctcccttggggaatggaagacacaaatggaggaaaccaaggcgcaggatatcctaggggcggtcactctcctccttgagggcgttatggcagcgcggggacagctgggccccacctgcctctcctccctccttggacaactatccggacaagtccgtttactgctaggcgcgttacaatcattgcttggtactcagctcccaccccaagggagaacgacagcgcataaagacccaaacgcaatattcctctcctttcagcacctgttgcgagggaaagtccgttttcttatgttggttggggggtcaacgctgtgtgtcaggagagcgccgcccacaaccgcagtaccgagtcgaacatcactggttctcacgctaaatgagctccctaatagaacctctggtctgcttgagaccaacttcactgcttcggcgaggaccactggctctggcctgcttaagtggcagcagggtttcagagcaaaaatacccgggttgctgaaccagacttctcgcagtctggatcagatccctggttacttgaatcgcattcacgagttgctaaatggcacccgcgggttatttcctggtccttcgcgaagaacactaggggcacccgatataagttcgggcacaagtgacacgggatcactccctccaaatctccaaccaggctactcgccgtcgccaacgcacccgccgacagggcagtacactttgttccccctaccaccaacgctccccacccctgtggttcaactgcaccccttgcttccggacccttccgcacccactcccacgcccacctccccgcttttgaatactagctatacgcatagccaaaatctttctcaagagggt

SEQ ID NO: 108796 - DNA, 1059 bp, Artificial Sequence
  derived and/or modified sequence
atggaactgaccgagctgcttctggtggtcatgctgcttctgaccgccaggttgaccctttcgtcgccagcgccgccagcgtgcgacctgcgggtgctgtcgaagctgctgcgggatagccacgtgctgcactctcgcctgtctcaatgtccggaggtgcatccgctgcctacccctgtgctcctcccagcagtcgacttctctctcggagaatggaaaacgcaaatggaagaaactaaggcgcaggacatccttggcgcggttaccctcctcctggagggcgtgatggcagccagagggcagctcggacccacttgcttgtcaagcctcctggggcaactgtcgggacaggtgcgcctgctgctgggtgcgctgcaatcgctcctgggcacccagctgcctccgcagggacgcaccaccgcccataaggacccgaacgccatcttcctgtcattccaacacctgctgcgggggaaggtcaggttcctcatgctggtgggtggctcaaccctctgcgtgagacgggcgccaccaactactgccgtgccgtcgagaacttccctggtcctcaccctgaacgaactgccaaatcggacctccggacttcttgagactaacttcactgcttccgcacgcactaccgggtcgggactgctgaagtggcaacagggcttccgggcgaagatcccgggactgctcaaccagacttcccgctcgctggaccagatccccggatacctgaatcgcattcatgaactgctgaatggaactagaggactgtttccgggaccttccagacgcacgctcggagccccggacatctcatccggaacgtcagacacgggctcccttccgccgaatttgcagccgggatacagcccgtcaccgacccaccctccgacgggacaatataccctgtttccgctccctcctacgctccccaccccagttgtgcagctgcatccgttgcttccagatccttctgcaccgaccccgactccgaccagccccctgctgaatacctcgtacacccactcacagaatttgtcacaggaagga

SEQ ID NO: 108797 - DNA, 1059 bp, Artificial Sequence
  derived and/or modified sequence
atggaacttaccgaacttctcttggtcgtgatgttgctgctcacggcacggcttactctttccagtcctgctccacctgcctgtgatctgagggtcttgtctaaactgctgcgggactcacatgttcttcatagccgtctttcccaatgccctgaagtgcatcctttgcctactcctgtccttcttccggcagtagattttagtctcggtgaatggaaaacccagatggaggagacgaaggcccaggacatccttggggcagtcaccctcctgcttgaaggcgtgatggcagctcgaggacagcttggtccaacgtgcctttcatcccttcttggacagctgtcgggacaggtaagacttctgctgggtgcgcttcaaagccttttggggacccaactgccccctcaaggtcgcaccactgcacataaggatcccaacgcgatttttctgtcctttcagcaccttctgagaggaaaggtgcggtttcttatgctggtggggggttcgaccctgtgtgtgcgcagagcaccgcctactactgccgtgcctagccggacttccctggtgctgactctcaacgagctcccaaaccgaacctcaggacttctggagactaacttcacggcatccgccagaaccaccggaagcggacttctgaagtggcagcaggggtttcgcgcaaagatcccgggattgctgaatcaaaccagccgttcgctcgatcaaattccaggatacctgaacaggatacacgaattgctgaacggaactaggggtctgttcccggggccgtcgaggagaactctgggcgccccggatatttcgtcaggcacctccgacactggaagccttccacctaatctccaacctggctattcaccctcaccaacgcatccccccaccggacaatacacgctgttcccacttccacctaccctgcccacgccagtggtgcaacttcaccctcttctgcctgatccatcggcaccgacccccacccctacttcgccacttctgaatacttcgtacacccattcgcaaaatctgtcccaagaaggc

SEQ ID NO: 108798 - DNA, 1059 bp, Artificial Sequence
  derived and/or modified sequence
atggaactcacagagctgctgctcgtcgtgatgctgttgctgactgctcgattgaccttgagtagccctgccccccctgcatgtgacctaagagtgctgtccaaactcctgcgcgactctcatgttctccatagcagattgtcccaatgtccagaagtgcatcctttgcccacgcctgttttgctgcctgctgtggacttttcccttggtgagtggaaaactcagatggaggagaccaaagcacaagatattctgggagccgtcacgctcttgctggaaggagtgatggccgccagaggccagctaggtcccacctgtttgagctcgttgctgggccaattgagtggccaagtgcggctcctgctcggtgctcttcaaagccttttaggcacacagctacctccgcaggggcgtactaccgctcacaaagaccccaatgccatctttctatcttttcaacatttactgcggggtaaggtgcggtttctgatgctggtgggtgggtccaccttgtgcgtgcgtagagcgccccccaccacagcggttccatcgaggacatccctggttcttacactgaacgaacttccaaataggacatcaggactgctggaaactaacttcacggccagtgcgaggactacaggctccggcctactgaagtggcagcaggggtttagggctaagatccctgggttactcaatcaaacgtcccggagtctggaccagatccccgggtacctgaatagaattcatgagctcctcaatggcactagggggctgtttccgggcccaagccggcgcacactcggtgcacccgacatcagcagcggtacatccgatacagggagcctgcccccgaatctgcagcctggctattcaccttccccaacccaccccccgaccggacagtacactctttttccccttcccccgacgctgccaaccccagtcgtgcagctgcacccattactgcctgatcctagcgcgcccaccccaaccccaaccagtcccctgttaaacactagctacactcatagccagaatctttctcaggaagga

SEQ ID NO: 108799 - DNA, 1059 bp, Artificial Sequence
  derived and/or modified sequence
atggaattgacggaactgctccttgtggtgatgctgctgctcaccgcgagactgacactcagcagtcctgctcctccagcatgtgatttgagggttctatccaagctgttaagggacagtcacgtgctgcattccagacttagccaatgcccagaggtgcaccccctgccaacccccgtgcttctcccggcggtcgacttttccttgggcgaatggaagacccaaatggaggaaaccaaagcacaggacattcttggagcagtcaccctgttgctagagggcgtaatggccgcccgggggcagctcggccccacttgtctgtcttccttgctgggccaactcagtgggcaggtgagactgctgctcggtgctttgcaatctctgttgggtacacagctccctccacagggccggacaaccgcgcataaggaccctaacgctatcttccttagcttccaacatcttctgagaggcaaagtgcgcttcttgatgctggtgggaggctccacactatgtgtgagaagagcgccccccaccaccgcagtgcctagtagaacctcgttagtattgacactgaacgagctgccaaatcggacctccggtctcttagagacgaactttacggcttcggcgagaacaaccggatcgggcttgcttaagtggcaacagggcttccgggccaaaatccccggattactgaaccaaacgagccggtccttggatcagattcccggttatctgaacagaatacatgaactgttaaatggcacacgcggcctgttccccggaccaagtaggcgcacattgggagcacctgatattagctcggggacgtccgacacagggagcctccctcccaatttgcagccaggttattctccaagccccacgcacccccctacaggtcagtatacactattccccctgccaccaaccctgccaaccccagttgtccaattacatccactgcttccagacccatctgctcccacgcctaccccaacgagtcccttactcaacacaagttatacacacagccagaacttgtcccaagaaggg

SEQ ID NO: 108800 - DNA, 1059 bp, Artificial Sequence
  derived and/or modified sequence
atggagctgactgagctcctcctggtcgtgatgctcttgctgacggcaagactgactctgtcatcaccggcaccaccagcttgcgacttgagagtcctgtcaaaactgctccgggattcgcacgtgctgcactccaggctgtcgcagtgcccagaggtgcacccactgcctaccccagtcctcctgcccgctgtggacttctcactcggcgaatggaaaactcagatggaggaaaccaaggctcaggacatcctcggcgctgtcaccctgctcctggagggagtgatggcggcacgcggacagctgggaccgacctgcctctcgtctctgttgggccagttgtcaggacaagtgcggcttctcctgggcgctctccaatccctcctggggactcagctgcctccgcagggcagaactaccgcccacaaggatccgaacgcaatcttcctgagctttcaacatctgctccgcggaaaggtgcggttcctgatgctcgtaggggggtcaaccctttgcgtgcggagggccccaccgaccaccgctgtgccgtcccgcacttccctcgtgcttaccctcaacgaactgccgaatcgaactagcggactgctcgaaaccaacttcaccgcctccgccaggacgaccgggtccgggctgctgaagtggcagcaaggttttcgggcgaagatcccgggactgctgaaccaaacctcgcggagcctggaccagatccccggctacctgaaccggattcatgaactgcttaatggaacccgcggactgtttccgggaccgtcgcgaagaacccttggagcgcctgacatatccagcggtacctcggacacgggatcccttccacccaatctgcaacccggatactcacctagcccgacccacccgccgactggccaatacaccctctttccgctgccgcctactctgcctactccggtcgtgcagctccatccgctgctgccagatccgtccgcccctaccccgacgccgactagcccattgcttaatactagctacacccacagccagaacctctcccaggagggg

SEQ ID NO: 108801 - DNA, 1059 bp, Artificial Sequence
  derived and/or modified sequence
atggagctcaccgaacttcttctggtcgtgatgcttcttctgaccgctaggcttactctgtcgtcacctgcacctcctgcatgtgatctgagggtcctttcaaaacttttgcgggattcccatgtgctgcactccagactgtcgcaatgtccagaagtgcacccgctgcccaccccagtgctgctcccagcggtcgacttctcgctcggtgagtggaaaacccaaatggaggaaaccaaggcccaggacatcctgggcgccgtcaccttgctgctggagggggtgatggccgcaaggggacaattgggtcctacttgtttgtcctctctgcttggtcaactctcgggacaggtccgcttgcttcttggcgccctccaatcgcttctcggaactcagctgcctcctcagggaagaaccactgcacataaggacccgaacgcaattttcctgtcctttcaacatcttctccgtggaaaggttcgctttctgatgcttgtgggtggctcgaccctctgtgtgagaagggcacctccaaccaccgccgtgccttcgagaacctcccttgtgctgactcttaatgaactgcctaataggacctcaggccttctggaaactaactttacggcgagcgcccgaacgaccggatccggactcctgaagtggcagcagggatttcgggcaaagattcccggacttttgaaccagactagccgctcccttgatcaaattcctgggtacctgaatcgcattcacgaactcctcaatgggacccggggtctgttcccaggtccctcaagaagaaccctgggtgcccctgatattagcagcggtacttccgatactggtagccttcctccgaaccttcaaccagggtacagccccagcccgactcatcctcctactggtcagtacaccctttttcctcttccacctacccttcccaccccggtggtccagctccaccccctgcttcctgacccatctgcacctacccctactcctacctcacccctgctcaatacctcgtacacccattcacaaaacctttcacaggagggc

SEQ ID NO: 108802 - DNA, 1059 bp, Artificial Sequence
  derived and/or modified sequence
atggaattgactgaactgttgcttgtggtgatgcttctgcttaccgcaaggcttaccctgtcatcaccagcccctcccgcttgtgacctgagagtgctgagcaaacttctccgggattcacatgtgttgcactcgcgcctctctcaatgtcctgaagtgcacccccttcctaccccagtgcttcttcccgcagtggacttttcgctgggagagtggaaaactcaaatggaagagactaaggcccaagatattcttggcgcagtcaccttgctgcttgaaggagtcatggctgccagaggtcaacttggaccaacttgcctgtcgtcgctgcttggacagctttcgggccaggtgagactccttcttggagcactgcagtcgctgctggggacccaactgcctccacaaggtcgaacgactgcccataaggatccaaacgcaatctttctctcatttcaacatcttctgcgcgggaaggtcagattccttatgctggtgggcggtagcaccctttgtgtgcgacgagctccaccaactactgcagtcccgtcgcgaacctccctggtgttgacccttaatgaacttcctaacaggacttcaggtctgcttgaaaccaactttactgcatctgcaaggacgaccggaagcggactgctcaagtggcaacagggcttccgagccaagatacctggattgctgaaccagacgtcacgatccctcgatcagattccaggatacctcaatcggatccacgaacttttgaacggaaccagaggacttttccctggcccatcccggagaactctgggagcacccgacatttcgtcaggtacgtccgatactggttccttgcctcctaacctgcagcctgggtattccccatcacctacgcacccgccgactggacagtacaccctgtttccgctgccccctacgcttccgaccccagtggtgcaactccatccactgttgccggatccttccgcaccaacccccactccaacgtcgccgctgctgaataccagctacactcattcccagaatctgagccaggaaggg

SEQ ID NO: 108803 - DNA, 1059 bp, Artificial Sequence
  derived and/or modified sequence
atggaactcaccgagctgcttctggtggttatgctactactgactgcacgactcaccctttcttcaccggccccccctgcgtgcgacctccgggtcttgagcaagctcctgagggactctcacgttctgcacagcaggctaagccagtgcccggaagtgcaccctctgccaacaccagttctgctcccagccgtggacttctccctgggggaatggaaaacccagatggaagagaccaaagcccaggacatcctgggtgcagttactcttcttttggagggcgtgatggcagcacgtgggcagcttgggcctacctgcctgtcttcactacttggtcagctgagcgggcaggttcggctgcttctaggggctctgcagagcctcctgggcactcagcttcccccacagggcagaacaacagcacataaggatccgaacgctatttttctatcattccagcatcttctgagaggcaaggtgcgttttctgatgctggtggggggctctaccctgtgtgtgcgtagggcaccccccacaaccgctgtaccttcccgcacatctctggtattgacccttaatgagctccccaaccggacgtcagggctactggaaacgaactttacagcctctgcacggacaacaggatccggtcttctaaagtggcagcaaggttttcgggccaaaatccccggtttgctcaatcagacctctcgaagtcttgatcagatacccggctatctaaacagaatacacgagcttcttaacggaaccaggggtctctttcctggccctagcaggcggactctgggcgccccggacattagttctgggacatccgacaccgggtcgctccctcctaacctgcagcccggctattcgcctagtcccacacacccaccaactggccagtacacattatttcccctgccgcccactctgcccacccctgtggtccaactgcatcctctactgccggaccccagtgcacctacacccactcctacttccccgcttcttaatacttcctacacacattcgcagaatctgtctcaggagggg

SEQ ID NO: 108804 - DNA, 1059 bp, Artificial Sequence
  derived and/or modified sequence
atggagctgactgaacttctgttggtcgtgatgctcttgctcaccgcccgtttgaccctgagtagccccgcaccccccgcatgcgatttgagggtgctcagtaaactgctgcgggacagccacgtgctgcacagccggttgagtcagtgtcctgaagtgcatcccttgccaacccctgtcctcctgccagctgtagattttagcttgggagaatggaagacccagatggaagaaacaaaagctcaggacatacttggggcagtcacattgcttttggaaggagtcatggcagcacgtggacagctaggacccacctgcctctcgtcattgctgggtcaactgtctggacaggtcaggctcttgctgggagcattgcaaagcctgttggggacacagttgcccccacaggggcggacaacagcccacaaagatcctaacgccatttttctgtctttccagcacttattgcgtggaaaagtgcgctttttaatgttggtgggaggcagcaccctctgcgtccggcgggctccccctacaacagccgtacctagtaggacttctttggtccttactttgaatgagctgcctaacagaacctcaggactgctagagaccaactttactgcatcagcccggactactggctccgggctgctgaaatggcaacagggctttagagccaagatcccaggcctgcttaatcagaccagtcgctccctcgatcagattcccgggtacctcaataggattcatgaactgctcaacggcacgagagggctgttccctggaccgtctaggcgaaccttgggggcccccgacatttcatctggtacgtcagacactgggagtctgccacccaatctccagcctggatatagcccctcgccaacacaccctccaacgggtcaatatacattgttcccactgcctcctacactccctacaccggtggtacagctacatcctctcctgcccgatcctagcgcgcctacgccaactcctacttcacccctgttgaacacatcctatactcacagtcagaatctgagtcaggaggga

SEQ ID NO: 108805 - DNA, 1059 bp, Artificial Sequence
  derived and/or modified sequence
atggagctgactgagctgctgcttgtcgtaatgcttctcttaacagcgcgccttactctgtcgtcccctgcccctcctgcttgtgacttacgcgtgctgtccaagctgttgagggacagccacgtgctgcactcacggttgtcccagtgccccgaggtgcatcccctaccgactcccgtgctgttacctgccgtagacttctctctgggcgagtggaaaacccagatggaggagactaaagcacaagacatactcggggctgtgacacttctgctcgaaggggtaatggccgccagaggtcagctcgggccgacatgcttatccagccttcttggacagctgtcaggacaggttaggttactgctcggggcccttcaaagcctccttggcacccaattaccaccccaaggccgcacaacagctcacaaagacccaaacgcaattttcctgagtttccaacacctgcttagaggcaaagtccggtttttgatgcttgtgggaggatcgactctttgcgtgcgaagggcgcctcctactactgcagtcccatctcgcacctccttagttctgacactcaatgaactgccgaatagaacaagcgggctgctggagaccaacttcaccgcctctgctcggacgactgggagtgggcttctgaaatggcaacaggggttcagagcgaaaatccctgggctgctcaatcagacctcccgtagcttggaccagatacctggctatctgaataggatccatgaactcctgaatggcacccggggcctcttccccggtccttccaggcgaactctcggggcgccagacatcagcagtggtacttcggatacgggttcgctgccacccaatttgcaacctggttattcacctagccccacacatccccctaccggccagtatactctgtttccattaccccccaccttgcccacgccagtagtacagttgcatcctttactccccgaccccagtgcgcctactcccacgcccacctccccattacttaacacaagctatacacactctcagaacctgagccaggaggga

SEQ ID NO: 108806 - DNA, 1059 bp, Artificial Sequence
  derived and/or modified sequence
atggagctcacggaacttctgctcgtggtgatgctcctccttaccgccagactgaccctgagctcgccggcgccgcctgcctgcgatctccgcgtgctgtccaagctgttgagggactcgcacgtgttgcattcacgactttcccaatgccccgaggtccatccactcccaactccggtgctcctccctgccgtggacttcagtctcggggagtggaaaacccagatggaggaaacgaaggcccaagacatcctcggagcagtcaccctgctgcttgagggcgtcatggccgcccggggacaactgggacccacctgcctgtcatccctcctgggacaactgagcggacaggtgcgcttgctccttggagcccttcagtcgctgctgggaactcaactgccgccccaagggagaactactgcccacaaggatccaaatgctatcttcctttcattccagcacctgttgagaggaaaggtgaggttcctcatgcttgtgggaggttcaaccctgtgtgtcagacgcgccccgccgaccaccgctgtcccgtcaagaacctcgctggtgttgactctgaatgagctcccgaataggaccagcggacttctggaaaccaacttcactgcctccgcaagaactaccggatcgggcctcctgaaatggcagcagggtttccgagctaagattccggggcttctgaaccaaacctcgcggtcgctggatcagatccctggatacctgaacagaatccatgaactgctgaatggtacccgcggcctgttcccggggccttcgcgcaggaccctgggggccccggatatctcgagcggaacttcggacactggatccctcccaccgaatcttcaacctggatacagcccatcgccaactcaccctcctactgggcagtacaccctttttccgctgcccccgactctcccgaccccggtggtgcagctccacccgctgctcccggacccatctgcgccaactccaactccgacctcaccgctgctgaatacttcgtacactcactcacagaacctctcccaggaaggg

SEQ ID NO: 108807 - DNA, 1059 bp, Artificial Sequence
  derived and/or modified sequence
atggaacttactgaacttcttcttgtggtgatgctgctcctgaccgcaagactcaccctttcctcacctgcaccaccagcctgtgacctgagagtgttgtcgaagctcttgagagactcccacgttctgcactcccgcttgtcgcaatgccccgaagtgcatcctttgcctaccccagtcctgcttccagcggtggatttcagcctgggagagtggaaaactcagatggaggaaaccaaggcacaagatatactgggtgccgtgactctcctgcttgaaggcgtcatggcagctagagggcagctggggcccacttgtctttcctcgttgctcggtcaactctcaggccaagtccgccttctgctcggagcgttgcaatcgcttctgggcacccagctgcctccacaaggtagaaccaccgcacacaaggatcctaacgcgatttttctgtcatttcaacatcttctcagaggaaaagtgcgctttctgatgcttgtcggggggtctacgctgtgtgtgcggcgtgcaccaccgactaccgcagtgccatcccgaacttcgcttgtgctgaccctgaacgaactgcctaatcgaactagcggcctcctcgaaaccaatttcaccgcctccgcaagaaccactggatcgggcctgcttaaatggcaacagggttttcgtgctaagataccagggttgcttaaccaaacttcgcgctcccttgatcagattcctggatacctcaatcgcattcatgaactccttaatggaactcgcggcctctttccgggacctagccgaagaactctgggcgcacccgatatttccagcggcacctccgacactgggtcgctgccacctaacctccaaccgggctactcaccatcccccacccatcctcccactgggcagtacaccctcttcccattgccacccacgcttcctactccagtggtccaacttcatcctttgctgccagatccttccgcgcctactcccactcctacttcgccactccttaatacttcatacactcacagccaaaacctctcgcaagaaggc

SEQ ID NO: 108808 - DNA, 1059 bp, Artificial Sequence
  derived and/or modified sequence
atggagctgaccgagctgctgctggtcgtgatgctccttctgactgcacgcctgaccctgtcgtcccctgcaccgcctgcttgtgatctgagagtcctgagcaaacttctgcgcgattcgcacgtgctgcactctcgactctcgcaatgcccggaggtgcacccgctgccgacgccggtgctgctgcctgcagtggatttctccctcggcgaatggaaaacgcaaatggaagagactaaagcgcaggatatactgggagcagtgacgctgctgctggaaggagtgatggctgccagaggacagctggggccgacttgcctgagctcgctcctggggcagctctccggacaggtcaggctcctgttgggcgcactgcaatcactcctgggtactcagctgccgccgcaaggacgcactacggcccacaaagaccctaacgccatctttctcagcttccaacatctgctgcggggaaaggtcaggttcctgatgcttgtcggaggatcgacgttgtgtgtgcggagagctcccccaaccaccgctgtgccatcgcgcacgagtctggtgctcacccttaacgagctgcccaacagaacctcggggttgctggaaactaactttactgccagcgcccggactactggcagcggacttctcaagtggcaacagggtttcagggccaagatccctgggctgctcaaccagacttcgcgcagcctggaccagatccctggctacctgaacagaatccacgagctcctcaacggaacccgcggtcttttccccggaccgagccggaggactctgggggccccagacatctcatcagggacgagcgacaccggctcactgcccccgaatctgcagcccggctactccccgtcgccgacccacccgcctactgggcagtacactctcttccccctgccgcctaccctgcctactccagtcgtgcagttgcatccactcttgcccgacccatccgctccaactccgactccaacctccccgcttctcaataccagctacacccacagccagaatctctcgcaggaagga

SEQ ID NO: 108809 - DNA, 1059 bp, Artificial Sequence
  derived and/or modified sequence
atggaattgactgaacttcttctcgtggtgatgctgctgctgactgcacgtcttactttgagctccccggcacctccagcatgtgacctcagagtgctttccaaacttctgagagattctcacgtactccactcgagactttcacagtgtcctgaggtgcatccactgccaactcctgtgctgctgcctgctgttgacttctctcttggagaatggaaaacgcagatggaggaaaccaaggctcaggacattttgggagcagtgaccctgcttcttgaaggagtgatggcggcccgtggtcaactgggtcccacctgccttagctcgttgctgggccagctctcgggtcaagtcagacttctgcttggtgcacttcaaagcctgcttggaactcagcttccaccccagggtcgcactaccgcccataaggatcctaatgccatatttctgagcttccaacatcttctccggggcaaggtccgatttcttatgttggtgggaggatccaccctgtgtgtcagacgcgccccaccgactaccgcagtcccaagccgcacctcgcttgtgctgactcttaatgaactgccaaatcgcactagcggactccttgaaactaactttaccgcaagcgcacggaccaccgggtcagggctcctcaaatggcagcaaggctttcgagcaaagattcccggactgctgaaccagacctctcgttcgttggatcaaatccccgggtacctgaatcgaatacacgaattgctgaacggcactagaggactctttccgggtccgtcgcggcgtactctgggtgcacctgatatctcgtcaggaacctctgacacgggatcgcttccccccaaccttcagccaggatactcgccgtcgccgactcatccaccaacgggccaatacacgctgttcccgctgcctccaacgcttcctacccccgtcgtgcaacttcacccactcctgcctgatccatcggcacctaccccaactcctacctcgcccctgttgaacacttcgtacacccattcccaaaatctcagccaggaaggt

SEQ ID NO: 108810 - DNA, 1059 bp, Artificial Sequence
  derived and/or modified sequence
atggagctcaccgagctgctgctggtcgtgatgctgctcctgaccgcacgacttaccctgagtagtcccgcacctcccgcatgtgaccttagagtcctcagcaaactcctccgcgactctcacgtcttgcactcccgactgtcccaatgccccgaggtgcaccccttgcctacccccgtactgttgcctgctgttgacttttctctcggtgaatggaagacccaaatggaagagacaaaggcgcaggacatactgggggccgtcaccctgctgctggaaggtgttatggcagctagaggacagctgggccccacgtgtctttccagtctgcttggccaactgagcgggcaggtgcggctgctcctgggcgcactgcagagcctgctcggaacacaattgccaccccaggggagaactaccgctcacaaagaccctaacgctatctttctgtctttccaacacctgcttaggggaaaagtccgcttcctgatgcttgtgggagggagtacactttgcgttagacgggcaccgccgaccactgccgtgccctccaggacctcactggtcctcactcttaacgagctccccaacaggaccagcggccttctggagactaactttaccgcatctgccaggaccaccggatctgggctgcttaagtggcaacagggatttagggctaagatccccgggctgctgaaccagaccagcagaagtttggatcagatcccaggatatctgaaccggattcatgaactgctgaatggcacaagggggctgttcccagggcccagcagaagaacactcggggcacccgatatctccagtgggaccagtgacacagggtcccttccacctaacctgcagcctggttatagtcccagtcccacccaccctccaactggtcagtatactctgttcccactcccacctacccttccgaccccggtggtgcagcttcatcccctgctgcctgatcccagtgctcctactccgacccctacctcccccctgctgaacacgtcatacacgcacagtcagaacctctcacaggagggg

SEQ ID NO: 108811 - DNA, 1059 bp, Artificial Sequence
  derived and/or modified sequence
atggaactgactgagctgctgctggtagtgatgctgttgcttacagctcgtctgacactgtcctctccagctccacccgcgtgtgacctccgagttctctccaagctgctgcgggattcccatgtgctccactcccgactgtcacagtgtcctgaggtacatcccctgccaacccctgtgttgctcccggccgtggacttctccctgggtgaatggaagacccaaatggaggagacgaaagcgcaggacattttgggggccgtgaccctgcttttggagggggttatggccgcaagaggacagctcggacccacttgcctcagctcgctcctgggccagctttctggccaagtgaggctgcttctgggcgctctgcaatctctgttggggacgcagctcccaccccaagggaggactactgcccataaggaccctaatgctattttcctgtcgtttcagcacctgctgcgaggaaaagttcggttcctgatgctggtcgggggatcaacactttgtgtgagacgcgctcccccgacaacagccgtgccaagccggaccagtttggtcctgactctcaacgaattgccaaacaggacctcaggactcctggagactaattttaccgcatctgcacggacaaccggttcaggcctactcaaatggcagcagggttttcgagcaaagattcctggtcttttgaaccagacatccaggtctctggaccagatccctggctacttgaataggatccatgaactcttgaatggcacccggggcctgttccctggaccttcccggcgaactctgggggcccctgacatcagctctgggacaagtgacacgggttccctccccccaaacctgcagcctgggtattctccaagcccgacccacccaccaacagggcagtataccttgttccccttgccgccgaccctccccacacccgtggttcagctgcatcctctgctgcccgacccctctgcgcccactcctactccgacatccccgctgctgaataccagctacacacactcacagaacctcagtcaagaagga

SEQ ID NO: 108812 - DNA, 1059 bp, Artificial Sequence
  derived and/or modified sequence
atggaacttacggagctcttgctggtcgttatgcttctgcttactgctcgcctaactctgagctcacccgccccgcctgcatgtgatctgagggtactgagtaaactgcttcgtgacagtcatgttctgcattctcgactgtcccaatgccccgaggtgcatccccttccaacccccgtccttctccccgccgtggacttctccctgggcgagtggaagactcagatggaagaaacaaaggcccaggatatcctgggtgcggtgactctcctgctggagggggttatggctgctagggggcagctaggaccaacatgcctttcgtcccttctgggccagctgtccggacaggtgaggttgttgctgggggcacttcagtctctgctgggtacacagttgccacctcaggggagaactaccgcccacaaggacccgaacgccatcttcctgagctttcagcacctccttcgaggaaaggttaggttcctgatgctggtggggggttccacactttgcgttcgaagagccccgcctactaccgccgtaccctctagaacgtcccttgtcctcaccctgaacgagctcccgaacaggacatcaggtctgctcgaaactaattttaccgcctccgcacgcacaactggatcaggcctcttgaaatggcagcagggctttagggcaaagatccccggactgctaaatcagacttcccgaagcctggaccagatcccaggctatctcaaccgaatccatgaactcctaaatgggactcgaggtctttttcctggcccatctaggcgcaccctgggtgctccggatatttctagcgggaccagtgatacagggagcctgccgcccaacttacagcccgggtacagcccctcccccacacaccctcccacaggccagtataccctcttccccttgcctcccaccctgcccaccccggtcgtacaattgcatcccttactacccgacccatccgctcccacgccaaccccgacttctccattactcaatacaagttacacccatagccaaaatttgagtcaagaggga

SEQ ID NO: 108813 - DNA, 1059 bp, Artificial Sequence
  derived and/or modified sequence
atggagttgacggaactgttgctggtggtgatgctgctgcttactgcgcggctgacgctctcgtctccggcaccgccggcttgtgaccttagggtgctttctaagctgctgcgcgattcccacgtgttgcactcgcggcttagccaatgccctgaggtgcatcctctgcctactccggtccttctgccggccgtggacttctcgctgggagaatggaaaacccagatggaggaaaccaaggcccaggatatcctcggagccgtgacccttctcctggagggtgtgatggccgcccgcgggcaactgggcccgacttgcctgtcctcgctgcttggtcaattgagcggacaggtgcgcctcctcctgggcgcccttcagtcgctgctcggcactcaactcccgccacaaggacggaccaccgcacataaagacccgaacgcgatcttcttgtcgtttcaacatctgctccggggaaaggtgcggtttttgatgcttgtggggggatccaccctctgcgtgcgccgcgccccgcccaccactgccgtgccttcccgcacttcgctggtcctcacgctgaacgaactgccgaaccgcactagcggcctcctggaaaccaatttcactgcctcggcccggactactggatcgggactgctgaagtggcagcagggcttccgcgcaaagatcccgggattgctcaaccagacctcacggtcgctcgaccaaatccctggatacctgaaccgcatccacgagctgctgaacggcacccgaggactcttccctgggccgtccagaaggaccctcggcgccccggacatcagctcaggaacctcagatactggttcgctgcctccgaacctccagccgggctacagcccatcaccgacccaccctccaactggccaatacacccttttcccgttgcccccgacgctgccgacgccggtggtgcaactgcatccactgctgcctgacccgtccgccccgaccccgaccccaacgagccccctgttgaatacctcgtacacccactcgcagaatcttagccaggaggga

SEQ ID NO: 108814 - DNA, 1059 bp, Artificial Sequence
  derived and/or modified sequence
atggaacttacagaattgttgttggtcgtgatgttactccttacagcacggcttacactttcatcaccagcgccgccggcgtgcgatttgagagtcctctcaaaactgttgcgcgattcacatgtgctgcattccagattgtcacaatgcccagaagtgcatccattaccaactccggtcctgttgccagcggttgacttctcccttggcgagtggaaaacgcaaatggaagaaacgaaagcacaggacatcctgggtgctgtcacgctactgcttgaaggagtgatggctgcgagaggtcagctggggccgacgtgcttatcttctttacttggccagctgtccggacaggtcagactgctgttaggggcccttcaatcactgttgggtacacagcttcccccgcaggggcgcacgacagctcataaagatcctaatgctatctttctttcttttcagcacttattacgcggaaaggtccgattcttaatgttggtggggggatcgacgctgtgcgtacgaagggcccctccaaccacagccgttccctcgcgaacatcactggtgttgacattaaatgagctgccgaacagaacgtcaggcctgctggagaccaatttcacggcgtccgcacgtacgactggttcggggctgctgaagtggcaacaaggatttcgggcgaaaattcctggattacttaatcagacatcgcgttctttggatcaaataccgggttatctgaatcggattcatgaattgctgaatggaacacgaggattatttcctgggccgtcacggcgaacattgggcgctccagatatttcttctggcacgtcggatacaggttcacttcccccgaatcttcagccgggatatagcccgtccccgacgcacccgccgaccggtcaatacacgctattcccgttaccgcctacattgccgacacctgtcgtccaactccatccgttgttaccggatccgtccgctccgacgccgacgcccacttcacctttactgaacacttcctatactcatagccaaaatctgagtcaagaagga

SEQ ID NO: 108815 - DNA, 1059 bp, Artificial Sequence
  derived and/or modified sequence
atggaattgaccgagttgctgctggtcgtaatgctcttgctcactgccaggttgaccctttcctcaccggcaccccccgcatgtgatctgagggtgctcagcaagctgctgagggactctcacgtcctccattctcgcttgtcacaatgtccggaggttcaccctctgcccacacctgtccttctgccagctgtcgacttcagcctgggcgagtggaaaactcaaatggaagagactaaggcccaggacatcctgggtgccgtcaccttgctgcttgagggtgtaatggccgctagaggacagcttggtccaacatgccttagcagtctgttgggacagctcagtggacaggtgagactcctgctgggcgcgctccaatcccttttgggaacacagctccctccacagggtaggacaacggcacacaaagacccgaacgcaattttcttgtctttccagcatctcctccgcggcaaagtaagatttctgatgctcgttggcggctctaccctgtgcgtgaggcgcgcgccacctacgaccgcagtgccctccaggacctccctcgttctgactcttaacgagttgcccaataggacttccggcttgctggagaccaactttactgcctctgcgaggacgaccggatcaggattgctgaagtggcagcagggctttagagctaaaatacccggtctcctcaaccagacctcacgcagccttgaccaaattcctggctacctgaacaggatccacgaactcttgaatggaaccagaggtctcttccctggacctagcagacgcacccttggcgctccggatatctccagcggtacaagcgacaccggaagccttcctcccaacttgcagccaggttactcaccctctccgacccacccccccacaggtcagtacacactgttcccgctcccccccaccctgcccacaccagtcgtccagttgcaccccctgcttcctgacccatccgctccaactcccacacccacttctcctcttctgaacacctcttatactcatagccaaaatcttagccaggaggga

SEQ ID NO: 108816 - DNA, 1059 bp, Artificial Sequence
  derived and/or modified sequence
atggaattaacagaactgctgcttgtggtaatgctccttctaacggctaggctgacacttagttctccggcccccccagcctgtgatctacgggttctctccaaactgctcagggattcacacgtgctgcactctaggctttctcagtgtccagaggtgcaccccctgccgacacccgtccttctaccagctgtcgatttttcactcggagaatggaaaacacagatggaagaaactaaagctcaggacatcttaggggcagtcactctactgctcgagggggtcatggctgctcgcgggcagttggggccaacttgcctctcctctcttttaggacagctctctgggcaggtgaggttactgcttggagctttgcagtcgttattaggaacacagctccctccccagggacggactactgcacacaaagaccccaacgccatcttcctgagtttccagcatctcctgcggggaaaagtaaggtttctgatgctcgtgggagggtctactttatgcgttcggcgggctcctcctacaacagccgtccctagtcggacttccttggttttaacactcaatgaactacccaatagaacatcagggctactggaaactaactttactgcttccgctcgcacaacaggatcagggctccttaaatggcagcaggggtttagggctaagatccccggactgttaaatcagacttctaggtcactggaccagataccagggtatctgaaccggatccacgaactactcaatgggacaagaggattatttccaggaccctcacgcaggactctaggggctcctgatatctcatctggaacatctgatactggatcactcccacccaatcttcagcccggatattccccctcacccacacatccacctacagggcagtatacactcttcccactaccaccaactctccccactccggtcgtgcagctgcaccctctgctgcctgacccatccgctcccactcctactccaacatctcctcttctcaatacttcttatactcactctcagaatctatcacaggaaggg

SEQ ID NO: 108817 - DNA, 1059 bp, Artificial Sequence
  derived and/or modified sequence
atggaactcaccgaactgcttctcgtggtgatgctgctgcttacagcacgtctcacgctgagctcaccagcccccccagcttgcgatcttagggtactctccaaattactcagagatagccatgtgctccacagccggctgtctcagtgtcccgaggtccaccccctgcctactccagtccttcttccagctgtggatttctctttgggcgagtggaagacccagatggaagagaccaaagcccaggatatcttgggcgcagtgactctgctcctggagggagtaatggccgcccgtggacagcttggaccaacatgtctctcttcgctgctaggtcaattgtcaggacaggttcgtctgttactgggcgcgctgcagtcactgctcggtacacagctccctccgcagggaaggaccacagctcacaaagatcctaacgccatattcctgtcgtttcagcacctactgagaggtaaagtgaggtttcttatgctggtcggagggtcgacactgtgcgtccgccgcgcaccccccacgactgccgtacctagtcgaacaagccttgtgctgacacttaacgagttgccgaataggacctcaggcctcctagaaacaaacttcacggcctcagcacggacaaccggatctggcctccttaaatggcagcaaggcttccgcgccaagatccccggcttacttaaccagacctcgagatcattggatcagattcctgggtatttaaaccggatccacgaactgctcaatggcactcgcggcctgtttcccggaccgtcccgccggactctgggcgcgccggacataagctcgggaacttcggacacaggctccctgcccccgaatctgcagcctggctatagtcccagcccgactcatccccctacgggccagtacacccttttcccgctgcccccaacgttgcctacgcccgtggtgcagctgcacccattgttgcctgacccttccgcccctaccccaacccctacctcccctctgctgaatacctcgtatacgcactctcagaatctatcccaggagggc

SEQ ID NO: 108818 - DNA, 1059 bp, Artificial Sequence
  derived and/or modified sequence
atggagctgacggaacttcttctcgtggtcatgctgcttctcactgcacgcctgaccctttcaagcccagccccaccagcttgcgaccttagagtgctgtcgaaactccttcgagactcccatgtgcttcactcgcgtctgtcgcagtgccctgaagtgcatccactgcctacccccgtgcttctgcctgcagttgatttctccctgggggaatggaaaacccagatggaggagactaaggcacaggacatccttggagcggtcacccttttgctggaaggtgtgatggccgcaagaggacaactcggccccacctgtctgagctccctcctgggacaactttcgggacaagtgagactcctgctgggtgcccttcagagcctcctgggtacgcaactgcctccacagggccggactacggcacacaaggatccgaacgcgatatttctgtcattccagcatctgttgagaggaaaggtgagattcctcatgctcgtcggcggctccaccttgtgtgtcagaagagcgcccccgactactgcagtgccctcccggacctcgttggtgctcaccctgaacgaattgcctaaccgtacgtccgggctgctggaaacgaactttaccgcgagcgctcgaaccaccggttccggactgctgaaatggcaacagggctttcgtgcaaagattcctggtctgctgaaccagaccagtagatcccttgaccaaattcctggataccttaatcgaattcatgagctgctcaatggcaccagaggcctcttccctggtccctcacgcaggactcttggtgcgcctgatatctcgagcggaacctcggatactggttcactgccccctaatctccaacctggctactccccttcccctacgcatccccctaccggtcagtacaccctgtttccactgccgccaacgctgcctaccccggtggtccagcttcatcctttgctgcctgatccttctgcacctactcctaccccgactagcccactcctgaatacttcttacacgcatagccaaaacctgtcgcaagagggg

SEQ ID NO: 108819 - DNA, 1059 bp, Artificial Sequence
  derived and/or modified sequence
atggagctgactgaactcttgctcgtggtcatgttgctgctgaccgctcgcctgaccctctcctctccagctccacctgcgtgcgatctgcgcgtcctgagcaagctcttgagggactcccacgtgctccactcgcgcctctcgcagtgtccggaagtccacccgcttccaactccggtgctcctcccggccgtggatttttccctgggggagtggaaaactcagatggaggaaactaaggcgcaagacatcctgggagccgtcactcttctgttggaaggcgtgatggccgctcgcggccaactcggtccgacgtgcctttcatcgctgcttggtcagttgtcaggacaggtccgcttgctccttggagcacttcaatccctgctgggcacccagctgccgccccaagggcggaccactgcccacaaagaccccaacgccatcttcctgagcttccagcaccttctgcgtggaaaggtgaggttcctcatgctggtgggcggatccaccctgtgtgtgcggagggcaccgccgaccactgccgtcccgagccgcacctctctggtgttgacgctcaatgagctgccgaaccgcacttccggcctgctcgaaacgaacttcaccgcgtcggctcgaacgaccgggtccggccttctcaaatggcagcaaggatttcgggccaagatccctggcctcctgaaccagacgtcccgctcgttggaccagatcccaggctatctgaatagaatccatgaactcctgaacggaacgcgcggcttgttccctgggccatcgaggcgcaccctcggagcgccagacattagctcgggaacctcagatacggggtccctgccaccgaacttgcagccgggctactccccatcaccaacccatccgcctaccggacagtacacccttttcccgctcccgcccactctgcctacgccggtcgtgcagctccaccccctcctgccggacccctcggcaccgaccccgactccgacctccccactgctgaatacctcatacacgcactcccagaacctgagccaagagggg

SEQ ID NO: 108820 - DNA, 1059 bp, Artificial Sequence
  derived and/or modified sequence
atggaactgaccgaactcctccttgtggtcatgctcttgctgactgcccgtctgactctttcgtcccccgcgcctcctgcatgtgatcttcgtgtcctttcaaagctcctccgagactcgcatgtgctgcattccaggctttcacaatgccctgaggtgcatcccctgccaactccagtcctcctccctgcggtcgatttttccctcggcgagtggaaaacccagatggaggaaaccaaggcacaagatattctcggcgcagtgactcttcttcttgaaggcgtcatggctgcaagggggcagctggggccaacctgtctcagctcgctgttgggtcagctgagcggacaagtccgtctgctgctgggggcccttcaaagccttctcggcacccaacttcctcctcaggggcggaccaccgcacataaggacccaaatgctatctttctttcgtttcaacacctgctcagagggaaggtgcgatttcttatgctggtgggtggatcgacgctgtgcgtgcggcgggcgccaccaaccaccgcagtaccttcgcggacctcgctggtgcttactcttaatgaactccccaatagaactagcggactgctcgaaaccaactttacggcaagcgcacggactaccggatcggggctccttaaatggcaacaggggtttcgagccaaaatacctggtttgctgaaccaaacctcacggtccttggaccaaattcctggttacctcaaccgcatacacgagctccttaatggaaccagaggcctgttcccaggcccttcgaggcgcaccctcggagctcccgatatctccagcggaaccagcgataccggctccctgcctccgaatctccagcccggatactctccttcccctacgcaccctcctaccggtcagtacactcttttcccattgcccccaactcttcccactccagtcgtccagttgcaccctctgcttcccgatccttccgcacccacccccacgccaacctcgcctttgcttaatacttcgtatacgcattcgcagaacctttcgcaagaagga

SEQ ID NO: 108821 - DNA, 1059 bp, Artificial Sequence
  derived and/or modified sequence
atggagctgacggaactgctgctggtggtgatgctgctgctgacagcgcgattgacattgtcaagccctgcaccacccgcatgcgatctccgtgtgctttctaaactgctgcgggattctcatgtgctgcactctcgattgtcccagtgcccagaggtacacccgctaccaacccctgtactgcttcccgccgtggatttctcactcggcgaatggaaaacccagatggaggagacgaaagctcaagatatattaggggccgtgacgcttctcctggagggggtgatggctgcccggggccagcttggacccacttgcttgtcgtcattgctaggccagttaagtggacaggtaagactgctactgggagctctacagagcctgcttgggacgcaattgcctccacaaggaaggaccacggcccataaggatcctaatgctatcttcctgtccttccagcaccttctccgagggaaggtgcggttcctgatgttggttggtggctccactctttgcgtcagaagggcccctcctacaaccgcggtcccgtcacgcacatccctcgtgctcactttgaatgaactacccaaccggacctcaggtctgctggagaccaattttaccgcttccgctcgtaccaccggttcaggactcctcaaatggcagcagggattccgagccaagataccaggactgctgaatcaaacaagcaggagtctggatcaaataccggggtatcttaatcggatccacgagttgctgaacggcactcggggattgtttcctgggccttcccgaagaactctgggggccccggatatctctagtggaacctcggatactgggagccttcctcctaacctgcagcccggctattcaccaagcccaacccatcccccaaccgggcagtacacgctgttcccactgcctccaacactcccaacccccgttgtacaattgcatcctctactccccgacccttctgcccccacaccaacccccacgtcccccctgctaaatacgagctacacgcactcccagaacctgtcacaggaaggc

SEQ ID NO: 108822 - DNA, 1059 bp, Artificial Sequence
  derived and/or modified sequence
atggagcttactgagttgcttttggtggtgatgctcctcctgactgcacggctgaccctttcgagcccagcaccgcccgcatgtgatcttcgggtgcttagcaagctcctccgcgactcccacgtccttcactcccggctgtcacaatgtccggaagtgcaccctctcccgacgcctgtgctccttcccgcagtcgactttagcctcggcgaatggaaaactcagatggaagagactaaggcacaagacattttgggggcggttacccttctcctcgagggagtgatggcagccagaggacaactcgggcctacctgtcttagctccctgctgggccaactgtcgggccaagtcagactgctgctgggagccctccagagcctcctggggactcagctcccgccacaggggcgcactactgctcacaaagatcccaacgcaatctttctgtcattccagcatctcttgagaggaaaggtgcggttccttatgctggtcggcggaagcaccttgtgtgtgaggcgtgcacctcctactaccgcagtgccgtcccgtacctcgcttgtcctgacccttaatgaactgccaaaccggactagcggcctccttgaaacgaactttaccgcatcagcacgtacgactggctccgggctgctgaagtggcagcaaggcttcagggctaaaatccccggccttctgaaccagacctcacgctctcttgatcagattcctgggtacctcaacagaatccacgaattgctgaacgggactaggggtttgtttccaggcccctcacgaagaactctcggagctcctgacattagctccggcacgtccgataccggttccttgccacctaatcttcaaccaggatactcgccatcacctactcatcccccaactggacagtacactctgtttcctctccctccgactcttcctacccccgtcgttcaactgcatcctcttcttcctgatccatcagcccccacccctaccccaacctcaccccttcttaatacttcctacactcattcccaaaacctgagccaagaaggc

SEQ ID NO: 108823 - DNA, 1059 bp, Artificial Sequence
  derived and/or modified sequence
atggagctgactgaactgctcctagtggtcatgcttctacttacggctcggctgacgctgtcttcgcccgcgccaccggcatgtgacctgcgggtgctgagcaaactattgagagattcgcatgtcctgcacagccgcttgagtcaatgtcctgaggtccaccccctgccaactcctgtgctgcttcccgcggtagatttttctctcggcgagtggaagacacagatggaggagactaaagcccaggatattctcggcgccgttaccttgttgctggagggcgtcatggccgctcgcggacagctcggccccacatgcctgagctccctgttgggccagctgtccggtcaggtgcgcctgctgttgggcgccctacagtcattgctaggcactcagttgccgccacaaggccgcaccacggcgcacaaagatcccaatgccatctttctgtctttccagcatcttctgcggggcaaggtgcgattcctgatgctggtaggcggctcgaccctttgcgtacggagggccccgccaacaacggccgtgccgtcccgaacaagcctggtgcttacactgaatgagctcccgaacagaactagcggcctcctcgagacgaattttaccgcctctgcgagaacgactggcagcggtctgctgaaatggcagcagggcttccgtgccaagatcccaggattgctgaaccaaacatcgcggtccttagaccaaatcccgggttacttgaatcggatacacgaattgcttaacggtactcgcggcctctttcccgggccctctcgacgcacgttgggcgcgcccgatatctcgtcgggaacgtcggatacgggatcgctgcccccaaatctacagccaggatatagtcccagtccaacccacccaccgaccggccagtatacgctgtttccacttccacccacactgcccaccccggtggtccagctgcatcccctgctgcccgatccctccgcgccgacacctacccccacctcacccctgttgaacacttcgtacactcactcccagaacttgtcccaggagggt

SEQ ID NO: 108824 - DNA, 1059 bp, Artificial Sequence
  derived and/or modified sequence
atggagcttaccgaattgcttctggtcgtgatgcttctgctcaccgctcgcctcaccctctccagcccagcacccccagcatgtgacttgagagtccttagcaagctgctgcgtgactctcatgtgttgcattcgagactctcgcaatgtcccgaagtgcatccactgcctactccggtcttgcttccggcggtggatttctcactgggagaatggaaaactcagatggaggagacgaaggctcaggacatcctgggtgcagtgactttgcttctggaaggcgtgatggctgcccgagggcaactcggccctacttgcctctcctccctcctgggtcagctgtcgggacaggttagacttctgctgggagcactgcaatcactgcttgggactcagctgccaccacaaggtcgcactaccgcccacaaggatccaaacgcgattttcctctcctttcagcatcttctgagggggaaagtgcgttttctcatgttggttggtgggtcaactctgtgtgtgcgaagggcacctccaacgactgccgtgccatcccgaacctccctggtccttactctgaacgaacttcctaaccgtaccagcggacttcttgaaacgaactttactgcatcagcgcggacgactggctccggacttcttaagtggcagcaaggtttccgggcaaagattcctggattgctcaaccaaacgagccggtcattggaccagattccaggatacctcaatcgaatacacgaattgttgaacggcactcggggtctttttcctggacctagccgcaggaccttgggcgcaccggatatctcgtcgggaacctcagataccggttccctccctcctaatcttcaacccggttacagcccatctccgacccatccgcccacgggacaatacacgttgttcccactgcctcctacgctgcccacccctgtggtgcaacttcaccctctgctccccgaccctagcgccccaacccccacccctacttccccacttctgaatacctcgtacacccattcccagaatctgtctcaagagggc

SEQ ID NO: 108825 - DNA, 945 bp, Artificial Sequence
  derived and/or modified sequence
atggagctgaccgagctgctgctggtggtgatgctgctgctgaccgccagactgaccctgagcagccccgccccccccgcctgcgacctgagagtgctgagcaagctgctgagagacagccacgtgctgcacagcagactgagccagtgccccgaggtgcaccccctgcccacccccgtgctgctgcccgccgtggacttcagcctgggcgagtggaagacccagatggaggagaccaaggcccaggacatcctgggcgccgtgaccctgctgctggagggcgtgatggccgccagaggccagctgggccccacctgcctgagcagcctgctgggccagctgagcggccaggtgagactgctgctgggcgccctgcagagcctgctgggcacccagctgcccccccagggcagaaccaccgcccacaaggaccccaacgccatcttcctgagcttccagcacctgctgagaggcaagaccagcggcctgctggagaccaacttcaccgccagcgccagaaccaccggcagcggcctgctgaagtggcagcagggcttcagagccaagatccccggcctgctgaaccagaccagcagaagcctggaccagatccccggctacctgaacagaatccacgagctgctgaacggcaccagaggcctgttccccggccccagcagaagaaccctgggcgcccccgacatcagcagcggcaccagcgacaccggcagcctgccccccaacctgcagcccggctacagccccagccccacccacccccccaccggccagtacaccctgttccccctgccccccaccctgcccacccccgtggtgcagctgcaccccctgctgcccgaccccagcgcccccacccccacccccaccagccccctgctgaacaccagctacacccacagccagaacctgagccaggagggctag

SEQ ID NO: 108826 - DNA, 1062 bp, Artificial Sequence
  derived and/or modified sequence
atggagctcactgaattgctgttggtggtgatgttgctactcacagcccgtttgactctttcttcacctgccccccccgcatgcgacttgagggtcctctccaagctgctgagggatagccacgttctccacagtcggctatctcagtgtcccgaggtccacccgctacctactcccgtcctgctaccagccgttgacttcagcttgggcgagtggaagacacagatggaggaaaccaaagcccaggatatcctgggcgccgtcaccctgctcctggagggcgtgatggcagctaggggtcaactcgggcccacatgcctctccagtctactgggtcagctcagcggacaggtgagacttttactcggcgccttacaaagcctgctgggcacacaactgcctcctcaggggagaacaactgcgcataaagatcccaatgctatctttctcagctttcaacacttattgcgggggaaggttcggttcttaatgctggtgggaggaagcacgctatgcgtacggagagcccctcctactacagcagtcccttcacgcacttcacttgtcctgacattgaacgagctgcccaataggactagcggcctcttagagacaaactttactgcttccgctcgcactacaggttccgggctgctgaaatggcaacagggcttcagggccaagatccctggtctgctaaatcagaccagtcggtccctcgaccaaatccctgggtaccttaatcggattcacgaactacttaatggtacgcggggcttatttcctggaccctctagaagaacgctaggtgctccggatatttcgtctggcactagcgacaccggaagtcttcctcccaacctgcagccagggtactcacccagtccaacccatcctccgactggccagtacaccttattcccattgcccccgactctaccaacccccgtggttcaactgcaccccctgttacctgaccccagtgctcccacgccaacaccaaccagccccctcctgaacactagctatacccactcccagaacctgtcacaggaaggctag

SEQ ID NO: 108827 - DNA, 945 bp, Artificial Sequence
  derived and/or modified sequence
atggagctcacagagctcctcctcgttgtgatgttactgctcaccgctcgcttgaccctaagtagcccagctccccccgcttgtgacttgagagttctgtcaaaactactgagagactctcatgtgctgcatagcagactgagccaatgtccagaggtgcacccactgcccacacccgtgttgctcccagccgtggactttagcctcggagagtggaaaactcaaatggaggaaaccaaagcccaggacatactgggggcagtgactctcctgcttgaaggagtgatggcggcccgaggccagctgggccctacatgtctgtcctcgttactgggtcagcttagcggtcaagtgagactgttgctaggagctctgcagagtctcctggggacccaactgcccccacaagggaggaccactgcccataaagacccgaatgccatctttctgagttttcagcacctgctgcggggtaagacatctggtcttcttgaaacgaattttactgcgagcgcacggacaaccggatctgggctgttgaagtggcagcagggctttcgggcgaagattcctgggttgcttaaccagactagccgcagcttggatcaaatcccaggatacctgaatagaatccatgaacttctgaacggtacccgggggttgttccctggaccaagccgtcgaaccctgggagcgcccgacattagttcaggcactagcgacaccggaagtttaccacccaatttgcagcctgggtattctcctagccctacgcatccaccaactgggcaatatactctatttcccctccctcctactcttccgacacccgttgtgcagcttcatcccctcctcccagatccatccgctcccactccaaccccaacctccccattgctgaacacttcatacactcacagccagaatctgtcacaggaaggctag

SEQ ID NO: 108828 - DNA, 945 bp, Artificial Sequence
  derived and/or modified sequence
atggagctgacagagctgctgctggtggtgatgctgctgctgacagcccggctgaccctgagcagccctgcccccccagcctgtgacctgcgggtgctgagcaagctgctgcgggacagccacgtgctgcacagccggctgagccagtgcccagaggtgcaccccctgcccacccctgtgctgctgcctgctgtggacttcagcctgggggagtggaagacccagatggaggagaccaaggcccaggacatcctgggcgctgtgaccctgctgctggagggcgtgatggccgcccggggccagctgggccccacctgcctgagcagcctgctgggccagctgagcggccaggtgcggctgctgctgggcgccctgcagagcctgctgggcacccagctgcccccccagggccgcaccacagcccacaaggaccccaatgccatcttcctgtccttccagcacctgctgcggggcaagaccagcggcctgctggagaccaacttcaccgccagcgcccggaccactggaagtggcctgctgaagtggcagcagggcttccgggccaagatccctggcctgctgaaccagaccagccgcagcctggaccagatccctggctacctgaaccgcatccacgagctgctgaatggcacccggggcctcttccctggccccagcaggaggaccctgggcgccccagacatcagcagcggcaccagtgacaccggcagcctgccccccaacctgcagcccggctacagccccagccccacccacccccccaccggccagtacaccctcttccccctgccccccaccctgcccacccctgtggtgcagctgcaccccctgctgcctgaccccagcgcccccacccccacccccaccagccccctgctgaacaccagctacacccacagccagaacctgagccaggagggctag

SEQ ID NO: 108829 - DNA, 1062 bp, Artificial Sequence
  derived and/or modified sequence
atggagctgaccgagctgctgctggtggtgatgctgctgctgaccgcgcgcctgactctttcaagccccgcgccccctgcatgcgatttgagagtgctgtcaaaactgctgagagacagccacgtgctgcatagtcggctgtcccaatgcccggaggttcatcccctgcctacgccagtgctcctacctgcagttgactttagtcttggggagtggaagacccagatggaggagacgaaggcccaagacatcctaggtgcagtgactttgctgttagaaggtgtgatggccgctagagggcaacttggtcccacatgtctcagctctttgctcggacagctgtctgggcaggtgcgtcttctgctaggtgcgctgcagtccctcctcggaacccagctcccacctcagggtaggacaactgcacataaggatcccaatgctatctttctcagctttcagcacttgcttagaggcaaagtacgcttccttatgctggtcggtggatccaccttatgcgtcagacgagcccctccgacaacggctgttccatcgaggacatcactggtactcactttaaatgaacttcctaaccgaacctctggactcctcgaaacaaatttcaccgcgtccgcgaggacaactggatcaggactgctcaaatggcagcagggcttccgcgcaaaaattcccggcctcttgaaccagacatcacgaagtctggatcagatccctggatacctcaacaggatccacgagctgctgaacggaactaggggcttatttcctggtccctcacggaggacactgggggctcctgacatctccagcggcaccagtgacactgggtccttgcctcccaatctgcagcccggctactccccatctcctacccacccgccgacaggacagtatacgcttttccccctgcctcctaccctacccacgccagttgtgcagctgcacccacttctgccggacccgagtgcgccaactccaaccccaaccagcccattactgaatacgagctacactcacagtcaaaacctgagccaggagggctag

SEQ ID NO: 108830 - DNA, 945 bp, Artificial Sequence
  derived and/or modified sequence
atggagctgaccgagctgctgctggtggtgatgctgctgctgaccgcacgactgactctgtctagtcctgcacccccagcctgcgatctgcgggtgctgtccaaattgttacgggactcacatgtcttgcacagtcggctcagccaatgcccagaggtccaccccctgccgacacctgtgctgctcccggccgtggactttagcctcggcgagtggaagacgcagatggaggaaactaaggctcaggatattctgggtgcagtgacgttgcttctggagggagttatggcagccaggggccagctgggacccacctgtcttagcagcctcctcgggcagctctctggccaggtgcggctgctgctcggagcactccaatctttgctgggtacacaactccctccccagggcaggactactgcccacaaggatccgaacgctatattcctgtcttttcaacacctgctgcgaggcaagacctcagggctgttggaaacaaatttcactgcctccgctcgaaccacaggcagcgggctgctgaaatggcaacagggctttcgcgctaaaataccaggcctcttgaaccagacgagtagatccctggaccagatccccggttatctgaaccgcatccatgaactcctcaatgggacaaggggtctgtttcccggccctagtcggagaaccctgggcgcccctgatatatcctcggggacctcagataccggatcactaccccctaatttgcaacccggatattctccttcacctacccatccacctacgggtcagtacaccctgtttccccttcctcccactctcccaaccccggtggtgcagctgcatcctctccttccagatcctagtgctccaacgcccactccaacttcacctctgctcaacacgtcatatacccactcccagaacctgagtcaggaggggtag

SEQ ID NO: 108831 - DNA, 1062 bp, Artificial Sequence
  derived and/or modified sequence
atggagctgacggaactcctgctggttgtcatgttgcttttaactgcccgactgacgctgagctccccggctcctccggcttgcgacctgcgagtgctttctaagctgttgagggactctcacgtgctgcacagccggcttagccagtgtccagaagtccacccgctgcccacccccgtactccttcctgccgttgactttagcctcggggagtggaagacccagatggaggaaaccaaggctcaggatatcctaggcgcagtgaccttacttttagagggggtaatggccgctcgagggcagctgggacctacctgcctgagcagcctgctgggccagttgagtgggcaagttcgcctcctgctgggtgccctgcagagtcttttagggacacagctcccacctcaaggtaggacaactgctcacaaagaccctaatgccattttcctaagcttccagcacctcctcagaggcaaggtccgctttctcatgcttgtgggagggtctactctttgtgtccggagggcgccaccaaccaccgctgtcccttcccgcacgtcacttgttttgacactgaatgaacttccgaacaggacatccgggctactggagaccaatttcacagcaagcgctcggacaaccggatccggactgttgaagtggcagcaaggcttccgtgcaaaaattccagggttgctgaaccaaacttccaggagcctcgatcagattcccggatacttgaaccgcatccatgagttattgaacgggacgcggggactcttccctggacctagtagacgcaccctgggggctcccgatatttcttcggggactagcgataccggatcgctcccacctaatttgcagcccggatatagcccctctcccacacaccccccaaccgggcagtataccctgttcccactgcctcccaccttgcctaccccagtagtgcaactgcatcccctgcttccagatccgtcggcacccaccccaaccccaacttctccgttgttgaatacgtcttatacccattcccagaacctgtcccaagaggggtag

SEQ ID NO: 108832 - DNA, 945 bp, Artificial Sequence
  derived and/or modified sequence
atggagctaactgagctgctgttagttgttatgctactcttgacggcaaggttgacacttagctcccccgctcctccagcctgtgatcttcgggtgcttagcaagctgctcagagactcccacgtgctgcattcgcgcctgtcacaatgtccggaagtgcatcccctgccaacacccgtgttacttcccgctgtggacttcagtctcggggaatggaaaacccaaatggaggagactaaggcacaggacatcctcggcgctgtcactcttctgctcgaaggcgtgatggccgcaagggggcagctcggacccacatgtctcagtagcttactggggcagctttcgggccaggtccggctgctgctgggcgctctccaaagtctactcggcactcagctccctccccaggggcgtaccacagcccacaaggaccccaacgccatatttctgtcatttcagcacctgctgaggggaaaaacctccggactcctcgagacaaacttcaccgccagcgccaggactacaggttctggtttactgaaatggcagcaggggttccgcgcaaagattcccggtctgttaaatcagacgtctcgttcacttgatcagatccccggataccttaacaggatccacgaactgttgaatgggactcgcggactcttcccgggaccgagtcgccgaacactgggcgcaccggacatttcctctggcaccagcgacactggctccctccctcctaacctccaaccaggatattctccttcacctacacatccaccgacggggcagtacacgctattcccccttccccctaccctacctacaccagtggtccagttgcatcctctgctgccggatccatccgctcctacccctacaccaacaagcccactgcttaacacctcctacacacactcacaaaacctatcccaggagggctag

SEQ ID NO: 108833 - DNA, 1062 bp, Artificial Sequence
  derived and/or modified sequence
atggagctcaccgagctgctgcttgtggtcatgcttctgctgacagccagactgaccctgtcatcccccgctccgccagcctgtgatctgcgcgtactgagcaaactgctcagagatagccatgtactgcattctagattgagccaatgtccagaggtgcatccacttccaacgcccgttcttctccccgctgtcgatttttctctgggagaatggaagacccagatggaagagaccaaggcccaggatattctgggagccgttaccctcttacttgaaggagtgatggctgcaaggggtcagcttggtcctacatgtctctcaagcctgctcggccagctctcaggtcaggtccggttattacttggagcactgcagagcctgctaggcacacagctgccaccacagggccggaccaccgcacacaaagatcctaatgctatattcttatcatttcagcatctgctaaggggaaaggtgcgcttcctaatgctggtggggggtagtaccctctgcgtgcgtcgcgccccccctaccactgcagtgccaagccgcactagccttgtgttgacactgaacgaactaccaaatcgcacaagcggtcttttggagaccaattttacagctagcgctagaacaacaggatccgggcttctcaaatggcagcagggcttccgcgctaaaatccccggcctcctgaatcaaacaagtagatctttggaccagattccgggctatctgaatagaatacacgaacttcttaatggtacccggggactcttcccgggtcctagtcgcagaacccttggtgcacctgatatttcttccggcacttcagatacgggaagtttgccccctaacctgcagcccggatatagcccctcaccaacccatccccctactggtcagtatactctgtttccgttgccacccacccttccaactcccgtcgttcagctgcatccactacttccggatccctccgctcccaccccaaccccaacatctcctttattgaatacatcctacactcactcacagaatctgagtcaggaaggctag

SEQ ID NO: 108834 - DNA, 945 bp, Artificial Sequence
  derived and/or modified sequence
atggaacttactgagctactccttgtagtcatgctgttgcttacagcccggctgacactgagcagccccgcccctcctgcctgtgacctccgtgtattaagcaagctcttgagggatagccacgtgctccacagtcggctttcccaatgtccggaagtgcaccctctgccaaccccagtcttgttgccggccgtagacttcagtctaggcgaatggaagacccagatggaggagacgaaagctcaagatatcctaggggcagtgactctattactcgaaggcgtcatggcagcaagagggcaactcggacccacctgcctttcatctcttctgggccagctaagtgggcaggtgagattgctgttaggagcgctgcaatcattactcggaacccagctcccacctcagggacggacaacggcccacaaggatcccaacgctatatttctttcttttcaacacctgctccgagggaagacaagcggattgttggagactaacttcacagctagtgctagaaccaccggatctggacttttaaaatggcaacaaggattccgcgccaaaattcctggcctgctcaatcagacctcccgtagtttagatcagatccctgggtacctaaaccggatccacgagcttctgaacggcactcgtggactgtttcccgggccgagtcgcaggacactcggggcgcccgacatcagcagcgggaccagcgacacagggtctctcccgcccaacctccaaccgggttatagcccatcaccgacacatccacccaccggtcagtatacactctttcctcttccccctacactccccacgcctgttgtgcaactccaccccctcttacccgatccatctgcacctactcctactccaacctctcctcttctgaatacttcctacacccatagccagaatttgtcgcaggagggatag

SEQ ID NO: 108835 - DNA, 1062 bp, Artificial Sequence
  derived and/or modified sequence
atggaactgaccgagctgcttcttgtggtcatgcttttgctgactgccagactcacactctcctctcccgcacccccggcctgcgacctgcgcgtactttctaaactgctacgcgactcacatgtcctccattctcgactgtcccaatgtccggaggtccaccccctacctacccccgttctccttccagccgtagacttttccctgggagagtggaagacccagatggaagaaaccaaggctcaggatatactgggcgctgtcacacttctgttggaaggtgtaatggccgcccgaggccagctcggaccaacctgcctttcttcactcctcggacagctctccgggcaagtgcggctgctcttaggcgctctccaatcactgctgggcacgcagctacccccacaaggcaggaccactgcacacaaagatcccaacgctatcttcttgtctttccagcatttgttgcgaggtaaggttcggttcttaatgctggttgggggaagtactctttgtgtccgacgagccccacccaccaccgccgtcccgtctcggacctcactggtactgacattgaatgagctgcctaatcggacttcggggctccttgagactaactttaccgccagcgctcgtactactggaagtggactcctaaaatggcagcagggcttccgcgcgaagatacccggcctccttaatcaaacttcacgttcgctcgaccagattcccggttaccttaaccgtatacatgaattgctcaacggcacaagaggtctgttcccagggccgagtcgccgtacattgggagctcccgacatctcgagcggcacaagcgatacagggtcattacctcccaatctgcagcccggctactcaccttcacccactcatccccccaccggccagtacacattgttcccattaccacctacacttcctacccctgtcgtacagctccaccccctactccctgacccatccgccccaacaccgactccaacctctccactgctcaatacatcctatacccactcccagaatctgtcacaggagggctag

SEQ ID NO: 108836 - DNA, 945 bp, Artificial Sequence
  derived and/or modified sequence
atggaactgaccgaactcctgttggtggtcatgctgctgttgaccgcccgactgacacttagctctcccgctccaccagcctgcgaccttcgcgtactcagtaaactcctccgagactcccacgtgctccactcaagactgagccagtgtcccgaggtacacccgctgcccaccccagtcctcctgccagcagttgatttctctcttggagaatggaagacccagatggaagaaacaaaggcccaagacattctaggggctgttacccttttactcgagggagtcatggccgccagaggccaactcggacccacctgcctttcatctcttctgggccagctaagtgggcaggtgagattgctgttaggagcgctgcaatcattactcggaacccagctcccacctcagggacggacaacggcccacaaggatcccaacgctatatttctttcttttcaacacctgctccgagggaagacaagcggattgttggagactaacttcacagctagtgctagaaccaccggatctggacttttaaaatggcaacaaggattccgcgccaaaattcctggcctgctcaatcagacctcccgtagtttggatcaaatacccggctatttaaacagaatccacgagttactcaatgggacccgcggacttttcccagggcctagtagacgcacactgggcgcaccagacattagttctggaaccagcgacactgggtccctacctccaaatctgcagccagggtactccccatcccccacccacccacctactggacagtacacccttttcccactcccaccaactctgcctactcctgttgtgcaacttcatcccctcctgccagatccaagcgccccaactcccacaccaacaagtcccctgctaaatacatcatacacacactctcagaatctgtcccaggaaggctag

SEQ ID NO: 108837 - RNA, 1062 nt, Artificial Sequence
  derived and/or modified sequence
auggagcucacugaguuacuucuuguggugaugcuguuguuaacggcgagauugacccucucaucuccagccccacccgccugcgaccuuagggugcugaguaagcuucuuagagacucccauguacuacacagccgucucucccaaugucccgaggugcauccucuuccuacaccgguccugcugccagcugucgacuucagucugggagaauggaagacucagauggaggaaacgaaagcccaggauauacucggggcugugacccuucugcuggagggagucauggccgcucgaggccagcuggggccuaccuguuuauccagccuccucggccaauuguccggacaaguaagauuauugcuuggagccuuacagagucuccuggguacacagcuaccuccacaaggccgcacuaccgcucauaaagaccccaaugcuauuuuucugucauuccagcaucuguuaagaggaaaggucagguucuugaugcucguggggggcuccacucugugcguaaggcgagcccccccuaccacagcagugccaucucggaccucccuggugcuuacccucaaugaacugccuaacagaacauccggucucuuggagacaaacuuuacugccucugcucggacaaccggaucgggacugcugaaguggcagcagggcuuucgggccaaaauucccggacuacucaaucagacaucaaggaguuuggaccaaaucccgggguaccugaaucguauacaugagcuuuuaaacggcacucggggucuguuccccggccccucucgucguacacucggcgcccccgacauaucgucuggcacgucugacacagguucccugcccccuaacuugcagccuggcuacucucccuccccgacucaccccccaaccggacaguauacccuuuucccucugccacccacacugccaacuccagugguacaacuacacccauuguugccagauccuagugcacccacccccacccccacuuccccucugcuaaacacgaguuauacacacucucagaaccuuucccaagaagguuag

SEQ ID NO: 108838 - RNA, 1062 nt, Artificial Sequence
  derived and/or modified sequence
auggaacuuaccgaacugcuacuaguaguaauguuacuucugaccgcuaggcuuacucugucauccccagccccccccgccugugaucugaggguccuuuccaaacuccuccgggauagucacgugcugcacagucgacucucccagugcccagaagugcauccccugccuacucccguucuccuucccgccguggauuucucccugggagaauggaagacccagauggaggagacuaaagcccaagacauccugggugccguaacucugcuguuagaaggggugauggccgcgagagggcagcugggucccacuuguuugaguagucuguuaggucagcugagcggucaaguccgucugcuacugggcgcucuccagagucuucuaggcacccaacuaccaccucaaggacgcacaacugcucacaaagauccuaaugcaauuuuucucucauuucaacaccuccuucgggggaagguuagguuucuuaugcucgucggcggcagcacccugugcgugagaagagcgccaccuacgaccgcugucccuucgaggacaucccuuguauuaacccugaacgaauuaccuaaccggacuagcgggcugcuugaaaccaacuucacagcaucugcuagaacuacuggguccgggcugcugaaauggcaacaaggcuuccgcgccaagauuccuggccuguuaaaucaaaccucccgcucccucgaccagaucccuggcuacuugaaccgcauucacgaacuguuaaacggcacuagaggccuguuccccggaccuucacgcagaaccuuaggagccccugauaucuccucaggcacuuccgauacuggcucgcucccaccuaauuuacaaccgggcuacuccccaagccccacacacccaccuaccggccaauacacucuuuuuccacugccuccaacgcuccccacuccugucgugcagcuucaccccuuauuacccgaccccucugcucccacuccuacccccacaagcccccugcucaauaccuccuauacacauucucagaaucucagccaggaaggcuag

SEQ ID NO: 108839 - RNA, 1205 nt, Artificial Sequence
  derived and/or modified sequence
gggaaauaagagagaaaagaagaguaagaagaaauauaagagccaccauggagcuuacggagcugcuccuugucgucauguugcugcugacggcgcgauugacacucucauccccugcaccucccgcgugcgacuugcggguccugucgaaguuguugcgagacucgcaugugcuccacucacgguugucgcaguguccagaggugcacccauugcccaccccgguguugcucccggcuguggauuucucgcuuggagaguggaaaacgcaaauggaagaaacuaaggcccaagacaucuugggagcggugacacuucuccucgaaggggugauggcugcaaggggucaauugggucccacaugccucuccagccucuuggggcagcuuuccggucaggugcggcuucugcuuggugcgcugcagagccugcuuggaacucaguugccaccgcaggggcgcacuaccgcgcacaaagaccccaacgccaucuuucuuuccuuucagcacuuguugcgcgguaaaguacgauuucucaugcucgucgguggcucgacacuuugugucagaagagcaccucccacaaccgcagugcccucccggacaagccuuguacugacgcucaacgagcuuccgaauaggacaagcgggcuccucgaaacuaacuuuacggcgucggccaggacgacgggaucaggccuucucaaguggcagcagggauuccgcgccaagaucccugguuuguugaaccagacaucgaggucauuggaucagauucccggguaucuuaauaggauucacgagcuucugaauggaacgagagggcuguucccgggaccauccagacggacgcucggagcccccgauaucucgucggggacgagcgacacagggucacugccucccaaucugcagccagguuacucgccuucccccacgcaucccccgacgggacaauacacgcucuucccccuuccgccuacacugccuaccccgguaguacagcuccauccguugcugcccgauccaucagcgccgacccccacacccaccagcccgcuucucaacacuucauauacgcauagccagaaccucucgcaagaaggauaaugagcugccuucugcggggcuugccuucuggccaugcccuucuucucucccuugcaccuguaccucuuggucuuugaauaaagccugaguaggaag

SEQ ID NO: 108840 - RNA, 1062 nt, Artificial Sequence
  derived and/or modified sequence
auggagcucaccgagcugcugcuuguggucaugcuucugcugacagccagacugacccugucaucccccgcuccgccagccugugaucugcgcguacugagcaaacugcucagagauagccauguacugcauucuagauugagccaauguccagaggugcauccacuuccaacgcccguucuucuccccgcugucgauuuuucucugggagaauggaagacccagauggaagagaccaaggcccaggauauucugggagccguuacccucuuacuugaaggagugauggcugcaaggggucagcuugguccuacaugucucucaagccugcucggccagcucucaggucagguccgguuauuacuuggagcacugcagagccugcuaggcacacagcugccaccacagggccggaccaccgcacacaaagauccuaaugcuauauucuuaucauuucagcaucugcuaaggggaaaggugcgcuuccuaaugcuggugggggguaguacccucugcgugcgucgcgcccccccuaccacugcagugccaagccgcacuagccuuguguugacacugaacgaacuaccaaaucgcacaagcggucuuuuggagaccaauuuuacagcuagcgcuagaacaacaggauccgggcuucucaaauggcagcagggcuuccgcgcuaaaauccccggccuccugaaucaaacaaguagaucuuuggaccagauuccgggcuaucugaauagaauacacgaacuucuuaaugguacccggggacucuucccggguccuagucgcagaacccuuggugcaccugauauuucuuccggcacuucagauacgggaaguuugcccccuaaccugcagcccggauauagccccucaccaacccaucccccuacuggucaguauacucuguuuccguugccacccacccuuccaacucccgucguucagcugcauccacuacuuccggaucccuccgcucccaccccaaccccaacaucuccuuuauugaauacauccuacacucacucacagaaucugagucaggaaggcuag

SEQ ID NO: 108841 - RNA, 945 nt, Artificial Sequence
  derived and/or modified sequence
auggaacuuacugagcuacuccuuguagucaugcuguugcuuacagcccggcugacacugagcagccccgccccuccugccugugaccuccguguauuaagcaagcucuugagggauagccacgugcuccacagucggcuuucccaauguccggaagugcacccucugccaaccccagucuuguugccggccguagacuucagucuaggcgaauggaagacccagauggaggagacgaaagcucaagauauccuaggggcagugacucuauuacucgaaggcgucauggcagcaagagggcaacucggacccaccugccuuucaucucuucugggccagcuaagugggcaggugagauugcuguuaggagcgcugcaaucauuacucggaacccagcucccaccucagggacggacaacggcccacaaggaucccaacgcuauauuucuuucuuuucaacaccugcuccgagggaagacaagcggauuguuggagacuaacuucacagcuagugcuagaaccaccggaucuggacuuuuaaaauggcaacaaggauuccgcgccaaaauuccuggccugcucaaucagaccucccguaguuuagaucagaucccuggguaccuaaaccggauccacgagcuucugaacggcacucguggacuguuucccgggccgagucgcaggacacucggggcgcccgacaucagcagcgggaccagcgacacagggucucucccgcccaaccuccaaccggguuauagcccaucaccgacacauccacccaccggucaguauacacucuuuccucuucccccuacacuccccacgccuguugugcaacuccacccccucuuacccgauccaucugcaccuacuccuacuccaaccucuccucuucugaauacuuccuacacccauagccagaauuugucgcaggagggauag

SEQ ID NO: 108842 - RNA, 1062 nt, Artificial Sequence
  derived and/or modified sequence
auggaacugaccgagcugcuucuuguggucaugcuuuugcugacugccagacucacacucuccucucccgcacccccggccugcgaccugcgcguacuuucuaaacugcuacgcgacucacauguccuccauucucgacugucccaauguccggagguccacccccuaccuacccccguucuccuuccagccguagacuuuucccugggagaguggaagacccagauggaagaaaccaaggcucaggauauacugggcgcugucacacuucuguuggaagguguaauggccgcccgaggccagcucggaccaaccugccuuucuucacuccucggacagcucuccgggcaagugcggcugcucuuaggcgcucuccaaucacugcugggcacgcagcuacccccacaaggcaggaccacugcacacaaagaucccaacgcuaucuucuugucuuuccagcauuuguugcgagguaagguucgguucuuaaugcugguugggggaaguacucuuuguguccgacgagccccacccaccaccgccgucccgucucggaccucacugguacugacauugaaugagcugccuaaucggacuucggggcuccuugagacuaacuuuaccgccagcgcucguacuacuggaaguggacuccuaaaauggcagcagggcuuccgcgcgaagauacccggccuccuuaaucaaacuucacguucgcucgaccagauucccgguuaccuuaaccguauacaugaauugcucaacggcacaagaggucuguucccagggccgagucgccguacauugggagcucccgacaucucgagcggcacaagcgauacagggucauuaccucccaaucugcagcccggcuacucaccuucacccacucauccccccaccggccaguacacauuguucccauuaccaccuacacuuccuaccccugucguacagcuccacccccuacucccugacccauccgccccaacaccgacuccaaccucuccacugcucaauacauccuauacccacucccagaaucugucacaggagggcuag

SEQ ID NO: 108843 - RNA, 945 nt, Artificial Sequence
  derived and/or modified sequence
auggaacugaccgaacuccuguugguggucaugcugcuguugaccgcccgacugacacuuagcucucccgcuccaccagccugcgaccuucgcguacucaguaaacuccuccgagacucccacgugcuccacucaagacugagccagugucccgagguacacccgcugcccaccccaguccuccugccagcaguugauuucucucuuggagaauggaagacccagauggaagaaacaaaggcccaagacauucuaggggcuguuacccuuuuacucgagggagucauggccgccagaggccaacucggacccaccugccuuucaucucuucugggccagcuaagugggcaggugagauugcuguuaggagcgcugcaaucauuacucggaacccagcucccaccucagggacggacaacggcccacaaggaucccaacgcuauauuucuuucuuuucaacaccugcuccgagggaagacaagcggauuguuggagacuaacuucacagcuagugcuagaaccaccggaucuggacuuuuaaaauggcaacaaggauuccgcgccaaaauuccuggccugcucaaucagaccucccguaguuuggaucaaauacccggcuauuuaaacagaauccacgaguuacucaaugggacccgcggacuuuucccagggccuaguagacgcacacugggcgcaccagacauuaguucuggaaccagcgacacugggucccuaccuccaaaucugcagccaggguacuccccaucccccacccacccaccuacuggacaguacacccuuuucccacucccaccaacucugccuacuccuguugugcaacuucauccccuccugccagauccaagcgccccaacucccacaccaacaaguccccugcuaaauacaucauacacacacucucagaaucugucccaggaaggcuag

SEQ ID NO: 108844 - protein, 246 aa, Artificial Sequence
  derived and/or modified sequence
MIKKFDKKDEESGSGSNPFQHLEKSAVLQEARIFNETPINPRRCLHILTKILYLLNQGEHFGTTEATEAFFAMTRLFQSNDQTLRRMCYLTIKEMATISEDVIIVTSSLTKDMTGKEDVYRGPAIRALCRITDGTMLQAIERYMKQAIVDKVSSVSSSALVSSLHMMKISYDVVKRWINEAQEAASSDNIMVQYHALGVLYHLRKNDRLAVSKMLNKFTKSGLKSQFAYCMLIRIASRLLKETEDG

SEQ ID NO: 108845 - DNA, 741 bp, Artificial Sequence
  derived and/or modified sequence
atgataaagaagtttgataaaaaagatgaggagtccggctcaggctccaatccctttcagcacctcgaaaagagtgccgtgcttcaggaggcaaggatctttaacgagacccccataaatccccggaggtgcctccatatcctgaccaaaattctgtacctgcttaaccagggggagcattttggtaccaccgaggcaactgaagcgttttttgctatgactcgcttgtttcagagtaatgaccagaccctgagacgcatgtgctatctcaccatcaaagaaatggcgacaatcagtgaagacgtaattatcgttacctcctccctcacgaaggacatgaccggcaaagaagacgtttacagaggacctgcgattagagcattgtgccgcatcactgacggcacaatgctccaggcgattgaaagatacatgaagcaggccattgtagacaaggtctcaagcgtctccagcagcgcccttgtgagttcgctccacatgatgaaaattagctacgacgtcgtcaagagatggattaatgaagcccaggaggcagcctccagcgacaacatcatggtgcaataccatgcactcggggtcctgtatcatctgcgcaagaatgaccgcctggctgtcagcaagatgttaaataagttcaccaagtctggcctcaagtcccagtttgcttactgcatgctaattcgcatcgccagccggcttctcaaggagacggaggatgggtag

SEQ ID NO: 108846 - DNA, 741 bp, Artificial Sequence
  derived and/or modified sequence
atgattaaaaagtttgataaaaaggatgaggagtcaggttcgggcagtaatcctttccagcatttggaaaagtctgccgtcctgcaggaagcacgaatcttcaacgagactcctattaatcccagacggtgtctccatatattgacgaaaatcctatacctcttgaatcagggggagcattttggaaccacggaggccacagaggcattcttcgcgatgactagactatttcagagcaatgatcaaactctgagacggatgtgctacctgaccattaaagaaatggccaccattagcgaggatgtcattatcgtgacttcgtccctaacgaaggacatgacaggcaaagaggatgtgtacagaggaccagctattagagccctgtgtaggatcacggacggtacaatgctgcaggccatcgaacgctatatgaaacaggcgatcgttgacaaggtctcttccgtttcatcaagcgcgcttgtaagtagcctgcacatgatgaagatcagttacgatgttgtgaaaagatggatcaacgaagctcaggaggccgcgtcttctgacaatattatggtgcagtaccatgccctgggagtgttgtatcatctgcggaagaacgaccgtctcgctgtgagcaaaatgctgaacaaatttactaagagtgggctaaagtcacagtttgcttactgcatgttgatcagaattgccagtaggctcctcaaggaaacagaggacgggtag

SEQ ID NO: 108847 - DNA, 741 bp, Artificial Sequence
  derived and/or modified sequence
atgatcaagaagtttgacaagaaggatgaggagagcggcagcggcagcaaccccttccagcacctggagaagtctgctgtgctgcaggaggcccgcatcttcaatgagacccccatcaacccccggcgctgcctgcacatcctgaccaagatcctgtacctgctgaaccagggcgagcacttcggcaccacagaggccacagaggccttctttgccatgaccaggctcttccagagcaatgaccagaccctgcggaggatgtgctacctgaccatcaaggagatggccaccatcagtgaagatgtgatcatcgtgaccagcagcctgaccaaggacatgaccgggaaggaggatgtgtaccggggccctgccatccgggccctgtgccgcatcacagatggcaccatgctgcaggccatcgagcgctacatgaagcaggccatcgtggacaaggtgtcctctgtgagcagcagcgccctggtgagcagcctgcacatgatgaagatctcctatgatgtggtgaagcgctggatcaatgaggcccaggaggccgccagcagtgacaacatcatggtgcagtaccacgccctgggcgtgctgtaccacctgaggaagaatgaccggctggccgtgtccaagatgctgaacaagttcaccaagagcggcctgaagagccagtttgcctactgcatgctgatcagaattgccagccggctgctgaaggagacagaagatggatag

SEQ ID NO: 108848 - DNA, 741 bp, Artificial Sequence
  derived and/or modified sequence
atgatcaagaagttcgacaagaaggacgaggagagcggcagcggctccaacccttttcagcacctcgagaaatccgccgtgctgcaggaggcgaggatatttaacgaaacacctatcaacccacgaagatgtctacatattctgactaagatcctatatctgcttaatcaaggggagcatttcggcaccacagaggcgactgaggctttcttcgcaatgaccagattgttccagagcaatgatcagacactgagacgcatgtgctatttgacgatcaaagagatggcaacaataagcgaagacgtaattatcgtaactagcagtctgacaaaggatatgactggtaaggaggatgtgtataggggcccagctattagggccctgtgcaggattaccgacgggacaatgcttcaggccatcgagcgttacatgaagcaggctatcgtggacaaggtgtcctctgtgtcctctagcgccctagtctctagcctccatatgatgaagatctcttacgatgtagttaaacggtggataaacgaagcccaggaggccgcctcctccgacaacattatggtccagtatcacgcgctgggggtcctgtaccatctaaggaaaaatgatcgtctggcagtgtcaaaaatgctgaacaagtttactaaatccggacttaagtcccagtttgcatattgtatgttgatcagaatcgctagcaggttgctcaaggagactgaggacgggtag

SEQ ID NO: 108849 - DNA, 741 bp, Artificial Sequence
  derived and/or modified sequence
atgatcaagaagttcgacaagaaggacgaggagagcggcagcggctcaaatccattccagcatctggagaagagcgccgtgcttcaggaggcccgaatcttcaatgaaacaccaatcaatcccagacgttgtctgcatattttgaccaagatcctgtatttacttaatcaaggcgaacatttcggaacaacggaggctaccgaagctttctttgccatgacgaggttgttccaatctaacgaccagaccctcaggaggatgtgctatcttaccataaaagaaatggccaccatttccgaggatgtcatcatcgtgaccagtagtctgactaaagatatgactggtaaggaagacgtttataggggccctgctattagagctttatgtcgaattactgacgggacaatgcttcaggcaattgaacgatacatgaaacaagccatcgtggacaaagtgagcagcgtctctagttcggccctggtaagcagcttgcacatgatgaaaatctcttacgacgtggtgaaaaggtggattaacgaagcccaagaagccgcttcctccgacaacatcatggtgcagtaccacgcgctgggagttttgtaccatttgcgaaagaatgacaggttggccgtgtcaaaaatgcttaacaaatttactaaaagcgggctgaagtcacagtttgcttactgcatgctgatcagaattgccagccgactacttaaagagacggaagatggatag

SEQ ID NO: 108850 - DNA, 741 bp, Artificial Sequence
  derived and/or modified sequence
atgattaagaagttcgataagaaggacgaggagtcagggagtggatctaatcccttccagcatttggagaagtccgcagtgctgcaggaagcacgcattttcaatgaaacacccatcaaccctcgcaggtgtcttcacatcttaacaaagattctgtatctcctgaaccagggcgagcatttcggcaccactgaggccacagaagctttctttgccatgacgaggctcttccagtcaaacgaccagacccttagaaggatgtgttatttaactatcaaagaaatggccactatatccgaggatgtgatcattgttactagctcattaactaaagatatgacaggcaaggaggatgtgtacaggggccctgctatcagggcgctctgtagaattaccgacggtacaatgctgcaggctatagaacgctacatgaagcaggcgatagtggataaggttagctccgtttcgtcatcagcactggtgtcatctctgcacatgatgaaaatctcctacgatgttgtcaaacgctggataaacgaggctcaagaagccgctagctccgataatatcatggtgcagtatcatgcccttggcgtactgtatcatctccggaagaatgataggctggccgttagcaagatgctcaataagtttactaagtctggtctgaagagtcaattcgcctattgcatgcttattaggattgccagtaggctactgaaagaaactgaagatgggtag

SEQ ID NO: 108851 - DNA, 741 bp, Artificial Sequence
  derived and/or modified sequence
atgattaagaagttcgataaaaaggatgaggagtcaggatccgggtcaaatccgtttcagcatctcgaaaagagcgcggtcttacaggaagctcgcatctttaacgagaccccaattaatccacgcaggtgcctccacatcttaaccaagattctctatttgctgaaccaaggcgaacacttcggaacgaccgaagccacagaggcattttttgctatgacgcgcctgttccagtcaaatgatcaaacgctgaggagaatgtgttacctgacaatcaaggaaatggctaccatttccgaagacgtgatcatcgtgacatcatctctaactaaggacatgactggtaaggaggatgtctaccggggtcccgctatacgtgcactgtgtcgaataaccgacggcacaatgcttcaggccatagagcgctacatgaagcaggccatcgtcgacaaggtgagttccgtgagtagctctgcccttgtttcttctctccacatgatgaaaattagttatgatgtggtgaagaggtggataaacgaggctcaggaggcagcttcctccgacaacataatggtgcagtatcacgccctgggggtgctgtatcacctgagaaagaacgaccgcctggcagtgtccaagatgctgaataaatttacaaagtccggcctaaagtcccagttcgcttactgtatgttaataaggatcgcttcacgcctgttgaaggagacagaggatggttag

SEQ ID NO: 108852 - DNA, 792 bp, Artificial Sequence
  derived and/or modified sequence
ggctgcggcgcctgggacggttgcggtgggtctgggcgctgggaagtcgtccaagatgattaaaaaattcgacaagaaggacgaggagtctggtagtggctccaatcctttccagcatctggagaagagtgctgttttacaggaggctcgtatattcaatgaaactccaatcaatccaagaagatgtttgcatattcttacaaagattctttacttactgaaccagggtgaacactttggaacaacggaagctacagaagccttctttgcaatgacgcgattgtttcaatctaatgatcaaacattgaggagaatgtgctaccttaccatcaaagaaatggctaccatctctgaggatgtgataattgtcacaagcagtctgactaaagacatgactggaaaagaagatgtataccgaggcccggccatcagagctctctgcaggatcaccgatggaacaatgttgcaagccattgaaagatacatgaagcaggccattgtggataaagtttccagtgtatccagttcagcactggtatcttccctgcacatgatgaagataagctatgatgtggttaagcgctggatcaatgaagcccaagaagctgcatcaagtgataatattatggtccagtaccatgcattgggagtcctgtatcaccttagaaagaatgatcgacttgctgtttccaagatgttgaataagtttactaaatctggtctcaagtcacagtttgcttactgcatgctgatccgaattgccagtcgcttactaaaagaaactgaggatgg

SEQ ID NO: 108853 - DNA, 831 bp, Artificial Sequence
  derived and/or modified sequence
cggggccggccttcctgcagcctcttccgctcgccggctgcggcgcctgggacggttgcggtgggtctgggcgctgggaagtcgtccaagatgattaaaaaattcgacaagaaggacgaggagtctggtagtggctccaatcctttccagcatctggagaagagtgctgttttacaggaggctcgtatattcaatgaaactccaatcaatccaagaagatgtttgcatattcttacaaagattctttacttactgaaccagggtgaacactttggaacaacggaagctacagaagccttctttgcaatgacgcgattgtttcaatctaatgatcaaacattgaggagaatgtgctaccttaccatcaaagaaatggctaccatctctgaggatgtgataattgtcacaagcagtctgactaaagacatgactggaaaagaagatgtataccgaggcccggccatcagagctctctgcaggatcaccgatggaacaatgttgcaagccattgaaagatacatgaagcaggccattgtggataaagtttccagtgtatccagttcagcactggtatcttccctgcacatgatgaagataagctatgatgtggttaagcgctggatcaatgaagcccaagaagctgcatcaagtgataatattatggtccagtaccatgcattgggagtcctgtatcaccttagaaagaatgatcgacttgctgtttccaagatgttgaataagtttactaaatctggtctcaagtcacagtttgcttactgcatgctgatccgaattgccagtcgcttactaaaagaaactgaggatgggtaa

SEQ ID NO: 108854 - DNA, 741 bp, Artificial Sequence
  derived and/or modified sequence
atgatcaagaagttcgacaagaaggacgaggagagcggcagcggcagcaaccccttccagcacctggagaagagcgccgtgctgcaggaggccagaatcttcaacgagacccccatcaaccccagaagatgcctgcacatcctgaccaagatcctgtacctgctgaaccagggcgagcacttcggcaccaccgaggccaccgaggccttcttcgccatgaccagactgttccagagcaacgaccagaccctgagaagaatgtgctacctgaccatcaaggagatggccaccatcagcgaggacgtgatcatcgtgaccagcagcctgaccaaggacatgaccggcaaggaggacgtgtacagaggccccgccatcagagccctgtgcagaatcaccgacggcaccatgctgcaggccatcgagagatacatgaagcaggccatcgtggacaaggtgagcagcgtgagcagcagcgccctggtgagcagcctgcacatgatgaagatcagctacgacgtggtgaagagatggatcaacgaggcccaggaggccgccagcagcgacaacatcatggtgcagtaccacgccctgggcgtgctgtaccacctgagaaagaacgacagactggccgtgagcaagatgctgaacaagttcaccaagagcggcctgaagagccagttcgcctactgcatgctgatcagaatcgccagcagactgctgaaggagaccgaggacggctag

SEQ ID NO: 108855 - protein, 112 aa, Artificial Sequence
  derived and/or modified sequence
MTIRFLRQVAFYFLEAGLKEAEIYQTPRHRVIGAGKKITLECSQTMGHDKMYWSRSRNGITPHPPFLWVNSTEKGDLCSESTVSRIRIERFPLTLESASPSHTSQYLCASSE

SEQ ID NO: 108856 - DNA, 1713 bp, Artificial Sequence
  derived and/or modified sequence
atgagtacagacgagggcacgtacatgtgcattgccgaaaaccgtgtgggaaaaatggaggcatcagctactttgactgtccgcggcggcgttatagccccacctcagtttgtggtccgtcctcgggatcaaatcgtagcacagggcagaaccgtcacctttccgtgcgaaaccaaggggaatccccagcctgccgttttctggcagaaagagggatctcagaacctgttattccccaaccagccccaacaaccaaattctagatgtagtgtgtctcccactggggacttgacgattaccaacattcaaagatccgacgcagggtattacatatgtcaggccctgaccgtcgcaggcagcatccttgctaaagcacagttagaagttacagacgttttgacagaccgaccgccaccgataattctacaggggcctgccaatcagactctggctgtggatggcaccgcattactgaaatgtaaggccacaggcgaccctttgcctgtgatatcttggctcaaagaggggttcacttttcccggccgcgatccgcgggccaccatccaagaacagggaaccctgcagatcaagaatctcaggatctcagacacaggcacatacacctgcgtggccacctcctcgtcaggggagacatcctggagcgcagtcctggatgttaccgaatcgggagctaccatcagtaaaaactacgacctgtctgatctaccaggtcctcctagtaagccccaggtgactgatgtaactaagaactctgtgaccctgtcctggcagccaggcacgccagggaccctccctgctagcgcctatatcattgaggccttttcgcagagcgtttcgaactcttggcaaacagtggccaaccacgttaagactaccctgtatacagtcagaggcttgcggccaaacactatctacctctttatggtgagagcgataaatccccagggacttagtgatccttcacccatgagtgacccagtgcgaacacaggacatctcgccaccggcacagggagtcgatcatcggcaggtgcagaaggaacttggcgatgtcttggtgagacttcataatcccgtggtactcacccctaccaccgttcaggtgacatggacggtagatcgacagccccagttcatccagggctacagagttatgtatagacagacttcaggcctgcaggctactagttcctggcagaatctggatgctaaggttcccacagagcggagcgctgtactggtaaacttaaagaagggggtcacctatgaaattaaagttagaccatacttcaacgaatttcaggggatggatagtgaatctaagacagtcagaacaactgaggaggcgccatcagccccaccccagagtgtaactgtgctcaccgttggaagctataacagcacctctatttcagtgtcctgggatccgcctccccctgaccaccagaacgggataatacaggagtacaagatctggtgtctgggaaatgagacgagatttcacattaataaaacggtggacgcggcaattcggagtgtcatcatcgggggcctgtttcccggcatccagtaccgggttgaagtggcagctagcaccagcgccggagtgggtgttaagagcgaaccacagccaaacaataccggctaccccatatgccacgacactgaccttgcattccagcagcacacctag

SEQ ID NO: 108857 - DNA, 1713 bp, Artificial Sequence
  derived and/or modified sequence
atgagcacagatgagggcacctacatgtgcatcgcagaaaatagagtgggcaagatggaggccagcgccaccctgactgtgcggggcggcgtcatcgccccaccccagtttgtggtgcggccccgggaccagatcgtggcccagggccgcacagtgaccttcccctgtgagaccaagggcaacccccagcctgctgtgttctggcagaaggagggcagccagaacctgctcttccccaaccagccccagcagcccaacagccgctgcagcgtgagccccaccggggacctgaccatcaccaacatccagaggagtgatgctggctactacatctgccaggccctgactgtggccggcagcatcctggccaaggcccagctggaggtgacagatgtgctgacagaccggcccccacccatcatcctgcagggccctgccaaccagaccctggccgtggatggaacagccctgctgaagtgcaaggccactggagaccccctgcccgtcatctcctggctgaaggagggcttcaccttccctggccgggacccccgggccaccatccaggagcagggcaccctgcagatcaagaacctgcgcatcagtgacaccggcacctacacctgtgtggccaccagcagcagtggagagacctcctggagcgctgtgctggatgtgacagaaagtggggccaccatcagcaagaactatgacctgagtgacctgcccggcccccccagcaagccccaggtgacagatgtgaccaagaacagcgtgaccctgtcctggcagcccggcaccccaggcaccctgcctgccagcgcctacatcatcgaggccttcagccagagcgtgagcaacagctggcagacagtggccaaccacgtgaagaccaccctgtacacagtgcggggcctgcggcccaacaccatctacctgttcatggtgcgggccatcaacccccagggcctgagtgaccccagccccatgtctgaccctgtgaggacccaggacatcagccccccagcccagggcgtggaccaccggcaggtgcagaaggagctgggagatgtgctggtgcggctgcacaaccctgtggtgctgacccccaccaccgtgcaggtgacctggacagtggaccggcagccccagttcatccagggctacagagtgatgtaccggcagaccagcggcctgcaggccaccagctcctggcagaacctggatgccaaggtgcccacagagaggtctgctgtgctggtgaacctgaagaagggcgtgacctatgagatcaaggtgcggccctacttcaatgagttccagggcatggattctgagagcaagacagtgaggaccacagaggaggcccccagcgccccaccccagagcgtgacagtgctgactgtgggcagctacaacagcaccagcatctctgtgtcctgggaccccccacctccagaccaccagaatggcatcatccaggagtacaagatctggtgcctgggcaatgagacccgcttccacatcaacaagacagtggatgctgccatccgcagcgtcatcatcggcggcctcttccctggcatccagtacagagtggaggtggccgccagcaccagcgctggggtgggcgtgaagtctgagccccagcccaacaacacaggctaccccatctgccacgacacagacctggccttccagcagcacacctag

SEQ ID NO: 108858 - DNA, 1713 bp, Artificial Sequence
  derived and/or modified sequence
atgagcaccgacgagggcacctacatgtgcatcgccgagaaccgggtgggtaaaatggaggcctccgctaccctaacggtgcgcggtggagtgatagctccacctcagttcgtggttcggcccagggatcagatagttgcacaagggaggaccgtgacattcccctgcgaaacgaagggcaatcctcagccagcagtattttggcagaaggaaggttcgcaaaacctgctgtttccgaatcagcctcagcagccgaacagccggtgctctgtatcccccacaggcgacctgactattaccaatatacagcggtcagacgccggctattacatatgtcaggcccttacagtcgctgggtcgattctcgccaaggcccagctggaagtaactgatgttctgaccgaccggcctcctccaatcatactacaggggccagctaaccagactctggccgttgacggaacagccctgctaaaatgtaaggccaccggcgaccctctgccggtgatttcctggctcaaggagggatttacattcccaggtagggaccccagagctacaatacaagaacagggcaccctgcagataaagaaccttcgtatctctgatacaggaacatatacatgtgtggcaacctcttcctcgggtgagacctcttggagcgccgtcttagatgtgacagagagcggggccacgatcagtaagaattatgatttaagcgatctgcccgggccaccctctaagccccaggtcaccgatgttactaaaaacagtgtgaccctaagctggcagcccggcacaccaggcacccttcctgccagcgcgtacatcatcgaggctttctcccagtcggtgagcaactcctggcagacagtggctaaccacgtcaagacaacactgtacaccgtacggggcttaagaccaaatactatatatctctttatggtgcgcgccatcaatccacagggcctgagtgacccctcccctatgtccgacccggtgcggacacaggacatcagccctccagcgcagggcgtagaccatcgccaagtgcaaaaagaactgggagacgtgctcgttcgcctgcacaatcccgtcgtgttgacgccaacgactgtgcaggtgacatggacagttgatagacagccccagtttatccagggttaccgtgtgatgtacagacagacgtcagggctgcaggccactagctcctggcagaatctcgacgccaaggtccccactgagcgatccgcggtgctggtcaatctaaagaaaggagttacttacgagatcaaggtccgcccctatttcaatgaattccagggaatggattctgaaagtaagacagtgcgtacaacagaggaggctcctagtgcaccgccgcaatcagtcaccgttctaacagtgggctcctacaactcgacatctatttccgtgagttgggatccgcctcctcccgaccaccaaaatggaatcattcaggaatataaaatctggtgtctgggcaacgaaactcgatttcatatcaataaaaccgttgacgccgcgatccggagtgtgataatcggggggctttttcctggtatccaatatcgagtggaggtggccgcaagcaccagtgcaggcgtgggcgtcaagtctgagcctcagcctaacaataccggctaccctatttgtcatgacaccgatcttgctttccagcagcacacatag

SEQ ID NO: 108859 - DNA, 1713 bp, Artificial Sequence
  derived and/or modified sequence
atgtcgacagacgagggaacttatatgtgcatcgctgaaaaccgtgtcggtaaaatggaggcctcggcgaccctgactgtgcggggtggggtcatcgcacctcctcagttcgtagtccgccctcgcgaccagatcgttgcacagggcaggacagtcacattcccttgtgagaccaagggcaatccccagcctgcagtgttctggcagaaggaaggctcccagaacctgttattccccaatcagccacagcagcccaatagccgatgttccgtgtctcccaccggagatctgacaatcaccaatattcagagaagcgacgcgggatactacatctgtcaagctctcactgtggccggatccatcttggctaaagcacagttggaggtcacggatgtcctgaccgacaggcccccacctattattctgcaaggccctgctaatcaaaccctggccgtcgacggcactgccctgctgaaatgcaaggcgaccggggacccgttgccggtgattagttggcttaaggagggcttcacctttcctggcagagaccccagggcaactatacaagaacaggggactctgcagatcaagaacttgcgcatcagtgacacaggaacctatacatgcgtggcaacgtcaagctctggggagacatcttggtctgccgtgctggatgttaccgagtctggcgctactattagcaagaactacgacctgtccgatctgcccggtccaccctcaaaacctcaggttaccgatgtgaccaaaaacagcgtgacgctttcatggcagcctgggaccccagggacactgcccgcttctgcatatattattgaggcgttctcccaaagtgtgagcaattcctggcagacagtggctaaccatgttaagaccactctctatactgttcgcggactgcgaccgaacactatttacctgtttatggttcgggctatcaacccgcaggggctgagcgacccctcccccatgtcagatccagtccggacccaagatatctccccgccagctcagggtgttgatcatcggcaagtccagaaggagctgggcgacgtgttagttcggttacataacccggttgtgctgacccccaccacagtgcaggtcacttggaccgtcgatcgccagccacagtttatccaaggctaccgagtaatgtaccgccagacatcgggcttacaggctactagttcttggcagaacctggatgcaaaagtgccaacggaacggtctgcagtcctggtgaatctcaaaaagggcgtgacctacgagattaaagtgaggccctatttcaatgaattccaggggatggattcagagtcaaaaaccgtccgtactactgaagaggccccatcggctccccctcagtccgtgacagtcctaactgtcggctcttataactcaacctcaatcagcgtgagctgggatcccccacctcccgatcatcagaacggtatcatacaggaatacaagatctggtgcctcgggaatgagacaaggtttcatatcaacaagaccgtggatgcagctataaggagcgtaattataggcggactcttccctggcatccaataccgggtcgaggtggctgcgtctacctccgccggtgtgggcgtcaaatcagagcctcagcccaacaacaccggataccctatttgtcacgatacagatctggcctttcagcaacacacttag

SEQ ID NO: 108860 - DNA, 1722 bp, Artificial Sequence
  derived and/or modified sequence
aaaaagaccatgagtacagatgaaggcacctatatgtgtattgctgagaatcgggttggaaaaatggaagcctctgctacactcaccgtccgaggtggagttatagctcccccacagtttgtggttcggccaagagatcagattgttgctcaaggtcgaacagtgacatttccctgtgaaactaaaggaaacccacagccagctgttttttggcagaaagaaggcagccagaacctacttttcccaaaccaaccccagcagcccaacagtagatgctcagtgtcaccaactggagacctcacaatcaccaacattcaacgttccgacgcgggttactacatctgccaggctttaactgtggcaggaagcattttagcaaaagctcaactggaggttactgatgttttgacagatagacctccacctataattctacaaggcccagccaaccaaacgctggcagtggatggtacagcgttactgaaatgtaaagccactggtgatcctcttcctgtaattagctggttaaaggagggatttacttttccgggtagagatccaagagcaacaattcaagagcaaggcacactgcagattaagaatttacggatttctgatactggcacttatacttgtgtggctacaagttcaagtggagagacttcctggagtgcagtgctggatgtgacagagtctggagcaacaatcagtaaaaactatgatttaagtgacctgccagggccaccatccaaaccgcaggtcactgatgttactaagaacagtgtcaccttgtcctggcagccaggtacccctggaacccttccagcaagtgcatatatcattgaggctttcagccaatcagtgagcaacagctggcagaccgtggcaaaccatgtaaagaccaccctctatactgtaagaggactgcggcccaatacaatctacttattcatggtcagagcgatcaacccccaaggtctcagtgacccaagtcccatgtcagatcctgtgcgcacacaagatatcagcccaccagcacaaggagtggaccacaggcaagtgcagaaagagctaggagatgtccttgtccgtcttcataatccagttgtgctgactcccaccacggttcaggtcacatggacggttgatcgccaaccccagtttatccaaggctaccgagtgatgtatcgtcagacttcaggtctgcaggcgacatcttcgtggcagaatttagatgccaaagtcccgactgaacgaagtgctgtcttagtcaacctgaaaaagggggtgacttatgaaattaaagtacggccatattttaatgagttccaaggaatggatagtgaatctaaaacggttcgtactactgaagaagccccaagtgccccaccacagtctgtcactgtactgacagttggaagctacaatagcacaagtattagtgtttcctgggatcctcctcctccagatcaccagaatggaattatccaagaatacaagatctggtgtctaggaaatgaaacgcgattccatatcaacaaaactgtggatgcagccattcggtccgtaataattggtggattattcccaggtattcaataccgggtagaggttgcagctagtaccagtgcaggggttggagtaaagagtgagccacagccaaataacacaggctaccccatatgccacgacacagatcttgcattccaacagcatacatga

SEQ ID NO: 108861 - DNA, 1713 bp, Artificial Sequence
  derived and/or modified sequence
atgagcaccgacgagggcacctacatgtgcatcgccgagaacagagtgggcaagatggaggccagcgccaccctgaccgtgagaggcggcgtgatcgcccccccccagttcgtggtgagacccagagaccagatcgtggcccagggcagaaccgtgaccttcccctgcgagaccaagggcaacccccagcccgccgtgttctggcagaaggagggcagccagaacctgctgttccccaaccagccccagcagcccaacagcagatgcagcgtgagccccaccggcgacctgaccatcaccaacatccagagaagcgacgccggctactacatctgccaggccctgaccgtggccggcagcatcctggccaaggcccagctggaggtgaccgacgtgctgaccgacagacccccccccatcatcctgcagggccccgccaaccagaccctggccgtggacggcaccgccctgctgaagtgcaaggccaccggcgaccccctgcccgtgatcagctggctgaaggagggcttcaccttccccggcagagaccccagagccaccatccaggagcagggcaccctgcagatcaagaacctgagaatcagcgacaccggcacctacacctgcgtggccaccagcagcagcggcgagaccagctggagcgccgtgctggacgtgaccgagagcggcgccaccatcagcaagaactacgacctgagcgacctgcccggcccccccagcaagccccaggtgaccgacgtgaccaagaacagcgtgaccctgagctggcagcccggcacccccggcaccctgcccgccagcgcctacatcatcgaggccttcagccagagcgtgagcaacagctggcagaccgtggccaaccacgtgaagaccaccctgtacaccgtgagaggcctgagacccaacaccatctacctgttcatggtgagagccatcaacccccagggcctgagcgaccccagccccatgagcgaccccgtgagaacccaggacatcagcccccccgcccagggcgtggaccacagacaggtgcagaaggagctgggcgacgtgctggtgagactgcacaaccccgtggtgctgacccccaccaccgtgcaggtgacctggaccgtggacagacagccccagttcatccagggctacagagtgatgtacagacagaccagcggcctgcaggccaccagcagctggcagaacctggacgccaaggtgcccaccgagagaagcgccgtgctggtgaacctgaagaagggcgtgacctacgagatcaaggtgagaccctacttcaacgagttccagggcatggacagcgagagcaagaccgtgagaaccaccgaggaggcccccagcgcccccccccagagcgtgaccgtgctgaccgtgggcagctacaacagcaccagcatcagcgtgagctgggacccccccccccccgaccaccagaacggcatcatccaggagtacaagatctggtgcctgggcaacgagaccagattccacatcaacaagaccgtggacgccgccatcagaagcgtgatcatcggcggcctgttccccggcatccagtacagagtggaggtggccgccagcaccagcgccggcgtgggcgtgaagagcgagccccagcccaacaacaccggctaccccatctgccacgacaccgacctggccttccagcagcacacctag

SEQ ID NO: 108862 - protein, 686 aa, Artificial Sequence
  derived and/or modified sequence
MRLPDLRPWTSLLLVDAALLWLLQGPLGTLLPQGLPGLWLEGTLRLGGLWGLLKLRGLLGFVGTLLLPLCLATPLTVSLRALVAGASRAPPARVASAPWSWLLVGYGAAGLSWSLWAVLSPPGAQEKEQDQVNNKVLMWRLLKLSRPDLPLLVAAFFFLVLAVLGETLIPHYSGRVIDILGGDFDPHAFASAIFFMCLFSFGSSLSAGCRGGCFTYTMSRINLRIREQLFSSLLRQDLGFFQETKTGELNSRLSSDTTLMSNWLPLNANVLLRSLVKVVGLYGFMLSISPRLTLLSLLHMPFTIAAEKVYNTRHQEVLREIQDAVARAGQVVREAVGGLQTVRSFGAEEHEVCRYKEALEQCRQLYWRRDLERALYLLVRRVLHLGVQMLMLSCGLQQMQDGELTQGSLLSFMIYQESVGSYVQTLVYIYGDMLSNVGAAEKVFSYMDRQPNLPSPGTLAPTTLQGVVKFQDVSFAYPNRPDRPVLKGLTFTLRPGEVTALVGPNGSGKSTVAALLQNLYQPTGGQVLLDEKPISQYEHCYLHSQVVSVGQEPVLFSGSVRNNIAYGLQSCEDDKVMAAAQAAHADDFIQEMEHGIYTDVGEKGSQLAAGQKQRLAIARALVRDPRVLILDEATSALDVQCEQALQDWNSRGDRTVLVIAHRLQTVQRAHQILVLQEGKLQKLAQL

SEQ ID NO: 108863 - protein, 686 aa, Artificial Sequence
  derived and/or modified sequence
MRLPDLRPWTSLLLVDAALLWLLQGPLGTLLPQGLPGLWLEGTLRLGGLWGLLKLRGLLGFVGTLLLPLCLATPLTVSLRALVAGASRAPPARVASAPWSWLLVGYGAAGLSWSLWAVLSPPGAQEKEQDQVNNKVLMWRLLKLSRPDLPLLVAAFFFLVLAVLGETLIPHYSGRVIDILGGDFDPHAFASAIFFMCLFSFGSSLSAGCRGGCFTYTMSRINLRIREQLFSSLLRQDLGFFQETKTGELNSRLSSDTTLMSNWLPLNANVLLRSLVKVVGLYGFMLSISPRLTLLSLLHMPFTIAAEKVYNTRHQEVLREIQDAVARAGQVVREAVGGLQTVRSFGAEEHEVCRYKEALEQCRQLYWRRDLERALYLLIRRVLHLGVQMLMLSCGLQQMQDGELTQGSLLSFMIYQESVGSYVQTLVYIYGDMLSNVGAAEKVFSYMDRQPNLPSPGTLAPTTLQGVVKFQDVSFAYPNRPDRPVLKGLTFTLRPGEVTALVGPNGSGKSTVAALLQNLYQPTGGQVLLDEKPISQYEHCYLHSQVVSVGQEPVLFSGSVRNNITYGLQSCEDDKVMAAAQAAHADDFIQEMEHGIYTDVGEKGSQLAAGQKQRLAIARALVRDPRVLILDEATSALDVQCEQALQDWNSRGDRTVLVIAHRLQTVQRAHQILVLQEGKLQKLAQL

SEQ ID NO: 108864 - DNA, 2061 bp, Artificial Sequence
  derived and/or modified sequence
atgagactgcccgacctgagaccctggaccagcctgctgctggtggacgccgccctgctgtggctgctgcagggccccctgggcaccctgctgccccagggcctgcccggcctgtggctggagggcaccctgagactgggcggcctgtggggcctgctgaagctgagaggcctgctgggcttcgtgggcaccctgctgctgcccctgtgcctggccacccccctgaccgtgagcctgagagccctggtggccggcgccagcagagccccccccgccagagtggccagcgccccctggagctggctgctggtgggctacggcgccgccggcctgagctggagcctgtgggccgtgctgagcccccccggcgcccaggagaaggagcaggaccaggtgaacaacaaggtgctgatgtggagactgctgaagctgagcagacccgacctgcccctgctggtggccgccttcttcttcctggtgctggccgtgctgggcgagaccctgatcccccactacagcggcagagtgatcgacatcctgggcggcgacttcgacccccacgccttcgccagcgccatcttcttcatgtgcctgttcagcttcggcagcagcctgagcgccggctgcagaggcggctgcttcacctacaccatgagcagaatcaacctgagaatcagagagcagctgttcagcagcctgctgagacaggacctgggcttcttccaggagaccaagaccggcgagctgaacagcagactgagcagcgacaccaccctgatgagcaactggctgcccctgaacgccaacgtgctgctgagaagcctggtgaaggtggtgggcctgtacggcttcatgctgagcatcagccccagactgaccctgctgagcctgctgcacatgcccttcaccatcgccgccgagaaggtgtacaacaccagacaccaggaggtgctgagagagatccaggacgccgtggccagagccggccaggtggtgagagaggccgtgggcggcctgcagaccgtgagaagcttcggcgccgaggagcacgaggtgtgcagatacaaggaggccctggagcagtgcagacagctgtactggagaagagacctggagagagccctgtacctgctggtgagaagagtgctgcacctgggcgtgcagatgctgatgctgagctgcggcctgcagcagatgcaggacggcgagctgacccagggcagcctgctgagcttcatgatctaccaggagagcgtgggcagctacgtgcagaccctggtgtacatctacggcgacatgctgagcaacgtgggcgccgccgagaaggtgttcagctacatggacagacagcccaacctgcccagccccggcaccctggcccccaccaccctgcagggcgtggtgaagttccaggacgtgagcttcgcctaccccaacagacccgacagacccgtgctgaagggcctgaccttcaccctgagacccggcgaggtgaccgccctggtgggccccaacggcagcggcaagagcaccgtggccgccctgctgcagaacctgtaccagcccaccggcggccaggtgctgctggacgagaagcccatcagccagtacgagcactgctacctgcacagccaggtggtgagcgtgggccaggagcccgtgctgttcagcggcagcgtgagaaacaacatcgcctacggcctgcagagctgcgaggacgacaaggtgatggccgccgcccaggccgcccacgccgacgacttcatccaggagatggagcacggcatctacaccgacgtgggcgagaagggcagccagctggccgccggccagaagcagagactggccatcgccagagccctggtgagagaccccagagtgctgatcctggacgaggccaccagcgccctggacgtgcagtgcgagcaggccctgcaggactggaacagcagaggcgacagaaccgtgctggtgatcgcccacagactgcagaccgtgcagagagcccaccagatcctggtgctgcaggagggcaagctgcagaagctggcccagctgtag

SEQ ID NO: 108865 - DNA, 2061 bp, Artificial Sequence
  derived and/or modified sequence
atgagactgcccgacctgagaccctggaccagcctgctgctggtggacgccgccctgctgtggctgctgcagggccccctgggcaccctgctgccccagggcctgcccggcctgtggctggagggcaccctgagactgggcggcctgtggggcctgctgaagctgagaggcctgctgggcttcgtgggcaccctgctgctgcccctgtgcctggccacccccctgaccgtgagcctgagagccctggtggccggcgccagcagagccccccccgccagagtggccagcgccccctggagctggctgctggtgggctacggcgccgccggcctgagctggagcctgtgggccgtgctgagcccccccggcgcccaggagaaggagcaggaccaggtgaacaacaaggtgctgatgtggagactgctgaagctgagcagacccgacctgcccctgctggtggccgccttcttcttcctggtgctggccgtgctgggcgagaccctgatcccccactacagcggcagagtgatcgacatcctgggcggcgacttcgacccccacgccttcgccagcgccatcttcttcatgtgcctgttcagcttcggcagcagcctgagcgccggctgcagaggcggctgcttcacctacaccatgagcagaatcaacctgagaatcagagagcagctgttcagcagcctgctgagacaggacctgggcttcttccaggagaccaagaccggcgagctgaacagcagactgagcagcgacaccaccctgatgagcaactggctgcccctgaacgccaacgtgctgctgagaagcctggtgaaggtggtgggcctgtacggcttcatgctgagcatcagccccagactgaccctgctgagcctgctgcacatgcccttcaccatcgccgccgagaaggtgtacaacaccagacaccaggaggtgctgagagagatccaggacgccgtggccagagccggccaggtggtgagagaggccgtgggcggcctgcagaccgtgagaagcttcggcgccgaggagcacgaggtgtgcagatacaaggaggccctggagcagtgcagacagctgtactggagaagagacctggagagagccctgtacctgctgatcagaagagtgctgcacctgggcgtgcagatgctgatgctgagctgcggcctgcagcagatgcaggacggcgagctgacccagggcagcctgctgagcttcatgatctaccaggagagcgtgggcagctacgtgcagaccctggtgtacatctacggcgacatgctgagcaacgtgggcgccgccgagaaggtgttcagctacatggacagacagcccaacctgcccagccccggcaccctggcccccaccaccctgcagggcgtggtgaagttccaggacgtgagcttcgcctaccccaacagacccgacagacccgtgctgaagggcctgaccttcaccctgagacccggcgaggtgaccgccctggtgggccccaacggcagcggcaagagcaccgtggccgccctgctgcagaacctgtaccagcccaccggcggccaggtgctgctggacgagaagcccatcagccagtacgagcactgctacctgcacagccaggtggtgagcgtgggccaggagcccgtgctgttcagcggcagcgtgagaaacaacatcacctacggcctgcagagctgcgaggacgacaaggtgatggccgccgcccaggccgcccacgccgacgacttcatccaggagatggagcacggcatctacaccgacgtgggcgagaagggcagccagctggccgccggccagaagcagagactggccatcgccagagccctggtgagagaccccagagtgctgatcctggacgaggccaccagcgccctggacgtgcagtgcgagcaggccctgcaggactggaacagcagaggcgacagaaccgtgctggtgatcgcccacagactgcagaccgtgcagagagcccaccagatcctggtgctgcaggagggcaagctgcagaagctggcccagctgtag

SEQ ID NO: 108866 - DNA, 2061 bp, Artificial Sequence
  derived and/or modified sequence
atgaggctgccagacctaaggccttggacttctctgctgctggtcgatgcagcgttgctgtggctgctgcagggccctcttggcaccctcctaccgcagggactgccgggactgtggctggagggtaccctgcgactcgggggactgtggggcttgctgaagttgagaggcctgctgggttttgtgggcactttgctgctgcctctgtgcctggctactccactaaccgtgtcacttcgagcccttgtcgctggggccagccgggcacctccagctcgcgtggctagcgccccctggtcatggctgctagtgggttatggcgcggccggcctgtcctggagcctatgggccgtgttgtctcccccgggcgcacaagagaaagaacaagaccaggtgaacaacaaagtgctgatgtggcggttgctgaaactatctagaccggacctcccactcttggtcgctgcatttttctttctggtcctcgccgtgttaggggagacgctaatccctcattactcgggccgcgtcattgacattttgggaggggacttcgaccctcacgctttcgcctcggccatctttttcatgtgtctgtttagcttcggcagttcattatcagctgggtgtcgtggtgggtgttttacttatacaatgagcagaattaacctccggatcagggaacaactattttcttccctgcttcggcaagacttaggttttttccaggagactaagacaggggagctgaattcaagactttctagcgacacgactttgatgtccaattggcttcctctaaacgcaaacgtactgttaaggtcattggtgaaagtagtagggctgtatggttttatgctttccatttcgcccaggttgactctgttatctctgctgcacatgccattcacgatcgccgccgagaaggtatataacacacgccaccaggaggtgttgcgggagatccaagacgcagtggccagagccggccaggtggtccgcgaggcggtgggcggcctgcagacagtgagatccttcggggcagaggaacatgaagtatgccgctacaaggaagcgctggagcaatgccgccaactatattggaggagggatctcgaacgggccctgtacctgctcgtgcggcgtgttctgcatctgggggtacagatgctcatgctctcctgcggcctgcagcagatgcaagatggtgaactcacccagggctccctcctgagctttatgatatatcaggagtctgttggcagctatgttcaaacattggtctatatctacggagatatgctctcaaacgtcggcgctgcagagaaagtcttctcttatatggataggcagcccaatttgccctctccgggcacgctcgcccctaccacccttcagggcgtcgtcaagtttcaagatgtgtccttcgcctaccccaacaggcccgatcggcccgtcctcaaagggcttaccttcactctccgccccggggaggtgacagcactagtcggccccaacgggtctggcaaaagcacagtggccgccctacttcaaaatctctaccaaccgacaggtggccaggtcttactcgacgaaaagccaatatcacaatatgaacattgctacttgcatagtcaggtcgtgtcagtgggacaggagccagtgctgttctccggttctgtacgcaacaacattgcctacggattacagtcatgtgaggatgataaggtgatggcggcagcacaggccgcacatgccgatgattttattcaggagatggagcatgggatctatacagacgtcggcgaaaaaggctctcaactggctgccgggcagaaacagaggctggccattgcgcgggccctagtcagggaccccagagtactcatcctggatgaagctacatcagcactggacgtgcaatgcgagcaggccctccaggactggaacagccgcggagacagaactgtcttggtgattgctcaccgattgcagaccgtccagcgggcccaccaaatactggtgctccaagaaggcaaattacagaaactggcccagctctag

SEQ ID NO: 108867 - DNA, 2061 bp, Artificial Sequence
  derived and/or modified sequence
atgcgtctgccagatctcaggccatggacctccctgctcctggtggatgctgcccttctgtggttacttcagggtcctcttggcacactgctgccgcagggtctccccgggctctggctggaaggcactctgagactgggcggactctggggcctcttgaagcttcggggcctgctcgggtttgtgggcacactgctgcttcctttgtgcctggcgacacctctgacagtgtccctccgcgctctcgtggcgggcgcctctagggcgcctcccgccagagttgcatccgcaccctggagttggctgctggtggggtatggcgcagcaggattaagctggtctttgtgggctgtcctcagtcctccaggggcccaggagaaggagcaggatcaagttaacaataaagttttaatgtggcggctgcttaaactgtcacggccagatctgccactcttggtggcagctttttttttccttgttcttgcggtgctaggcgagactctgatcccacattattctgggcgagtgatcgatatacttggcggagacttcgacccccatgctttcgccagcgcaatattcttcatgtgtttgttttcatttggttcttctctatccgcagggtgccgaggagggtgcttcacttacacgatgtcaagaatcaaccttaggatccgagaacagctgttctctagcttgctccgacaggatctgggcttcttccaggagacaaaaaccggagaactaaattcaaggctgtcaagcgacacaactctgatgtcaaattggctccctctcaatgccaacgtgctgctgagatcccttgtaaaggtcgtaggcctctacggcttcatgctgtcaatctccccacgactgaccttgctgtccctactacacatgcccttcacaattgccgccgagaaggtctataatacacgacaccaagaggtactgcgagagatccaggacgctgtcgcccgtgcgggccaggtagtacgagaggccgttggaggactgcagaccgttcgaagtttcggcgcagaggaacacgaggtctgtagatataaggaagctcttgaacagtgcagacagctctattggcggagagatctggaacgcgccttgtacctgctggtgcggcgcgtacttcatctgggcgtgcagatgcttatgctatcatgtggactccagcaaatgcaggacggagaacttacacagggtagtcttctgtcctttatgatttaccaggagagcgttggaagctatgtgcagaccttggtgtacatttacggagacatgctgtctaacgttggagccgctgaaaaagtcttctcttacatggaccgccagcccaacttaccctcacccgggactctggctcccacaaccctccaaggggtagttaagtttcaggacgtcagcttcgcctatccaaatcggccggatcgccccgtgctgaagggtcttaccttcacattacggcctggggaagtcacagcactggtggggccgaatggttccggaaagagtactgttgccgccctgctccagaatctttaccaacctaccgggggacaggttctactggatgagaagccaatttcccagtacgagcattgctatttgcacagccaggtggtctccgtgggacaagagccagtactgttctcgggtagtgtacgaaacaacatcgcctacggcctgcagtcctgcgaagacgacaaggtcatggcagcagcccaggctgcccatgccgatgacttcattcaggaaatggaacatggtatatacactgatgtaggggagaaaggttcccagttggcagccggccaaaagcaaaggttagccatagcacgggcactcgtgcgagaccctcgcgtgttaatccttgatgaagccaccagtgctcttgacgtgcagtgcgaacaagcacttcaagactggaactcccggggagatagaaccgtgttagttatagctcacaggcttcagaccgtccagcgcgcgcaccagattctggtgctgcaggagggtaagctgcagaagcttgcccagctttag

SEQ ID NO: 108868 - DNA, 2061 bp, Artificial Sequence
  derived and/or modified sequence
atgaggctgccagatttgagaccgtggacctcgctcctgttagtggacgccgccctgctgtggcttctccaggggccactgggcacgttgctgccgcaggggctgcccgggctgtggttagagggcactctgaggcttggggggctgtggggactcttaaagctgcggggcctgctgggttttgttggcactttactcctgcccctctgcttggccactccgctcaccgtctctctcagggcgctcgtagccggtgcttcacgggccccacccgccagagtcgcctccgccccttggagctggctgctggtcgggtacggtgcggctggccttagttggtccctttgggccgtcttgagcccccccggtgcccaggaaaaggagcaagaccaagttaataataaagtattgatgtggaggctcctcaagctgtccaggcctgatctccctctcctggtcgccgcctttttttttctggtgctcgctgtgcttggggagactctcattccccattacagcggtagggtcattgacatcctaggtggagattttgacccccacgcctttgccagcgccatcttctttatgtgcctctttagtttcggctcctctctgtcagctggctgcagggggggctgcttcacctacactatgtcacgtattaatcttagaattagagagcagctgtttagctccctcctgcggcaggacctggggttttttcaggagaccaagactggggaattgaacagcagactcagctccgacacaaccctgatgtccaactggctgcccttgaacgccaacgtccttctccggtccctggtgaaagtggtgggcttgtatggtttcatgctttccatctccccccgactgacccttctgtcattgcttcacatgccatttacaattgccgcagagaaggtctataacactcgccatcaagaagtcctccgcgagatccaggatgccgttgcacgggctggccaagtcgttagagaggctgtggggggtttgcaaacggtgcgatcttttggcgccgaggagcacgaagtgtgtcgatacaaggaggcccttgagcagtgtcggcagctttactggcgtcgagacctggagcgggccctctatctgttagtgcgccgggttcttcacctcggcgtacagatgctgatgctgagctgtgggctccagcagatgcaggatggcgaactcacacagggatccctcctgtcattcatgatctaccaagagagcgtgggatcctacgtccagaccctggtgtatatctatggcgacatgctgtcgaacgtgggtgcagctgaaaaggtgttctcatatatggacagacagccaaacctgccaagtcctggtaccctcgcacccacaaccttacagggcgtcgtcaaatttcaggacgtatcttttgcctacccaaacaggcctgataggcctgtgctgaaaggtctcacattcaccttgcgccccggcgaggtaacagcacttgttgggcccaacggcagcggtaaaagtaccgtggccgcgttgctacagaacctctaccagccaacaggaggtcaagtactgctggacgagaaacccattagccagtatgaacattgttacctccactcccaggtggtaagcgtcgggcaggaacccgtgctgttcagcggctctgttagaaataatattgcttacggacttcagagttgcgaggatgataaagtgatggctgcggcacaagcagcccacgcagatgatttcatccaggaaatggaacatgggatttacacagatgtcggggaaaagggctcccaacttgccgcgggtcagaagcaacgcctcgcaatcgccagagccttagtccgggaccctcgggtgttgattctggacgaagccaccagtgcacttgatgtgcagtgtgaacaggcactgcaggattggaactcacgtggcgacagaaccgtactggtgatcgctcacagattgcagaccgtccagcgcgcgcatcaaattctggtgctccaggaaggaaaattgcagaaacttgcacaactctag

SEQ ID NO: 108869 - DNA, 2061 bp, Artificial Sequence
  derived and/or modified sequence
atgaggctccctgacctgcgcccatggacatcactgctgctggtggacgccgcactcctctggctcctccaaggtcccttgggcacccttctgccccaggggttgcctgggctgtggctcgaaggaacccttagactggggggactctggggcttacttaaattgcggggactcctcgggttcgttgggacactgctgctccccttgtgcctagccacacctttgactgtttctctcagagcgcttgtcgccggtgctagtcgagcgcccccagcgcgcgttgcaagtgctccttggagttggttgcttgtgggctacggagccgctggcctgagttggagcttgtgggccgtgctgagcccccccggcgcccaggaaaaggagcaggatcaagtcaacaacaaagtgttaatgtggagactgctgaaattgagtaggccagatctgccactccttgtagctgctttcttttttctcgttctggcggtgctgggcgaaacacttatcccacactattccggaagggtgattgacattttaggtggtgacttcgacccccatgcttttgcttctgcaatcttcttcatgtgcctgttttccttcggttctagcctgagcgctggctgtagagggggatgcttcacttataccatgagcagaattaacttgcggatccgcgaacagttgttcagctcactgctgaggcaggatctggggttctttcaggaaacgaaaaccggggaattgaactctcgtctcagctccgacaccaccctcatgagtaactggctgcccttgaacgctaacgtgctgctcagatcacttgtgaaagtggtcggtctgtatggcttcatgctgtctatcagtccacggctcaccctcctttcgctcctgcacatgccattcactatcgctgccgaaaaggtgtacaacactcgccatcaagaggtgttgagagaaattcaggacgcagtggcacgagcggggcaagtggttcgggaggctgtaggcggtctgcaaaccgtccggtcttttggggcagaagagcatgaggtctgtaggtacaaggaggctcttgaacagtgcaggcagctttactggaggagggacctggagagagccctttacctgttgatccgtcgggtcttacaccttggcgtgcagatgctgatgctcagctgcggactccaacagatgcaggatggagagctcactcagggatccctcttgagcttcatgatttatcaggagtccgtcgggagttacgtgcaaaccctagtgtatatatatggggatatgttaagcaacgtgggggcggccgaaaaggttttctcatatatggacaggcagcccaacctgccaagtccaggtaccctggcccccaccacactccagggcgtggttaagtttcaagatgttagctttgcataccccaaccggccggatcgcccagtcctgaagggcctgacctttacactgaggcccggggaagttacggcgctggtgggacccaacggcagcggcaagtccacagtggcagccctgctacagaatctatatcagcccacaggcggccaggtgttactcgacgagaagccaatcagccagtatgaacactgttacctccattcccaagtagtgtcagttgggcaagagcctgtactatttagcggctccgtaaggaacaatattacctatggtctgcagtcatgcgaggacgacaaagtgatggctgccgcccaggcagcccacgctgacgacttcatccaggagatggagcacggcatttacactgacgttggggaaaagggctctcaactggctgctggacaaaagcagagactggccattgcaagagcactcgttcgcgacccgcgtgtgctcattctagatgaggcgacttccgctctggacgtccagtgcgagcaagcccttcaggattggaactcccggggagaccggactgtgctcgtgattgcccaccgactacagacagtgcagagagctcaccaaatcttggttctccaagaggggaaactgcagaaacttgcccagctttag

SEQ ID NO: 108870 - DNA, 2061 bp, Artificial Sequence
  derived and/or modified sequence
atgaggttgccggatctgagaccgtggacttcccttctgcttgtagacgccgctctgctctggctgttacaagggcccctcggcaccttgctgccacaggggctccccggtctctggctggaggggactctgcgcctcggaggattgtggggactgctgaaactgcggggacttctgggctttgttggcaccctactcctgccactgtgtttggccacacccctgaccgtatccctcagagctctggtggctggcgcttcccgggcacccccggccagagtagcttcagctccatggagttggctgctcgtgggctacggtgcggcaggactttcgtggagtctgtgggctgtgctttccccccctggggcccaagagaaggaacaggaccaggtcaacaacaaggtgctcatgtggaggctgcttaagctgtccagacctgatctaccattgctggtggccgcattctttttccttgtgctcgccgtcctaggagagaccctaataccccactattccggaagggttattgacattctgggaggcgactttgatccacacgcttttgcatccgcaatattttttatgtgtctgttttcattcggcagcagcttgtctgccggctgtaggggcggatgttttacatacacgatgagtcgcatcaacttaagaattcgggagcagctattttcctccctgcttaggcaggacttggggttctttcaggaaactaagacaggggaactgaatagcaggctgtcgagcgataccactctcatgagtaactggttgcccttgaacgccaacgttctgctgaggagcttggtgaaagtggtgggactgtatggttttatgttgtccattagccctcggctgaccttgttatccttacttcatatgccctttactatcgccgcagagaaggtctataacactcgtcatcaagaagtgctccgtgagattcaggatgctgtggccagagccgggcaagtggtacgggaagccgtcggcggcctacagacggtaaggagcttcggtgccgaggaacatgaagtgtgccggtacaaggaggcgttggagcagtgtaggcagctctactggcgccgcgacctagagcgagccctgtacttgcttgtgcggcgggtgctgcacctcggagtgcaaatgcttatgttatcctgtggcttgcagcagatgcaggacggcgagttaacccagggctctctgctgagcttcatgatctatcaagagtcagtcggttcatacgtacaaacactagtgtacatttacggcgatatgctgagcaacgtaggcgctgcagagaaggttttcagttatatggatagacagcctaatcttcccagccccggcacccttgcacccacaacattgcagggggtggtaaagttccaggacgtcagctttgcatatccaaataggccagacagacctgtgctcaaagggctgaccttcaccctcaggcctggagaagtgacagccctggtgggccctaacgggtctggcaagtctactgtagccgctctgctgcaaaatttgtaccagccaacgggtggtcaggtgctgctggatgagaagccaatctctcagtatgaacactgttatctgcactcccaggtggtgagtgtcggtcaggagcccgtccttttttctgggtcagtgcgcaataacatagcttatggcctgcagagttgcgaagatgacaaagtgatggcggcggcacaggccgctcacgcagatgacttcatccaggaaatggagcacggcatatataccgatgtgggagagaaaggttcacagctggccgcgggtcaaaaacagcggcttgccattgctcgtgcacttgtgcgagacccccgtgtacttatcctggacgaggcaacatccgccctcgacgtccagtgtgagcaggccttacaggactggaacagccgtggcgatagaaccgtactggtgatcgcacacagacttcagactgtgcagcgagctcatcagatcctggtcctccaggagggtaagcttcaaaaattagcacaattatag

SEQ ID NO: 108871 - DNA, 2061 bp, Artificial Sequence
  derived and/or modified sequence
atgaggctgcctgacctgcggccctggaccagcctgctgctggtggatgctgccctgctgtggctgctgcagggccccctgggcaccctgctgccccagggcctgcccggcctgtggctggagggcaccctgcggctgggcggcctgtggggcctgctgaagctgcggggcctgctgggctttgtgggcaccctgctgctgcccctgtgcctggccacccccctgactgtgtccctgcgggccctggtggccggggccagccgggcccccccagcccgggtggccagcgccccctggagctggctgctggtgggctacggggctgctggcctgtcctggagcctgtgggccgtgctgagccccccaggggcccaggagaaggagcaggaccaggtgaacaacaaggtgctgatgtggaggctgctgaagctgagcaggccagacctgcccctgctggtggccgccttcttcttcctggtgctggccgtgctgggggagaccctcatcccccactacagcggccgggtgattgacatcctgggcggggactttgacccccacgcctttgccagcgccatcttcttcatgtgcctcttctcctttggcagcagcctgtctgctggctgccggggcggctgcttcacctacaccatgagccgcatcaacctgcgcatccgggagcagctgttcagcagcctgctgcggcaggacctgggcttcttccaggagaccaagacaggagagctgaacagccggctgagcagtgacaccaccctgatgagcaactggctgcccctgaatgccaacgtgctgctgcggagcctggtgaaggtggtgggcctgtatggcttcatgctgagcatcagcccccggctgaccctgctgagcctgctgcacatgcccttcaccatcgctgctgagaaggtgtacaacaccaggcaccaggaggtgctgcgggagatccaggatgctgtggcccgggccggccaggtggtgcgggaggccgtgggcggcctgcagacagtgcgcagctttggagctgaggagcacgaggtgtgccgctacaaggaggccctggagcagtgccggcagctgtactggaggcgggacctggagcgggccctgtacctgctggtgcggcgggtgctgcacctgggcgtgcagatgctgatgctgagctgtggcctgcagcagatgcaggatggagagctgacccagggcagcctgctgtccttcatgatctaccaggagagcgtgggcagctatgtgcagaccctggtgtacatctacggggacatgctgagcaatgtgggcgctgctgagaaggtgttctcctacatggaccggcagcccaacctgcccagccctggcaccctggcccccaccaccctgcagggcgtggtgaagttccaggatgtgtcctttgcctaccccaacagaccagacaggcctgtgctgaagggcctgaccttcaccctgcggcctggagaggtgacagccctggtgggccccaatggaagtggcaagagcacagtggccgccctgctgcagaacctgtaccagcccactggaggccaggtgctgctggatgagaagcccatcagccagtatgagcactgctacctgcacagccaggtggtgtctgtgggccaggagcctgtgctcttcagcggctctgtgaggaacaacatcgcctacggcctgcagagctgtgaagatgacaaggtgatggctgctgcccaggccgcccatgctgatgacttcatccaggagatggagcacggcatctacacagatgtgggggagaagggcagccagctggccgccggccagaagcagaggctggccatcgcccgggccctggtgcgggacccccgggtgctgatcctggatgaggccaccagcgccctggatgtgcagtgtgagcaggccctgcaggactggaacagcagaggagacagaacagtgctggtgattgcccaccggctgcagacagtgcagagggcccaccagatcctggtgctgcaggagggcaagctgcagaagctggcccagctgtag

SEQ ID NO: 108872 - DNA, 2061 bp, Artificial Sequence
  derived and/or modified sequence
atgaggctgcctgacctgcggccctggaccagcctgctgctggtggatgctgccctgctgtggctgctgcagggccccctgggcaccctgctgccccagggcctgcccggcctgtggctggagggcaccctgcggctgggcggcctgtggggcctgctgaagctgcggggcctgctgggctttgtgggcaccctgctgctgcccctgtgcctggccacccccctgactgtgtccctgcgggccctggtggccggggccagccgggcccccccagcccgggtggccagcgccccctggagctggctgctggtgggctacggggctgctggcctgtcctggagcctgtgggccgtgctgagccccccaggggcccaggagaaggagcaggaccaggtgaacaacaaggtgctgatgtggaggctgctgaagctgagcaggccagacctgcccctgctggtggccgccttcttcttcctggtgctggccgtgctgggggagaccctcatcccccactacagcggccgggtgattgacatcctgggcggggactttgacccccacgcctttgccagcgccatcttcttcatgtgcctcttctcctttggcagcagcctgtctgctggctgccggggcggctgcttcacctacaccatgagccgcatcaacctgcgcatccgggagcagctgttcagcagcctgctgcggcaggacctgggcttcttccaggagaccaagacaggagagctgaacagccggctgagcagtgacaccaccctgatgagcaactggctgcccctgaatgccaacgtgctgctgcggagcctggtgaaggtggtgggcctgtatggcttcatgctgagcatcagcccccggctgaccctgctgagcctgctgcacatgcccttcaccatcgctgctgagaaggtgtacaacaccaggcaccaggaggtgctgcgggagatccaggatgctgtggcccgggccggccaggtggtgcgggaggccgtgggcggcctgcagacagtgcgcagctttggagctgaggagcacgaggtgtgccgctacaaggaggccctggagcagtgccggcagctgtactggaggcgggacctggagcgggccctgtacctgctgatccggcgggtgctgcacctgggcgtgcagatgctgatgctgagctgtggcctgcagcagatgcaggatggagagctgacccagggcagcctgctgtccttcatgatctaccaggagagcgtgggcagctatgtgcagaccctggtgtacatctacggggacatgctgagcaatgtgggcgctgctgagaaggtgttctcctacatggaccggcagcccaacctgcccagccctggcaccctggcccccaccaccctgcagggcgtggtgaagttccaggatgtgtcctttgcctaccccaacagaccagacaggcctgtgctgaagggcctgaccttcaccctgcggcctggagaggtgacagccctggtgggccccaatggaagtggcaagagcacagtggccgccctgctgcagaacctgtaccagcccactggaggccaggtgctgctggatgagaagcccatcagccagtatgagcactgctacctgcacagccaggtggtgtctgtgggccaggagcctgtgctcttcagcggctctgtgaggaacaacatcacctacggcctgcagagctgtgaagatgacaaggtgatggctgctgcccaggccgcccatgctgatgacttcatccaggagatggagcacggcatctacacagatgtgggggagaagggcagccagctggccgccggccagaagcagaggctggccatcgcccgggccctggtgcgggacccccgggtgctgatcctggatgaggccaccagcgccctggatgtgcagtgtgagcaggccctgcaggactggaacagcagaggagacagaacagtgctggtgattgcccaccggctgcagacagtgcagagggcccaccagatcctggtgctgcaggagggcaagctgcagaagctggcccagctgtag

SEQ ID NO: 108873 - DNA, 2061 bp, Artificial Sequence
  derived and/or modified sequence
atgcggctgcccgacctgcggccctggaccagcctgctgctggtggatgcagcccttctgtggcttctacagggccctctaggtaccctgctgccccagggactgccaggactatggctggagggaactctgagactcggcggcttgtggggactccttaaattacgcgggctgttggggtttgtgggaacgctcctgttgccactctgcttggctaccccactgactgttagcctgagagccctggttgctggcgcttcacgggctccacccgcccgtgtggccagtgctccctggtcttggcttcttgtgggatatggtgctgccggtttatcatggtctttgtgggccgttctgtctcccccaggcgcccaggaaaaagaacaggatcaggtgaataacaaggtgcttatgtggagacttctcaaattgtccagaccggacctaccgctactggtcgccgcgttcttctttttagtactggccgtgctgggcgagactctcattccccattacagcggaagggttattgacatactgggcggcgattttgatccccatgctttcgcatccgccatcttctttatgtgcctgttttcctttggcagctcactgagcgcaggatgtaggggcgggtgcttcacatataccatgagcagaatcaatctcaggattcgggagcagttgtttagcagcctgctccgccaggatttgggattctttcaggagaccaagactggcgaactgaatagtaggctctcatctgatacaactcttatgtccaattggctaccacttaatgccaacgtcttgctacgatcattggtgaaggtggtggggctatacggatttatgctctcaattagccctcgtctgactctgctgtccctgctccatatgcctttcaccattgctgcagagaaggtgtacaacacccgccaccaggaggtcctgagggagattcaggacgccgtggctcgagccggccaggtggtgcgagaagctgtgggcggcctgcagaccgtgaggagttttggggccgaagaacacgaagtatgccggtataaggaggcccttgaacaatgccggcaattatactggcgcagagatttggagcgagcactgtacctactggtacggagagttttgcacttgggcgtccagatgctcatgctgagttgtggcctgcagcagatgcaagatggcgagctgactcaagggagcctactctcttttatgatttaccaggaaagcgtgggaagctacgtacaaaccctggtctacatatatggtgatatgctgagtaacgttggtgccgccgaaaaggtgtttagctacatggaccgacagccaaacctcccttccccgggaaccctggcccctacaacattgcagggggttgttaagttccaggatgtgtctttcgcctatcccaaccgacccgacagacccgtgttgaagggactcacttttacccttagaccaggggaagtgactgccctcgtcgggccaaatggcagtggcaaatctactgttgccgcactgctgcagaacttgtatcagcccaccggtgggcaagttcttctggatgagaagccaatctcgcagtacgagcattgttatctccacagccaggtagtgtcggtcggtcaggagcctgttctgttcagcgggagcgtgcgcaacaacatagcctacggactgcagtcatgtgaagatgacaaagttatggccgcagcccaggccgcacacgccgacgattttatccaggagatggaacatggcatctatactgatgtgggcgaaaaggggtcacaactcgcggccgggcagaagcaacgtcttgccatcgcccgtgccctggtgcgcgacccaagggtacttatcctggacgaggctacctccgccctggacgtccagtgtgaacaagccttgcaggattggaactctagaggggaccggaccgtgctcgtcatcgcccacagactacagacggtacagcgagcccaccagatcttggtccttcaggagggtaagctgcaaaaactggcacagctgtag

SEQ ID NO: 108874 - DNA, 2061 bp, Artificial Sequence
  derived and/or modified sequence
atgcggctgcccgacctgcggccctggaccagcctgctgctggtggatgccgcgctgctgtggctgcttcagggcccgctgggcactttgctcccccagggtctgcccggactatggttagaaggaacgctgcggcttggtgggctctgggggctattaaaacttagaggattgctagggtttgttggcaccctgctgctgccactgtgtcttgccacccctctcacagtgtctttacgcgccttggtagcaggggcatcgcgagcgcctcctgcgcgcgttgcgtctgccccctggtcgtggctgctggtgggttatggagcggcagggctcagttggtccctttgggcggttttgtcgccccccggtgcccaagagaaggaacaagatcaggtgaataacaaagtactgatgtggcgactgcttaagctgagccgccctgatctgcccttattggtcgccgctttttttttcctcgtcctggccgtgctaggagagacactgattccacactactccgggcgggttatagacatcttggggggtgacttcgacccacacgcttttgcctctgccatctttttcatgtgtctgttctcgttcggcagctccctcagcgctgggtgtcggggtggctgtttcacgtacacaatgagcagaataaatctgaggatcagagaacagctctttagcagtttgctgagacaagatttaggattttttcaggagacaaagaccggagagctgaactccaggttgagcagtgatactacgttaatgtccaactggctcccactgaacgccaatgtgctgcttcggtcactcgttaaggtggtggggctgtatgggtttatgctttcaatttcacctcgactgaccctgctttccctgctgcatatgccctttacaatcgctgccgaaaaagtctataacactcgacaccaggaagtgttgcgcgagatacaagatgcagtagctagggctggacaagtggttagggaagcagtgggtgggcttcaaactgtgcgatccttcggggccgaagagcacgaggtgtgtagatacaaagaagctctggagcaatgccgacagctctattggagaagggacttggaacgcgccctgtacctactggtccgccgcgtcctgcatctcggggtgcagatgctcatgctctcctgcggcctgcagcagatgcaggacggagaattgactcaaggcagcttgctgagcttcatgatttaccaagagtctgtggggagttacgtgcagactcttgtttatatatacggtgacatgctaagcaacgtcggggccgccgagaaggtgtttagctacatggacagacaacctaacctgcccagtcctggcacccttgcccctaccacactgcagggagtggttaaattccaggacgtgtcattcgcctaccctaataggccggaccgcccagtgcttaagggcttgactttcactcttcgccctggtgaggtcacggctctcgtgggaccaaacggtagcggaaagtcaactgttgctgcactactgcagaacctgtatcagcctactgggggtcaagttctgttagacgaaaagcccattagtcagtacgaacactgttatcttcacagtcaagtggtttccgtcggccaggaacccgttctgttctcaggttccgtgagaaacaatatcgcctatggactgcaaagctgtgaagatgataaggtgatggccgctgcacaggccgctcacgctgacgactttattcaggagatggaacacggcatctatacggatgtcggggagaaggggtcgcaactggctgccggtcagaagcagagactggctattgcacgcgcccttgtgagggatccccgggttctgatactcgatgaagcgacatctgcactggatgtccagtgtgagcaagctttgcaggattggaatagcaggggtgatcggactgtgctggtgatcgctcacagactgcagacagtgcaacgggcgcatcagatcctggtgctgcaggagggcaaactgcagaagctggcacagttatag

SEQ ID NO: 108875 - DNA, 2061 bp, Artificial Sequence
  derived and/or modified sequence
atgcggctgcccgacctgcggccctggaccagcctgctgctggtggacgccgccctgctgtggctgcttcagggtccactcggcactctattgcctcagggccttcctggcttgtggctggagggcaccctgcggcttggcggactatggggtctgctgaaactgcggggcttgttagggttcgtcggcaccctcctgttgccactctgtttagccactcctctgactgtgagcttacgggctttagtcgctggcgctagtagagccccccctgcccgagtggcctcagccccatggagctggctgttagtggggtacggtgcagccggtctatcttggagtctgtgggccgtgctgtctcctcctggagcgcaagagaaagaacaagaccaagtcaacaacaaagtcctgatgtggcgactgttaaagctctctaggcccgacctgcctctcctggtggctgccttcttctttctcgtgctggcagtgcttggggagacccttattccccactattcaggaagggtgattgatatcctcggaggcgacttcgatccacacgcatttgccagcgccatcttttttatgtgcctattttcctttgggtcatccctttctgcgggatgccggggaggctgtttcacatacaccatgtctaggattaacctgagaatcagggagcagctgttctctagtctgctccgccaggatctcgggttttttcaggaaaccaagacaggggagctcaactcccgattgagcagcgacactactttgatgtcaaattggctgccgctgaatgccaacgtcctgctacgttcacttgttaaagtggtcggcctatatggttttatgttaagcatatcacctagactgacattactgtctctcctacatatgccctttacaatcgccgccgagaaggtgtacaatactagacatcaggaggtccttagggaaattcaggacgctgtggcacgggcaggtcaggtggttcgcgaagcggttggcggacttcagacagtgcgaagctttggtgcagaggagcacgaggtgtgtcgctacaaagaggcactggaacaatgccgccagctgtactggaggcgggacttagaaagagccctctatctcctcgtaagaagggtgctccatctgggcgtgcaaatgctgatgttgagttgcggattgcagcagatgcaagatggggaactgacacaagggagccttctttcctttatgatctatcaggaatcagtgggctcctacgttcaaacactggtatatatttatggggacatgctgagcaacgtcggcgccgctgagaaggtgttcagctatatggatcgccagccaaatttaccaagcccaggcaccctggcacccaccaccttacagggggttgttaaattccaggacgtgtcctttgcatacccaaataggcctgaccgcccagtactcaaaggccttacgttcacgctcaggcctggagaagtgaccgcactggtgggcccgaatggttccggcaaaagcacagttgccgcgttgctgcagaacctgtatcagcctaccggcgggcaggttctactggatgagaagcccatcagccaatacgagcattgctatctgcatagccaggtagtgtcggtgggacaggagccggtgctgttttcaggttccgtaagaaacaacattgcctatgggctgcaatcctgcgaggacgataaggtgatggctgctgcccaggccgctcatgcggacgatttcatccaagaaatggaacatggcatttacacagatgttggtgaaaagggctctcaacttgccgccggccaaaaacagcgcctcgcaatcgcgcgtgctctcgtcagggatcctagagtcctgatccttgacgaggcaacctcagcacttgacgtgcagtgcgaacaggccctccaggattggaactcacggggggacaggactgtgctggttattgcccaccggctgcagactgtgcagagggcacatcagatcctagtgctgcaggaaggtaaactgcaaaagctggcgcagttgtag

SEQ ID NO: 108876 - DNA, 2061 bp, Artificial Sequence
  derived and/or modified sequence
atgcggctgcccgacctgcggccctggaccagcctgctgctggtggacgccgccctgctctggctgctgcaaggtcctttggggaccctgctgccccagggcctcccaggcctctggcttgaaggcacattgcggctcggtggcctgtggggactactaaagctgcgaggtcttttgggatttgtgggaacactgctacttcccttatgcctcgccacccccttaaccgtcagtctgcgcgcactggtggctggtgctagtagggctccgccagcgagggttgcaagcgctccgtggagttggctactggtgggttatggcgcggctggcctgagttggtccttgtgggcagtcctatctccacctggagcccaggaaaaggaacaagaccaagtcaataataaagtcctgatgtggagattactgaagctgtcgaggcccgacctgcccctgctggtggctgcttttttctttctggttcttgctgtcctcggggaaacattgatccctcattactccggacgcgtaatcgacatactgggtggcgactttgatccacatgcatttgcttccgctatattcttcatgtgcctgttcagcttcggaagttctctgtctgccgggtgtaggggagggtgcttcacgtatacaatgagcagaattaatctccgaatcagggaacagctcttctcctccttgttgcgacaggatcttggttttttccaggagactaaaacgggcgaactgaactcccgcctctccagcgacaccactctcatgtccaactggctccccctaaatgctaatgtgttattacggagcttggtcaaggtagtcggcctctacggatttatgttatctatatcccccaggctgacgcttttatccctactgcacatgccatttactatcgccgcagagaaagtatataacacacggcaccaggaggttttgcgagaaattcaagatgccgtcgccagagccggacaggtggtgcgcgaggccgtgggaggtctgcagaccgttcgttcttttggcgccgaggagcatgaggtgtgtaggtacaaagaggctctggaacagtgccgccagctctattggagacgggacctggagagggcactgtaccttttgatccggcgggtgctgcatctgggcgtacagatgctcatgctcagctgtgggctgcagcagatgcaggacggtgagttgacgcaaggctctttgttaagctttatgatttatcaagagagcgtaggtagttacgtgcaaaccctggtctacatctatggcgatatgttgagcaacgtgggagccgctgaaaaagttttcagctacatggatcgccagcccaatctgcccagcccagggacccttgctcctaccacattgcagggggttgttaaatttcaggacgtatctttcgcatatcccaaccggcccgatagacccgttctgaagggactgacatttactttacgccctggagaggtgactgcccttgtgggacccaacggtagcggtaaaagtacagtcgcagcactgctgcagaacctgtaccagccaactggcgggcaagtcctcctggacgagaaaccgataagtcagtatgagcactgctacctccacagccaagtggtttcagtgggccaggagccggttcttttttcaggctccgttcggaataacattacctatggcctgcagagctgcgaagacgacaaggtgatggccgcagctcaggcagcgcacgccgatgacttcattcaggagatggagcatggcatatacacagacgtcggagagaagggcagtcaattggccgctggtcaaaaacagcgtctcgccattgcccgtgcactagtgcgtgatcccagagttcttatcctcgacgaggctaccagcgcattggacgtccagtgcgagcaggccctccaggactggaactctaggggcgacaggactgtgctggtgatcgcacacagactccagaccgtacagcgggcacatcaaatacttgtgttgcaggaagggaagctgcagaagttagcacaactgtag
